United States Patent Application Publication US 2017/0114356 A1 - sequence listing, part 101

SEQ ID NO: 187543 - protein, 575 aa, Zea Mays
MMLRNNIVLKEPQFTYIVDMDVKKILNIEPRAWDFIARLEPKLGVVEYMTEEKLAVDLVSMLNVSSKGSNNVLGIRDTHSGMIYRQQKKPRVAVIGSGPSGLFASLVLGELGAEVTLLERGQPVEQRGRDIGALAVRRILQPESNFCFGEGGAGTWSDGKLMTRIGKNTDGVQAVMKTFVHFGAPPNILVDGKPHLGTDKLVPLLRKFRHHLRELGVTIRFNARVDDLIVEDGQVKGIVVSDVELQPGPASQKLAFDAVVMAVGHSARDTYSMLWQHNVDMSPKSFAVGLRIEHPQELINSIQYSELAAEVQRGRGRIPVADYKIVKSVGERDAENELDIAEPTRSCYSFCMCPGGQVVLTSTNPSELCINGMSFSRRASKWANSALVVTVSSHDFKPFQSHGPLAGVEFQRQFERRAAMMGGGNFVVPAQCVTDFISNRLSVTTLPPSSYRLGVRPSNLHELFPPYITEALQESLIMIDREMPGFVSSKALLHGVETRTSSPLQISRHGETYESTSLRGLYPTGEGAGYAGGILSAAVDGMYCGFALAKQLSLFHGDIEPFLGKTQKQTGFIKY

SEQ ID NO: 187544 - protein, 720 aa, Zea Mays
MAMAFAAASAWSLSLTAFSLPLPQSLRPKPSQLLHGATSSFPRPRRCGWGAVVRCAKRTGKQRYPSEKKRLNRRKQELLRQAAPEEGSKGRESGYWRLSKLAVPARDDPGKDFTGISLPLLQAIAKAIKFPVPSMLPDEAFTVIRKSFDARKVLKEPQFTYIVDMDVKKILNIEPRAWDFIARLEPKLGVVEYMTEEKLAVDLVSMLNVSSKGSNNVLGIRDTHSGMIYRQQKKPRVAVIGSGPSGLFASLVLGELGAEVTLLERGQPVEQRGRDIGALAVRRILQPESNFCFGEGGAGTWSDGKLMTRIGKNTDGVQAVMKTFVHFGAPPNILVDGKPHLGTDKLVPLLRKFRHHLRELGVTIRFNARVDDLIVEDGQVKGIVVSDVELQPGPASQKLAFDAVVMAVGHSARDTYSMLWQHNVDMSPKSFAVGLRIEHPQELINSIQYSELAAEVQRGRGRIPVADYKIVKSVGERDAENELDIAEPTRSCYSFCMCPGGQVVLTSTNPSELCINGMSFSRRASKWANSALVVTVSSHDFKPFQSHGPLAGVEFQRQFERRAAMMGGGNFVVPAQCVTDFISNRLSVTTLPPSSYRLGVRPSNLHELFPPYITEALQESLIMIDREMPGFVSSKALLHGVETRTSSPLQISRHGETYESTSLRGLYPTGEGAGYAGGILSAAVDGMYCGFALAKQLSLFHGDIEPFLGKTQKQTGFIKY

SEQ ID NO: 187545 - protein, 228 aa, Zea Mays
MAMAFAAASAWSLSLTAFSLPLPQSLRPKPSQLLHGATSSFPRPRRCGWGAVVRCAKRTGKQRYPSEKKRLNRRKQELLRQAAPEEGSKGRESGYWRLSKLAVPARDDPGKDFTGISLPLLQAIAKAIKFPVPSMLPDEAFTVIRKSFDARKVLKEPQFTYIVDMDVKKILNIEPRAWDFIARLEPKLGVVEYMTEEKLAVDLVNLVQKLPYWSVVSLLNREVVTLVH

SEQ ID NO: 187546 - protein, 434 aa, Zea Mays
MLAAARPLRRLSSSCSSSVGALRRVLLHPPAPPPSLQPPLSPLRTLTRALLPSLAAAHRFSTTSFSTSAPSRLGECVGVLGAPAIAEEEEGEETGALVRHDTDAYAAVELALDSVVKVFTVSSSPNYFLPWQNKAQRESMGSGFVIPGRRIVTNAHVVADHTFVLVRKHGSPTKYKAEVQAVGHECDLALLTVESEEFWDGVNSLELGDIPFLQEAVAVVGYPQGGDNISVTKGVVSRVEPTQYAHGATQLMAIQIDAAINPGNSGGPAIMGDKVAGVAFQNLSGAENIGYIIPVPVIKRFISGVEESGKYSGFCTLGVSCQATENIQLRECFGMRPEMTGVLVSRINPLSDAYKVLKKDDILLEFDGVPIANDGTVPFRNRERITFDHLVSMKKPEETAVLKVLRDGKEQELGVTLRPVSPCNLITFDFNLYF

SEQ ID NO: 187547 - protein, 379 aa, Zea Mays
MWTWCQRTFYYQFMMANGTLVRTLIHTDVTKYLSFKAVDGSYVFSKGKIYKVPATDMEALKSPLMGLFEKRRARNFFIYVQDYNEADPRTHQGLDLTRVTTRELIAKYGLSDDTVDFVGHALALHRDDRYLDEPALDTVKRMKLYADSLARFQGGSPYIYPLYGLGELPQGFARLSAVYGGTYMLNKPDCKVEFDMEGKVCGVTSEGETAKCKKVVCDPSYLQNKVRKIGRVVRAIAIMSHPIPNTNESHSVQIILPQKQLGRRSDMYVFCCSYTHNVAPRGKFIAFVSAEAETDNPQSELKPGIDLLGSVDEIFYDIYDRYEPVNEPSLDNCFVSTSYDATTHFETTVTDVLNMYTMITGKTVDLSVDLSAASAAEEY

SEQ ID NO: 187548 - protein, 282 aa, Zea Mays
MNSILFHMRKYGLSDDTVDFVGHALALHRDDRYLDEPALDTVKRMKLYADSLARFQGGSPYIYPLYGLGELPQGFARLSAVYGGTYMLNKPDCKVEFDMEGKVCGVTSEGETAKCKKVVCDPSYLQNKVRKIGRVVRAIAIMSHPIPNTNESHSVQIILPQKQLGRRSDMYVFCCSYTHNVAPRGKFIAFVSAEAETDNPQSELKPGIDLLGSVDEIFYDIYDRYEPVNEPSLDNCFVSTSYDATTHFETTVTDVLNMYTMITGKTVDLSVDLSAASAAEEY

SEQ ID NO: 187549 - protein, 190 aa, Zea Mays
MEKVRSAVRSVISDEVEKLKQSNTENEDQEMDVIWEYQGLHAAKPAEIESEDILLEMERLVCEDIREEVIRKQLEALDEEDAYLAQSVLDHMQLNDIEAAETAKLWCPVCKQGDLRETRNLIYCTLCNLRLDLGEDKMTLEFLRERLANAHMDHFDRGCKSAPKFCLQTMFGLTALYIQCAECSTFDIVV

SEQ ID NO: 187550 - protein, 127 aa, Zea Mays
MDSTGPMRVSIKAHRPDWKSELRTNCLRRVRKDRNDLLWKIRKQGLPGNVMEKVRSAVRSVISDEVEKLKQSNTENEDQEMDVIWEYQGLHAAKPAEIESEDILLEMERLVCEDIREEVIRKRCRNC

SEQ ID NO: 187551 - protein, 128 aa, Zea Mays
MDSTGPMRVSIKAHRPDWKSELRTNCLRRVRKDRNDLLWKIRKQGLPGNVMEKVRSAVRSVISDEVEKLKQSNTENEDQEMDVIWEYQGLHAAKPAEIESEDILLEMERLVCEDIREEVIRKLNHLQN

SEQ ID NO: 187552 - protein, 216 aa, Zea Mays
MDSTGPMRVSIKAHRPDWKSELRTNCLRRVRKDRNDLLWKIRKQGLPGNVMEKVRSAVRSVISDEVEKLKQSNTENEDQEMDVIWEYQGLHAAKPAEIESEDILLEMERLVCEDIREEVIRKQLEALDEEDAYLAQSVLDHMQLNDIEAAETAKLWCPVCKQGDLRETRNLIYCTLCNLRLDLGEDKRMQISTQVLFTDYVWPDCALHTVCRMQYI

SEQ ID NO: 187553 - protein, 119 aa, Zea Mays
MDSTGPMRVSIKAHRPDWKSELRTNCLRRVRKDRNDLLWKIRKQGLPGNVMEKVRSAVRSVISDEVEKLKQSNTENEDQEMDVIWEYQGLHAAKPAEIESEDILLEMERLVCEDIREEN

SEQ ID NO: 187554 - protein, 169 aa, Zea Mays
MDSTGPMRVSIKAHRPDWKSELRTNCLRRVRKDRNDLLWKIRKQGLPGNVMEKVRSAVRSVISDEVEKLKQSNTENEDQEMDVIWEYQGLHAAKPAEIESEDILLEMERLVCEDIREEVIRKQLEALDEEDAYLAQSVLDHMQLNDIEGEYLLNLHTSIVIWTLDPGQY

SEQ ID NO: 187555 - protein, 63 aa, Zea Mays
MDSTGPMRVSIKAHRPDWKSELRTNCLRRVRKDRNDLLWKIRKQGLPGNVMEKILTDVLTLRA

SEQ ID NO: 187556 - protein, 324 aa, Zea Mays
MLLGGAQIHQWKQWENGIKKDAPGNGPKVTNVHHHEFIKKRFKGIGKDSIILSWLHSFGKQFYRSVSKSDYTTMRLGFIMTHCPGNPKFDFHRYMVRVLEADFKKVVGISWYLWVFVVIFLLLNVNGWHTYFWIAFLPLILLLAIGTKLEHVIAQLAHDVAEKHTAVEGDVIVKPSDEHFWFGKPRVILYLIHFILFQNAFEIAFFFWILSTYGFDSCIMGQVRFIVPRLVIGVVIQLLCSYSTLPLYAIVTQMGSCYKKEIFNEHVQQGVLGWAQKVKMKKGLKGAASASKDESITNADSAGPSVKIEMAKAGEDVEIVGNTG

SEQ ID NO: 187557 - protein, 473 aa, Zea Mays
MAAEGEAAALEFTPTWIVAAVCSLIVLLSLVAERCLHYLGKTLKRKNQKPLFEALLKGMIRRTCIPERWTFHMLPCEKPDEKAGEAATMEHFVGTLGRIGRRLLQEGTAGAEQCQKKGKVPLLSLEAIHQLHIFIFVLAITHVIFSVTTMLLGGAQIHQWKQWENGIKKDAPGNGPKVTNVHHHEFIKKRFKGIGKDSIILSWLHSFGKQFYRSVSKSDYTTMRLGFIMTHCPGNPKFDFHRYMVRVLEADFKKVVGISWYLWVFVVIFLLLNVNGWHTYFWIAFLPLILLLAIGTKLEHVIAQLAHDVAEKHTAVEGDVIVKPSDEHFWFGKPRVILYLIHFILFQNAFEIAFFFWILSTYGFDSCIMGQVRFIVPRLVIGVVIQLLCSYSTLPLYAIVTQMGSCYKKEIFNEHVQQGVLGWAQKVKMKKGLKGAASASKDESITNADSAGPSVKIEMAKAGEDVEIVGNTG

SEQ ID NO: 187558 - protein, 464 aa, Zea Mays
MAAEGEAAALEFTPTWIVAAKPLFEALLKVKEELMLLGFISLLLTVFQGMIRRTCIPERWTFHMLPCEKPDEKAGEAATMEHFVGTLGRIGRRLLQEGTAGAEQCQKKGKVPLLSLEAIHQLHIFIFVLAITHVIFSVTTMLLGGAQIHQWKQWENGIKKDAPGNGPKVTNVHHHEFIKKRFKGIGKDSIILSWLHSFGKQFYRSVSKSDYTTMRLGFIMTHCPGNPKFDFHRYMVRVLEADFKKVVGISWYLWVFVVIFLLLNVNGWHTYFWIAFLPLILLLAIGTKLEHVIAQLAHDVAEKHTAVEGDVIVKPSDEHFWFGKPRVILYLIHFILFQNAFEIAFFFWILSTYGFDSCIMGQVRFIVPRLVIGVVIQLLCSYSTLPLYAIVTQMGSCYKKEIFNEHVQQGVLGWAQKVKMKKGLKGAASASKDESITNADSAGPSVKIEMAKAGEDVEIVGNTG

SEQ ID NO: 187559 - protein, 64 aa, Zea Mays
MLKLSWYYKLAPSGCWRRQDDDALFEVEFVIMMLQRICLKVEFVIMFPVSLGFTSINILVSRRR

SEQ ID NO: 187560 - protein, 609 aa, Zea Mays
MLPPAAAAAIRATAGLPRAVRRVHARLLKEGLADLPSAPALLVSAYARSCLLPDARRAFDDAPRRDLHLYSALLAAVSHSSDPELVLPLLRRMLSDDALRPDHFVLASLASAAGRLRSLRLGRQLHAHFAASPYSADNVVKSSLIDMYCKCGVPQDARKVFDSIGVKNSVVWTALISGYASNGCTGEALDLFQSMPAHGLFTWTALISGFVKAGNYTGAMGLFVEMRRDDIRIHDAFVLATVIGGAADLAALVLGRQLHGFVMRLGFLSSMIVGNALVDMYSKCSDIHSAREVFEGITVRDVISWTTILVGEAQHGRAEEVFALYNRMLLAGMKPNEVTFVGLIYACSHAGLVQKGRQLFDSMKREYGMKPGVQHYTCYLDLLSRSGYLSEAEKLITTMPYEPDEATWGALLSACKKHNDTQMCLRVADNLLELRPKDPSTYILLSNVYAVNCKWDSVAKVRKIMAEMEIRKVPGYSWVEAGRESRIFHAGEVPLDVGEEITCFLEELVSEMRKRGYVPDTSSVMHDLEEHEKEQHLFVHSERLAVAFGILKSPPGSVIRVVKNLRVCGDCHTVMKFISAIAQRKIIVRDASRFHHFEDVFLCPLHHLC

SEQ ID NO: 187561 - protein, 151 aa, Zea Mays
MHPIAGCFFNASSSPSAASSTRHRRLRRTTHDRALLASSVPSIVLRNLSVPASSTRRHPRPTVGSGELYTKLRWNFCATQVLSTPPWLGWRMKTSSRTLQQSPIAIATMRRLCGRRRATTPNQHSQPTTCGAGGGGATLERHCKWPLLTSS

SEQ ID NO: 187562 - protein, 65 aa, Zea Mays
MHQIVMSPDPAGTVLEPGALDRNNHHDRGVLTQEGSVKAPNCGRSTNNQLLYILLVLYNGGGYLS

SEQ ID NO: 187563 - protein, 232 aa, Zea Mays
MPLQSVKLSLWQKCGISLLNRVLRFKLYPAAFLFYAAVVFAAAFVLICHFVPQYGQTHIMVYIGICSLVGSLSVMSVKALGIALKVTFSGMNQLVYSQTWVFSFVVILCIVTQMNYLNKALDTFNTAVVSPIYYTMFTSLTILASVIMFKDWDRQNPTQIVTEMCGFVTILSGTFLLHKTKDMVDGLPPNLPIRLPKHADEDGYADDIIPLRSAADGIPLRSPRATDSFRSS

SEQ ID NO: 187564 - protein, 249 aa, Zea Mays
MLREKLHIFGILGCILCVVGSTTIVLHAPPERQIESVAEVWDLATEPAFLFYAAVVFAAAFVLICHFVPQYGQTHIMVYIGICSLVGSLSVMSVKALGIALKVTFSGMNQLVYSQTWVFSFVVILCIVTQMNYLNKALDTFNTAVVSPIYYTMFTSLTILASVIMFKDWDRQNPTQIVTEMCGFVTILSGTFLLHKTKDMVDGLPPNLPIRLPKHADEDGYADDIIPLRSAADGIPLRSPRATDSFRSS

SEQ ID NO: 187565 - protein, 233 aa, Zea Mays
MPLQSVKLSLWQKCGISLLNRVLCILLNLLPPFLFYAAVVFAAAFVLICHFVPQYGQTHIMVYIGICSLVGSLSVMSVKALGIALKVTFSGMNQLVYSQTWVFSFVVILCIVTQMNYLNKALDTFNTAVVSPIYYTMFTSLTILASVIMFKDWDRQNPTQIVTEMCGFVTILSGTFLLHKTKDMVDGLPPNLPIRLPKHADEDGYADDIIPLRSAADGIPLRSPRATDSFRSS

SEQ ID NO: 187566 - protein, 260 aa, Zea Mays
MGGAQLVGRWVESYTGMSPDNIKGLLLALSCSLFIGASFIVKKKGLKKAGASGVRAGVGGYSYLLEPLWWAGMVTMIVGEIANFAAYAFAPAILVTPLGALSIIISAVLAHIMLREKLHIFGILGCILCVVGSTTIVLHAPPERQIESVAEVWDLATEPAFLFYAAVVFAAAFVLICHFVPQYGQTHIMVYIGICSLVGSLSVMSVKALGIALKVTFSGMNQLVYSQTWVFSFVVILCIVTQMNYLNKLFHPYITQCLHP

SEQ ID NO: 187567 - protein, 410 aa, Zea Mays
MMGTFALLFSSISEPTVKSMEQTAINSSKIKQNSSKRFDFPSDVELNTLSATMDRLYVWEKRLHKEIMEEEKLRITYDKEWKRLKELDASGAEPYKIDSTRASIRALLTRINISIRSAKVISRRIHILRDDELHPHLVALIQGFVRMWKFILECHRKQFHTILETKSHILIPKNGPERSSSKVTLELEMELLNWCSCFRNWILSQKAYIEALNGWLVKWLPQEKEETPDGIAPFSPGRLGAPAAFVTANDWCQAMRRMPEPEGGVVDTMEAFAVNVHTLWERQDEEQRQQRLRADYLSSSRDFEKRIRSLQKEHGSQGQFDAGRAAVLPAVADNGRAVDNRMVALDSLHKGLDEQRARHEHEETVRQIREASAADLKAGLAPIFEALESFTAETLRGYENVRIPAKSIGG

SEQ ID NO: 187568 - protein, 906 aa, Zea Mays
MGCRSSRLDAADVSPAAALCRERRDLLRAAADHRARLAAAHAAYFRALPRVADALARFASHHHAATPPGSPVLTLPPPSDHADADADAEPKKQRSGSASGSATPHTGSGHSHIHFHSDDSSESDPDSSTDPCAGPGGCGAGHVDGDGDGDGEVPRPAPALRPGVPLPGRGGHGEPQERQIQDPAFARPEMPWEYASYDPYPSFPNTEFQNATFPRYYYMKASSTPANTVYQEPYGYGNFATSSSYMGYNNPMYGVPLQPDGDRPVEDRGRESVAPPPAAPPPMPMPETSPWDFFNPFDSYEQELPQYRGKGYDSNGSFTSSPNSSEVRAREGIPELEEETELESMRESVKARKAVESTASNRIDNADVSAKVKVSMEHKEVEIESVYSVSVLESGDESVCSCDCDHANTRTEGPMQVPAGDDQGGKVSSEDHSSIVVGEDVWPPEITGTRDVAVVVEEIKEQFKSVAACGDDVARILEVGRMQYRSRNRVLRLIFSRMMGTFALLFSSISEPTVKSMEQTAINSSKIKQNSSKRFDFPSDVELNTLSATMDRLYVWEKRLHKEIMEEKLRITYDKEWKRLKELDASGAEPYKIDSTRASIRALLTRINISIRSAKVISRRIHILRDDELHPHLVALIQGFVRMWKFILECHRKQFHTILETKSHILIPKNGPERSSSKVTLELEMELLNWCSCFRNWILSQKAYIEALNGWLVKWLPQEKEETPDGIAPFSPGRLGAPAAFVTANDWCQAMRRMPEPEGGVVDTMEAFAVNVHTLWERQDEEQRQQRLRADYLSSSRDFEKRIRSLQKEHGSQGQFDAGRAAVLPAVADNGRAVDNRMVALDSLHKGLDEQRARHEHEETVRQIREASAADLKAGLAPIFEALESFTAETLRGYENVRIPAKSIGG

SEQ ID NO: 187569 - protein, 146 aa, Zea Mays
MEDVVKFVFGVSGNVIALFLFLSPVPTFWRIIRRKSTEDFSGVPYSMTLLNCLLSAWYGLPFVSPNNMLVSTINGAGAAIEAVYVVIFLAFASSQRTRLRMLGLASAVSAAFAAVALASMLALHGQGRKLMCGLAATVCSICIGWW

SEQ ID NO: 187570 - protein, 166 aa, Zea Mays
MKSDIRSYVQSCSICQQAKPERVNYPGLLQPLPIPLQAWHTISLDFIEGLPRSAHFNCILVVVDKFSKYGHFLPLSHPFTAAKVAKVFLDNIYQLHGLPTNIISNRDRIFTSTFWQALFQLSGTKLCMSSAYHPQSDGQTERLNQCLETFLRCFVHTCPTKWSHGM

SEQ ID NO: 187571 - protein, 193 aa, Zea Mays
MALLRGLQSGEEYKTTFQTHIGHYEFRVMAFGLTGAPNTFLGAMNETLKTILKRDKWKVKLSKCDFAKQQIAYLGHIINAQGEHQHAFDILKAALISAHVLALPDFTKPFNIHTDASQHGVGAILMQQSHLLAFLSRVLGPKNQGLSTYEKEYMAILLAVNQWRSYHQLAEFTIHTDHISLTQLNEQRLHTPW

SEQ ID NO: 187572 - protein, 217 aa, Zea Mays
MPEIAATGNNATLFNSGVMVVEPSNCTFRLLMDHIDEITSYNGGDQGYLNEIFTWWHRVPRHMNFLKHFWEGDSEAMKAKKTQLFGADPPVLYVLHYLGLKPWLCFRDYDCNWNNAGMREFASDVAHARWWKVHDRMPRKLQSYCLLRSRQKARLEWDRRQAEKANSQDGHWRLNVTDTRLKTCFEKFCFWESMLWHWGENSNRTKSVPMAATTARS

SEQ ID NO: 187573 - protein, 418 aa, Zea Mays
MGSLTDIGVSAGLNILSAVGFLLAFAVLRIQPINDRVYFPKWYLKGTRSSPRQLGNVFLKFVNADFSTYIRFLNWMPAALKMPEPELIEHAGLDSAVYVRIYLLGLKIFVPIALLAFAVLVPVNWTSGTLENEKGLSYDQIDKLSISNLGKGSKRFWAHIAMSYVFTFWTFFVLYHEYKVVTTMRLRFLANQNRRPDQYTVLVRNVPPDPDESVSEHVEHFFAVNHRDHYLSHQIVYNANHLSGLVEKKKGLQNWLIYYENKHAKNPAKRPKIKTGLWGLWGQRVDAIEYYQKEIEDLCKQEDEERQKVVNDPNYIMPAAFVSFKTQWGAAVCAQTQQTSNPTVWLTEWAPEPRDVFWANLAIPFVELSVRRLIVAVAFFFLTFFFMIPIAIVQSLANLDDIVKVLPFLKPIIERCTD

SEQ ID NO: 187574 - protein, 670 aa, Zea Mays
MGSLTDIGVSAGLNILSAVGFLLAFAVLRIQPINDRVYFPKWYLKGTRSSPRQLGNVFLKFVNADFSTYIRFLNWMPAALKMPEPELIEHAGLDSAVYVRIYLLGLKIFVPIALLAFAVLVPVNWTSGTLENEKGLSYDQIDKLSISNLGKGSKRFWAHIAMSYVFTFWTFFVLYHEYKVVTTMRLRFLANQNRRPDQYTVLVRNVPPDPDESVSEHVEHFFAVNHRDHYLSHQIVYNANHLSGLVEKKKGLQNWLIYYENKHAKNPAKRPKIKTGLWGLWGQRVDAIEYYQKEIEDLCKQEDEERQKVVNDPNYIMPAAFVSFKTQWGAAVCAQTQQTSNPTVWLTEWAPEPRDVFWANLAIPFVELSVRRLIVAVAFFFLTFFFMIPIAIVQSLANLDDIVKVLPFLKPIIERNSLKSVIQGFLPGIILKIFLILLPTILMAMSKIEGHTSLSGLDRKTATKYYIFLFVNVFLGSVITGTAFQQLDNFIHQSANKIPEVVGESIPMKAAFFMTYIMVDGWSGIAAEVLRLKALVIFHIKNAFLVRTEHDREQAMDPGSLDFYNCEPRLQLYFLLGLVYAVVTPMLLPFIIVFFSLAYLVFRHQDAMVKDTLERAHDPTLNLREYLKGAYVHPVFQKNDIYKVIAVDEEEKNPMVVTKRQSRMNAPAGS

SEQ ID NO: 187575 - protein, 92 aa, Zea Mays
MARNPGCTVFIGNLDDKVPERVLYEILIQVGRVVDLHIPRDKETSRPKGYAFAEYETEEIAQYAVKLFSGLVRLHNKTLRFAVRFFLLPHFT

SEQ ID NO: 187576 - protein, 64 aa, Zea Mays
MRSSDTPLPQHAAVNGRNAGYGIPPNHSYDTHTQAQAFVIRPIGSQGDQVIPFLLPGCCPVFAS

SEQ ID NO: 187577 - protein, 696 aa, Zea Mays
MDVASTIPFQSLAYLITGEVRENAAYSMLGVLRLWRLRRVKQLFTRLEKDIRFSYFWIRSARLIAVTLFLVHCAGCLYYLIADRYPDREKTWIGAVNPNFRQASLRIRYISSVYWSITTMTTVGYGDLHAQNTVEMIFNIFYMLFNLGLTAYLIGNMTNLVVEGTRRTMEFRNSVRTASSFVGRNHLPPRLKQQILAYMCLKFRAESLNQQQLMDQLPKSICKSICEHLFVPVVKDVYLFKGVSREMLLSLATKMKPEYIPPKEDVIVQNEAPDDVYVVVSGEVEVVLFDGVDERVEATLGTRNIFGEVSALSDRPQAPFTFRTRTLSQLLRLKQATLKEAMQSWPDDSVIIIKNYVKHQVEMHGMKADDSLGDNTSEHDDDANVLTVAAMGNSGLLEDLLRAGKDADVGDAMGRTALHIAASKGYEDCVLVLLKHACNANIRDAQGNTAMWNAIAAGHHKIFNILYHSARASNPHAGGDVMCLATRRGDLDALRELLKLGLDVDSEDHDGATALRVAMAEGHADAARFLITNGASVDKASLDDDGSGSGAARLTMSPTELHELLQKRELVHSITITDSPPVVPDGGSSGHSRPGRLQSTGSDNTRWPRVSIYRGHPFLRNRSSEAGKLINLPATMEEFIAVVGEKLKVDTEKALIVNDEGAEVDSIDVIRDNDKLFVVTEEDLTRLAPMDSVPSS

SEQ ID NO: 187578 - protein, 81 aa, Zea Mays
MSCDSQSKTSVSSSSRAHTKVDLSKLELTALLRYWRHFNLDACPNPSREQLVDAVQRHFTAQVIVSFVQAAKRLKTTMKVA

SEQ ID NO: 187579 - protein, 217 aa, Zea Mays
MPLNIDIDLFKLDIDELIADYSKENCTSLFEFKRVWMGKKFSYIYEGRPKTNSGLFMQSLFLHCIGYLTSQSSLHQRLAGLYCLYCLYECQPYKPQFKIYLSLEECRQLKDIVVMAKQNGLQLVPALVKRMLDKDMFLFGYMNLIDDNGDKQVEELTALQNKRVKFACDKLFANTQAERYLHMDLGAEFELDSIKKLSKEYAEAKELALAVTKKRKK

SEQ ID NO: 187580 - protein, 296 aa, Zea Mays
MDRENCTSLFEFKRVWMGKKFSYIYEGRPKTNSGLFMQSLFLHCIGYLTSQSSLHQRLAGLYCLYCLYECQPYKPQFKIYLSLEECRQLKDIVVMAKQNGLQLVPALVKRMLDKDMFLFGYMNLIDDNGDKQVEELTALQNKRVKFACDKLFANTQAERYLHMDLGAEFELDSIKKLSKEYAEAKELALAGACPLPLSDMCIFLLLYSERLLGDKIDEVVKEWDVQKEGFYERTGLSSSPGDQLMAIDNDESGAQCHEDGSRGDQLMAVDNDESGVQDHEDLDDDDGFAELELLLE

SEQ ID NO: 187581 - protein, 295 aa, Zea Mays
MDRENCTSLFEFKRVWMGKKFSYIYEGRPKTNSGLFMQSLFLHCIGYLTSQSSLHQRLAGLYCLYCLYECQPYKPQFKIYLSLEECRQLKDIVVMAKQNGLQLVPALVKRMLDKDMFLFGYMNLIDDNGDKQVEELTALQNKRVKFACDKLFANTQAERYLHMDLGAEFELDSIKKLSKEYAEAKELALAEASQTVEVDDAKHLLQSERLLGDKIDEVVKEWDVQKEGFYERTGLSSSPGDQLMAIDNDESGAQCHEDGSRGDQLMAVDNDESGVQDHEDLDDDDGFAELELLLE

SEQ ID NO: 187582 - protein, 279 aa, Zea Mays
MGKKFSYIYEGRPKTNSGLFMQSLFLHCIGYLTSQSSLHQRLAGLYCLYCLYECQPYKPQFKIYLSLEECRQLKDIVVMAKQNGLQLVPALVKRMLDKDMFLFGYMNLIDDNGDKQVEELTALQNKRVKFACDKLFANTQAERYLHMDLGAEFELDSIKKLSKEYAEAKELALAEASQTVEVDDAKHLLQSERLLGDKIDEVVKEWDVQKEGFYERTGLSSSPGDQLMAIDNDESGAQCHEDGSRGDQLMAVDNDESGVQDHEDLDDDDGFAELELLLE

SEQ ID NO: 187583 - protein, 327 aa, Zea Mays
MAPEARGEAALVYRDALAPVEERVRDLLGRMTLREKAAQMAQIERTVATPRALTELGAGSVLNAGGSTPCEQASPADWAAMVDGFQRLAISSRLGVPILYGTDAIHGHNNVYGATVFPHNVGLGACRDGELARRIGEATALEVRATGIHWTFAPCVAVCRDPRWGRCYESYSEDPEIVRSLTTIVSGLQGQPPADHPHGYPFLASPRENVLACAKHFVGDGGTDKGVNEGNAICSYEDLEAIHMTPYPDCIAQGVATVMASYSKWNGEPLHSSRYLLTDVLKGKLGFKGFLISDWEGIDRICEPQKPRGSDYRYCIAQSVNAGMDMV

SEQ ID NO: 187584 - protein, 263 aa, Zea Mays
MTPYPDCIAQGVATVMASYSKWNGEPLHSSRYLLTDVLKGKLGFKGFLISDWEGIDRICEPQKPRGSDYRYCIAQSVNAGMDMIMIPHRFEKFLDDIVFLVEAGEIPMSRIDDAVERILRVKFISGVFEHPFSDQSLLDIVGCKEHRLLAREAVRKSLVLLKNGKDQNKPFLPLAKDAKRILVAGTHADDIGYQCGGWTIAWHGDSGKITLGTSILEAIQELVGVQTEVVYEKCPTEAMIETGGFSYAVVVVGEVPYAEWDRR

SEQ ID NO: 187585 - protein, 412 aa, Zea Mays
MDSASSPAHAVNCPVLATLNFHMTELEVMPVDLELLAKSCKSLISLKIGDCDLSDLIGFFQSATSLEEFAGGTFNGQGELTKYGDVKFPSRICSLGLTFMGANEMPIIFPFSAILKKLDLQYTFLTTEDHCQLIAKCPNLLVLAVRNVIGDRGLGVVADTCKKLQRLRIERGDDEGGVQEEQGGVSQVGLTAIAVGCRELEYIAAYVSDITNGALESIGTFCKKLYDFRLVLLDREERITDLPLDNGVRALLRGCTMLRRFALYLRPGGLSDAGLGYIGQCSGNIQYMLLGNVGETDDGLISFALGCVNLRKLELRSCCFSERALALAILSMPSLRYVWVQGYKASQTGRDLMLMARPFWNIEFTPPSSQNAGRLIEDGEPCVDSHAQILAYGSLAGKRLDCPQSVVTLYPA

SEQ ID NO: 187586 - protein, 150 aa, Zea Mays
MFLLALEPSSLAKAIYPVLISYSSPDKQAFPRHTLSRAALIMSESPIFLLDTFTNLIVYYSSTADPSFPFPPPRDCLLRTTINKLKQDRCITPKLTFIHGGEDDSTLFESYLIEEQDVDGSGLTTGSGFVAFRESVRNVAGEIIQEEIGS

SEQ ID NO: 187587 - protein, 518 aa, Zea Mays
MAVRATVSRFPATPEALESCAVQWGVAVTPFAAVDERGQPPTTGAGGDRIPRCEHCWAYLSSHCDLERWGWTCALCGTLNGFDDEAERRFQRPDACPELNSSFVDLEIAVDEAGAGGDGVQALPVYVAAVDLACSEEFLELIKSALLAALEALIPGSLFGLMTFSHKIGLYDVQGPIPLVKNVFIPPDLEEDGLPVALEDAMPLLSFLAPVDTCKDRIAAALETLRPTSSWERGAASGHEEDAVLLGGRGFGTAMSALIEYLSSGYGSTFALARVFAFLSGAPDYGAGLLDTRRYGEQYASKGVDANLALLPEQIPFYRDLAAVAVQSGVCIDIFAVTDEYTDLASLKFLSIESGGYLFLYANADDSTLPQDIYRLLSRPYAFGCVLRLRTSSDFEPGNSYGHFFPDPQYESVQHIICCDSFATYAYDFEFSHNNGFSRHTDPAVVQIAFQYSVIEPAKETSGDGSQSSASYKFSLKRRLRIRTLQYRPARNISEIYDSVDPEVVLHILVHKPGIIRS

SEQ ID NO: 187588 - protein, 550 aa, Zea Mays
MAVRATVSRFPATPEALESCAVQWGVAVTPFAAVDERGQPPTTGAGGDRIPRCEHCWAYLSSHCDLERWGWTCALCGTLNGFDDEAERRFQRPDACPELNSSFVDLEIAVDEAGAGGDGVQALPVYVAAVDLACSEEFLELIKSALLAALEALIPGSLFGLMTFSHKIGLYDVQGPIPLVKNVFIPPDLEEDGLPVALEDAMPLLSFLAPVDTCKDRIAAALETLRPTSSWERGAASGHEEDAVLLGGRGFGTAMSALIEYLSSGYGSTFALARVFAFLSGAPDYGAGLLDTRRYGEQYASKGVDANLALLPEQIPFYRDLAAVAVQSGVCIDIFAVTDEYTDLASLKFLSIESGGYLFLYANADDSTLPQDIYRLLSRPYAFGCVLRLRTSSDFEPGNSYGHFFPDPQYESVQHIICCDSFATYAYDFEFSHNNGFSRHTDPAVVQIAFQYSVIEPAKETSGDGSQSSASYKFSLKRRLRIRTLQYRPARNISEIYDSVDPEVVLHILVHKVILECVDKGVREGRHQVHAWLSLLAARFKRYLNLFLHC

SEQ ID NO: 187589 - protein, 729 aa, Zea Mays
MAVRATVSRFPATPEALESCAVQWGVAVTPFAAVDERGQPPTTGAGGDRIPRCEHCWAYLSSHCDLERWGWTCALCGTLNGFDDEAERRFQRPDACPELNSSFVDLEIAVDEAGAGGDGVQALPVYVAAVDLASLIPGSLFGLMTFSHKIGLYDVQGPIPLVKNVFIPPDLEEDGLPVALEDAMPLLSFLAPVDTCKDRIAAALETLRPTSSWERGAASGHEEDAVLLGGRGFGTAMSALIEYLSSGYGSTFALARVFAFLSGAPDYGAGLLDTRRYGEQYASKGVDANLALLPEQIPFYRDLAAVAVQSGVCIDIFAVTDEYTDLASLKFLSIESGGYLFLYANADDSTLPQDIYRLLSRPYAFGCVLRLRTSSDFEPGNSYGHFFPDPQYESVQHIICCDSFATYAYDFEFSHNNGFSRHTDPAVVQIAFQYSVIEPAKETSGDGSQSSASYKFSLKRRLRIRTLQYRPARNISEIYDSVDPEVVLHILVHKVILECVDKGVREGRHQVHAWLSLLAARYNQVLSSDVRTPLSSIDIDFSQCPQLQTIPQLVFALLRSPLLRLHEEGVHPDYRIYLQCLFSALEPSSLAKAIYPVLISYSSPDKQAFPRHTLSRAALIMSESPIFLLDTFTNLIVYYSSTADPSFPFPPPRDCLLRTTINKLKQDRCITPKLTFIHGGEDDSTLFESYLIEEQDVDGSGLTTGSGFVAFRESVRNVAGEIIQEEIGS

SEQ ID NO: 187590 - protein, 546 aa, Zea Mays
MPLLSFLAPVDTCKDRIAAALETLRPTSSWERGAASGHEEDAVLLGGRGFGTAMSALIEYLSSGYGSTFALARVFAFLSGAPDYGAGLLDTRRYGEQYASKGVDANLALLPEQIPFYRDLAAVAVQSGVCIDIFAVTDEYTDLASLKFLSIESGGYLFLYANADDSTLPQDIYRLLSRPYAFGCVLRLRTSSDFEPGNSYGHFFPDPQYESVQHIICCDSFATYAYDFEFSHNNGFSRHTDPAVVQIAFQYSVIEPAKETSGDGSQSSASYKFSLKRRLRIRTLQYRPARNISEIYDSVDPEVVLHILVHKVILECVDKGVREGRHQVHAWLSLLAARYNQVLSSDVRTPLSSIDIDFSQCPQLQTIPQLVFALLRSPLLRLHEEGVHPDYRIYLQCLFSALEPSSLAKAIYPVLISYSSPDKQAFPRHTLSRAALIMSESPIFLLDTFTNLIVYYSSTADPSFPFPPPRDCLLRTTINKLKQDRCITPKLTFIHGGEDDSTLFESYLIEEQDVDGSGLTTGSGFVAFRESVRNVAGEIIQEEIGS

SEQ ID NO: 187591 - protein, 732 aa, Zea Mays
MAVRATVSRFPATPEALESCAVQWGVAVTPFAAVDERGQPPTTGAGGDRIPRCEHCWAYLSSHCDLERWGWTCALCGTLNGFDDEAERRFQRPDACPELNSSFVDLEIAVDEAGAGGDGVQALPVYVAAVDLACSEEFLELIKSALLAALEALIPGSLFGLMTFSHKIGLYDVQGPIPLVKNVFIPPDLEEDGLPVALEDAMPLLSFLAPVDTCKDRIAAALETLRPTSSWERGAASGHEEDAVLLGGRGFGTAMSALIEYLSSGYGSTFALARVFAFLSGAPDYGAGLLDTRRYGEQYASKGVDANLALLPEQIPFYRDLAAVAVQSGVCIDIFAVTDEYTDLASLKFLSIESGGYLFLYANADDSTLPQDIYRLLSRPYAFGCVLRLRTSSDFEPGNSYGHFFPDPQYESVQHIICCDSFATYAYDFEFSHNNGFSRHTDPAVVQIAFQYSVIEPAKETSGDGSQSSASYKFSLKRRLRIRTLQYRPARNISEIYDSVDPEVVLHILVHKVILECVDKGVREGRHQVHAWLSLLAARYNQVLSSDVRTPLSSIDIDFSQCPQLQTIPQLVFALLRSPLLRLHEEGVHPDYRIYLQCLFSALEPSSLAKAIYPVLISYSSPDKQAFPRHTLSRAALIMSESPIFLLDTFTNLIVYYSSTADPSFPFPPPRDCKYIVFHFPVHILSSTYILSQKKNCSNLQTIFFLEQRRRSACRFIKKSRNRIVQHGRTKY

SEQ ID NO: 187592 - protein, 499 aa, Zea Mays
MAVRATVSRFPATPEALESCAVQWGVAVTPFAAVDERGQPPTTGAGGDRIPRCEHCWAYLSSHCDLERWGWTCALCGTLNGFDDEAERRFQRPDACPELNSSFVDLEIAGAGGDGVQALPVYVAAVDLACSEEFLELIKSALLAALEALIPGSLFGLMTFSHKIGLYDVQGPIPLVKNVFIPPDLEEDGLPVALEDAMPLLSFLAPVDTCKDRIAAALETLRPTSSWERGAASGHEEDAVLLGGRGFGTAMSALIEYLSSGYGSTFALARVFAFLSGAPDYGAGLLDTRRYGEQYASKGVDANLALLPEQIPFYRDLAAVAVQSGVCIDIFAVTDEYTDLASLKFLSIESGGYLFLYANADDSTLPQDIYRLLSRPYAFGCVLRLRTSSDFEPGNSIAFQYSVIEPAKETSGDGSQSSASYKFSLKRRLRIRTLQYRPARNISEIYDSVDPEVVLHILVHKVILECVDKGVREGRHQVHAWLSLLAARFKRYLNLFLHC

SEQ ID NO: 187593 - protein, 452 aa, Zea Mays
MAVRATVSRFPATPEALESCAVQWGVAVTPFAAVDERGQPPTTGAGGDRIPRCEHCWAYLSSHCDLERWGWTCALCGTLNGFDDEAERRFQRPDACPELNSSFVDLEIAVDEAGAGGDGVQALPVYVAAVDLACSEEFLELIKSALLAALEALIPGSLFGLMTFSHKIGLYDVQGPIPLVKNVFIPPDLEEDGLPVALEDAMPLLSFLAPVDTCKDRIAAALETLRPTSSWERGAASGHEEDAVLLGGRGFGTAMSALIEYLSSGYGSTFALARVFAFLSGAPDYGAGLLDTRRYGEQYASKGVDANLALLPEQIPFYRDLAAVAVQSGVCIDIFAVTDEYTDLASLKFLSIESGGYLFLYANADDSTLPQDIYRLLSRPYAFGCVLRLRTSSDFEPGNSYGHFFPDPQYESVQHIICCDSFATYAYDFEFSHNNGFSRSCCCADRFSVQRD

SEQ ID NO: 187594 - protein, 656 aa, Zea Mays
MRVPGTAQHPSSIDPPNHLLRPALRLGTGVRRAPSRPGTGRAGSEEFLELIKSALLAALEALIPGSLFGLMTFSHKIGLYDVQGPIPLVKNVFIPPDLEEDGLPVALEDAMPLLSFLAPVDTCKDRIAAALETLRPTSSWERGAASGHEEDAVLLGGRGFGTAMSALIEYLSSGYGSTFALARVFAFLSGAPDYGAGLLDTRRYGEQYASKGVDANLALLPEQIPFYRDLAAVAVQSGVCIDIFAVTDEYTDLASLKFLSIESGGYLFLYANADDSTLPQDIYRLLSRPYAFGCVLRLRTSSDFEPGNSYGHFFPDPQYESVQHIICCDSFATYAYDFEFSHNNGFSRHTDPAVVQIAFQYSVIEPAKETSGDGSQSSASYKFSLKRRLRIRTLQYRPARNISEIYDSVDPEVVLHILVHKVILECVDKGVREGRHQVHAWLSLLAARYNQVLSSDVRTPLSSIDIDFSQCPQLQTIPQLVFALLRSPLLRLHEEGVHPDYRIYLQCLFSALEPSSLAKAIYPVLISYSSPDKQAFPRHTLSRAALIMSESPIFLLDTFTNLIVYYSSTADPSFPFPPPRDCLLRTTINKLKQDRCITPKLTFIHGGEDDSTLFESYLIEEQDVDGSGLTTGSGFVAFRESVRNVAGEIIQEEIGS

SEQ ID NO: 187595 - protein, 255 aa, Zea Mays
MRVPGTAQHPSSIDPPNHLLRPALRLGTGVRRAPSRPGTGRAGEQDVDCHRRKIARSQIRGKLSLSDRGSGGQHPLLRRPREAGGPRVRATAVQQVRGGRGGRAAQGEAGRPGRDGARVRGPRRHLHPRGGRDRRGGAALLLPRRVLLHLRREDVGRRGRPVGGVLPRRRPDGRGVPPHLHLLPQGRLRHPHPQGGGPVLEIGLLYAYAVAAPKVVVRSLLFRATSGRGVSLLRWASSCHQFRSFDEIMAYELWQ

SEQ ID NO: 187596 - protein, 346 aa, Zea Mays
MAEGFGRWESDLLFPAAECVQDSADRMEGVYRLLLHERKVMQDGTSDAKFHAPIQSERDVITALGTTKWQLEQFEREVNAAAFSDKSKSRENAILKFRQFIRAIADQISQVEENLESLRLGSSRTPKHLYSSEHDGDGLASFLSGSSKDDHAYHSTGTDEIVELKLDNVPLVNGYHSTQEHTTYEHRNSDKDVEGAGKRKCSCGEGACEGDHNNSNMFVLDVDDSTSRRFFCKNKLSRQYHNFIRNLWFTKRRRDRESFTKRRKDGEDMDSLRNGNMLPSFNLPQSGRVMYFWPEVIKRRLCRSGYFTDHNHSQIRLVTAVLIALAVLYSLSKDALPGFVLICLLC

SEQ ID NO: 187597 - protein, 267 aa, Zea Mays
MLEQFEREVNAAAFSDKSKSRENAILKFRQFIRAIADQISQVEENLESLRLGSSRTPKHLYSSEHDGDGLASFLSGSSKDDHAYHSTGTDEIVELKLDNVPLVNGYHSTQEHTTYEHRNSDKDVEGAGKRKCSCGEGACEGDHNNSNMFVLDVDDSTSRRFFCKNKLSRQYHNFIRNLWFTKRRRDRESFTKRRKDGEDMDSLRNGNMLPSFNLPQSGRVMYFWPEVIKRRLCRSGYFTDHNHSQIRLVTAVLIALAVLCLLVSHVK

SEQ ID NO: 187598 - protein, 294 aa, Zea Mays
MAEGFGRWESDLLFPAAECVQDSADRMEGVYRLLLHERKVMQDGTSDAKFHAPIQSERDVITALGTTKWQLEQFEREVNAAAFSDKSKSRENAILKFRQFIRAIADQISQVEENLESLRLGSSRTPKHLYSSEHDGDGLASFLSGSSKDDHAYHSTGTDEIVELKLDNVPLVNGYHSTQEHTTYEHRNSDKDVEGAGKRKCSCGEGACEGDHNNSNMFVLDVDDSTSRRFFCKNKLSRQYHNFIRNLWFTKRRRDRESFTKRRKDGEDMDSLRNGNMLPSFNLPQSGRACWYHM

SEQ ID NO: 187599 - protein, 1782 aa, Zea Mays
MSAGRGDPNTPANRPLFLSAGVPNLGCHNVAAPAAAGNSGSIASQVLFSPCSTSVLNTIQEVPAPQSALLSPINRATEQGDVPCIQPSWNMPGGCTQVPINIIVFHRELTRRGSRPQLSPSATALPDVSEGASIRLAGSNFLSHGRTPSIVAGDMTTNSSQLATADKYNSEHRMNCLHDEASKTENGKGSTQLPQLATAIFRDSYNDLESVVPAATWETRVQHSQESTTCLAESTTDDNIHMYQSMQKRLKTQINKSEHTPLSAPTVPKEKTLTQIETQLASAEKTEMFRNEETPALKMKARKKKHRPKVIRENKPAKVQKPDSTPDGKSPNQKVKRSYVRKKRNLSSLENCSGPVSDQSISGATGVAARSRTSSVRRSLQFESKEQGLQGGHSSMANIHHHNYEKPGHAQSSFYSESEVQTGRVMQEGMENSPGELAFDMSRRLNKFLDEYIHLPDMLKPTQEVSAATSASFSTELAREEDNVGRTCKPDGKSKCSLFADERVVNPTIEGNKKDLELNYSDADGLVSSARSLPQMDPTRSQMGKVSEVENPTHHSNGSLPGTRDSVVLRAAAEMFAFFQAGAIKKKRSARLRRNSPFYTMDLKNNTLQASTRLPQPCMDALHRSSCIKFLTKKRSEKARPHCSSVIQPNDELKDRLSAGSTFYGATNGCKISEESSPNFSSQTLDNKRINVDTHCEVAEGRSTNTSTGPYMDYVQGVASKLKHLDLNTEQVQRTEMHLSLTTPAVISFEGTSGPSNALVPYGGVVMVPNERPLQLVKKQRPRAKVDLDFETTRVWNLLMGKSAESYGTDVEKERWWQQEREVFQSRANSFIARMRLVQGDRRFSPWKGSVVDSVVGVFLTQNVADHLSSSAYMALAASFPSRPVNNNCKDDGTTEDNKQTTRMSELVGEKSVFDLFYNGVRPDLEVGCEEVSMTCKKTHMEPTDNTRDSEFIEGETYSFDYKSTDESVCNHKGIGIEHKEQQLPDFSSAELTVSTELVQQIQIQKISSSQILTSETIQSRLSLSSEIPRNFVCGGSAAAYQQLGSNFDQGSSLTENDATASEIECHRLQMAAINDYGFGKPEIPSSSSMPFFLAVDPQQLKLRNETNVSSTSSNIPSDSASPNLKNGTDPLLMPFNSYMADWSSDKITYTTLNTPKISTELPVKLHHDKSSSFEAPNLKEHESVFATHEMTVEATRKEDEHTSKSSFTSYNGVPDTAAQASKPKKTRTTTAKNTENFDWEKLRRQACSEGQMKQRSFERRDSIDWEAVRCADVRRISHAIRERGMNNVLAERIQNFLNRLVRDHGSIDLEWLRYIPPDSAKDYLLSIRGLGLKSVECVRLLTLHHLAFPVDTNVGRICVRLGWVPIQPLPESLQLHLLELYPILETIQKYLWPRLCKLDQQTLYELHYQMITFGKVFCTKRQPNCNACPMRSECKHFASAFASARLALPAPQEESLVKLSNPFAFQNSSMHAMNSTHLPRLEGSIHSREFLPKNSEPIIEEPASPREERPPETMENDIEDFYEDGEIPTIKLNMEAFAQNLENCIKESNNELQSDDIAKALVAISTEAASIPVPKLKNVLRLRTEHYVYELPDAHPLLQQLGLDQREHDDPTPYLLAIWTPDGIKEITKTPKPCCDPQMGGDLCNNEMCHNCTAEKENQSRYVRGTILVPCRTAMRGSFPLNGTYFQVNEVFADHRSSHNPIHVEREMLWNLQRRMVFFGTSVPTIFKGLRTEEIQQCFWRGFVCVRGFDMETRAPRPLCPHLHIIARPKARKTAATEQVL

SEQ ID NO: 187600 - protein, 1155 aa, Zea Mays
MSAGRGDPNTPANRPLFLSAGVPNLGCHNVAAPAAAGNSGSIASQVLFSPCSTSVLNTIQEVPAPQSALLSPINRATEQGDVPCIQPSWNMPGGCTQVPINIIVFHRELTRRGSRPQLSPSATALPDVSEGASIRLAGSNFLSHGRTPSIVAGDMTTNSSQLATADKYNSEHRMNCLHDEASKTENGKGSTQLPQLATAIFRDSYNDLESVVPAATWETRVQHSQESTTCLAESTTDDNIHMYQSMQKRLKTQINKSEHTPLSAPTVPKEKTLTQIETQLASAEKTEMFRNEETPALKMKARKKKHRPKVIRENKPAKVQKPDSTPDGKSPNQKVKRSYVRKKRNLSSLENCSGPVSDQSISGATGVAARSRTSSVRRSLQFESKEQGLQGGHSSMANIHHHNYEKPGHAQSSFYSESEVQTGRVMQEGMENSPGELAFDMSRRLNKFLDEYIHLPDMLKPTQEVSAATSASFSTELAREEDNVGRTCKPDGKSKCSLFADERVVNPTIEGNKKDLELNYSDADGLVSSARSLPQMDPTRSQMGKVSEVENPTHHSNGSLPGTRDSVVLRAAAEMFAFFQAGAIKKKRSARLRRNSPFYTMDLKNNTLQASTRLPQPCMDALHRSSCIKFLTKKRSEKARPHCSSVIQPNDELKDRLSAGSTFYGATNGCKISEESSPNFSSQTLDNKRINVDTHCEVAEGRSTNTSTGPYMDYVQGVASKLKHLDLNTEQVQRTEMHLSLTTPAVISFEGTSGPSNALVPYGGVVMVPNERPLQLVKKQRPRAKVDLDFETTRVWNLLMGKSAESYGTDVEKERWWQQEREVFQSRANSFIARMRLVQGDRRFSPWKGSVVDSVVGVFLTQNVADHLSSSAYMALAASFPSRPVNNNCKDDGTTEDNKQTTRMSELVGEKSVFDLFYNGVRPDLEVGCEEVSMTCKKTHMEPTDNTRDSEFIEAYQQLGSNFDQGSSLTENDATASEIECHRLQMAAINDYGFGKPEIPSSSSMPFFLAVDPQQLKLRNETNVSSTSSNIPSDSASPNLKNGTDPLLMPFNSYMADWSSDKITYTTLNTPKISTELPVKLHHDKSSSFEAPNLKEHESVFATHEMTVEATRKEDEHTSKSSFTSYNGVPDTAAQASKPKKTRTTTAKNTENFDW

SEQ ID NO: 187601 - protein, 116 aa, Zea Mays
MVNYNIRIRILTYSIRSHPYSAPPSGRVNVPPGKKAANAPHVPWFNHSIGHHSPQRRRRIQSLVPSHRTCQWRLVIVEWDSTDQRPPRRATGTANSMHEHVSGGQGIVSAFRCTCC

SEQ ID NO: 187602 - protein, 226 aa, Zea Mays
MASSRVMASSSPPQHAGAGSSSDLARFRSSGGIGSMNMDNIMREIYGPEAVNATVNGRVEPSPAAPEAAARRTSEEVWKEISAAGGLSAPVLPPPPAASTGAGARGGGGGASEMTLEDFLARDSCAMAAVMEGDMALGFPNCEGDAAGSVAGEAGGGRGSRKRALLDPADRAVMQRQKRMIKNRESAARSRDRKQAYIAELESQVMQLEEYQAELLTEQVLFLVLQ

SEQ ID NO: 187603 - protein, 313 aa, Zea Mays
MRRSEPRNLPFQALRSRSRFASLSFARFPSSRSRPSPLPGQESNGTSRKARAGLTCPHSTCASRLSEVLPPLFSFPFGPWAGRAPRRMASSRVMASSSPPQHAGAGSSSDLARFRSSGGIGSMNMDNIMREIYGPEAVNATVNGRVEPSPAAPEAAARRTSEEVWKEISAAGGLSAPVLPPPPAASTGAGARGGGGGASEMTLEDFLARDSCAMAAVMEGDMALGFPNCEGDAAGSVAGEAGGGRGSRKRALLDPADRAVMQRQKRMIKNRESAARSRDRKQAYIAELESQVMQLEEYQAELLTEQVLFLVLQ

SEQ ID NO: 187604 - protein, 187 aa, Zea Mays
MHGARGSQRRGQKRDAADARYISVALQPNATSCARVVVLCCVPVWLCAHLDLHIVSTHAGGERAVHDDVQRAAAMEGHYSPTAAPEMFLQGPQGATSGSHGGGYPLYYDYGGHSGVGDGSVSSSSGSYSFPASTVTVASVPSSAPSYDEAAQWTSWPESSASAWSYPATTGSWSASSQYPPSTRPPQ

SEQ ID NO: 187605 - protein, 166 aa, Zea Mays
MANLSSSILLLLSFTLWLPDLFSLSLVSHISSPSPSSRPDLDGVPPSPTLFFSRPRHPFLRCSHCKPRATHTAVVHVDQIVHSIAFSSARVCSLPARSSQRRSVQATLQIVTAMNDCDNHHFRHNSADALGCWALMILCRLCSMPDNNHESRLSCMPWHEQPLALS

SEQ ID NO: 187606 - protein, 430 aa, Zea Mays
MLTLSSVFSSPQQCRDSADDGEGICPPSSLQTAFFYASLYLVAIAQSGHKPCVQAFGADQFDATDPDESVSRASFFNWWYMGLCTSATVTIALMSYVQDNVGWALGFGVPSMAMLLALAIFLLGTRTYRFYGSRGGAGASASASSLFRNAFVAWRKRSREVELGHGELAQDDAVLAEEVKGLARLFPIWATCLLYGAVFAQPPTLFTKQAATLDRRIGRSFQVPPAALQCFLGASIVTCIVLYDRVLVPVTRRVSGAASGITMLQRIGTGIALSLVTLVVAVLVEMKRLRAARDAGGGGLVDGSGTGTAAVPMSLWWIVPQYVLLGAADVFTMVGMQEFFYDQVPGALKSLGLALYLSVLGVGSFISSFLITVIDAVTTRNGGTSWFADDLNRGHLDYFYLLLAALAALELLAFAYFSTSYVYKTKAGNL

SEQ ID NO: 187607 - protein, 466 aa, Zea Mays
MRPTTDCVTASWMQMHIEGLGMLAFSTFLSSGSGHQCTAAGGQICAPSGLKVTFFYVSLYIVAVAQGGHKPCVQAFGADQFDQTDPKETVSRSSFFNWWYFGMCAGTAVTLVLLSYVQDNIGWGLGFGIPCAVMAAALAVFLLGTRTYRYYVTAGQGLFARAGEAFAEWRSRRKAGQLVQDSQELDPPAADAPRFSAGVDVEEQAAVRNNGGLVKEAKAIIRLFPIWAACLLYAVAYSQSSTFFTKQAATLDRRIGRHVQVPPAALQSFISVTIVVIIPIYDRVLVPVSRRYSGKPSGITMLQRIGTGMFLSLLSMVIAALVEKHRLRVAGDAGLVDKPKVPVPMSLWWMVPQYVLFGAADVFTMVGLQEFFYDQVPDKLRSLGLALYLSIFGVGSFISSALVSVIDRVTTDRGGSWFSNNLNRGHVDYFYWLLAALSAVELLAYVFFAVTYKYKNRGAVHATVDG

SEQ ID NO: 187608 - protein, 365 aa, Zea Mays
MAAASWSAPTTSFAPAPAPPWGRWRTKAAPLPIRTLPRRVLLNAVGESAMVAAGDTLLGLYEKERLGLLQYADDESKEERYWETLDADLRYWTRSLRPVQWYPGHIAKTEKELKEQLRLMDVVIEIRDARIPLSTSHPKMDSWLGNRKRIIVLNRKDMISTEDMNAWATYFGNQGIKVVFSNGQLGMGTMKLGRMAKSVASVANTKRKEKGLLPRPVRAGIVGYPNVGKSSLINRLLKRRMCPAAPRPGVTRELKWVRFGTDLELLDSPGILPMRISDQTSAIKLAICDDIGERSYDFADVAAILVQMLIRHPAVGSEAFRRRYKIDVDSECGLSQSSLFTCSMETQARQLSAYCLTTGKANLDG

SEQ ID NO: 187609 - protein, 209 aa, Zea Mays
MHGLLTLVIRASKLFSPMASWGTMKLGRMAKSVASVANTKRKEKGLLPRPVRAGIVGYPNVGKSSLINRLLKRRMCPAAPRPGVTRELKWVRFGTDLELLDSPGILPMRISDQTSAIKLAICDDIGERSYDFADVAAILVQMLIRHPAVGSEAFRRRYKIDVDSECGKTFVTKLSVHLFNGDTSQAAFRILSDYRKGKFGWVALERPPT

SEQ ID NO: 187610 - protein, 218 aa, Zea Mays
MDVVIEIRDARIPLSTSHPKMDSWLGNRKRIIVLNRKDMISTEDMNAWATYFGNQGIKVVFSNGQLGMGTMKLGRMAKSVASVANTKRKEKGLLPRPVRAGIVGYPNVGKSSLINRLLKRRMCPAAPRPGVTRELKWVRFGTDLELLDSPGILPMRISDQTSAIKLAICDDIGERSYDFADVAAILVQMLIRHPAVGSEAFRRRYKIDVDSECGKTFL

SEQ ID NO: 187611 - protein, 171 aa, Zea Mays
MHGLLTLVIRASKLFSPMASWGTMKLGRMAKSVASVANTKRKEKGLLPRPVRAGIVGYPNVGKSSLINRLLKRRMCPAAPRPGVTRELKWVRFGTDLELLDSPGILPMRISDQTSAIKLAICDDIGERSYDFADVAAILVQMLIRHPAVGSEAFRRRYKIDVDSECGKTFL

SEQ ID NO: 187612 - protein, 246 aa, Zea Mays
MDVVIEIRDARIPLSTSHPKMDSWLGNRKRIIVLNRKDMISTEDMNAWATYFGNQGIKVVFSNGQLGMGTMKLGRMAKSVASVANTKRKEKGLLPRPVRAGIVGYPNVGKSSLINRLLKRRMCPAAPRPGVTRELKWVRFGTDLELLDSPGILPMRISDQTSAIKLAICDDIGERSYDFADVAAILVQMLIRHPAVGSEAFRRRYKIDVDSECGLSQSSLFTCSMETQARQLSAYCLTTGKANLDG

SEQ ID NO: 187613 - protein, 348 aa, Zea Mays
MAAASWSAPTTSFAPAPAPPWGRWRTKAAPLPIRTLPRRVLLNAVGESAMVAAGDTLLGLYEKERLGLLQYADDESKEERYWETLDADLRYWTRSLRPVQWYPGHIAKTEKELKEQLRLMDVVIEIRDARIPLSTSHPKMDSWLGNRKRIIVLNRKDMISTEDMNAWATYFGNQGIKVVFSNGQLGMGTMKLGRMAKSVASVANTKRKEKGLLPRPVRAGIVGYPNVGKSSLINRLLKRRMCPAAPRPGVTRELKWVRFGTDLELLDSPGILPMRISDQTSAIKLAICDDIGERSYDFADVAAILVQMLIRHPAVGLSQSSLFTCSMETQARQLSAYCLTTGKANLDG

SEQ ID NO: 187614 - protein, 162 aa, Zea Mays
MYIARETSKVWRKVATEVSVELQLLREKWGLLLAGLIFQYIHGLAARGVHYLHRPGPLLQDLGFMALPELGQDKGYLSETIFSSIFISFVLWTFHPFIYHSKRFYTVLIWRRVLAFLVASQFLRIITFYSTQLPGPNYHCREGSKLATLPPPNSVLEVLLIN

SEQ ID NO: 187615 - protein, 255 aa, Zea Mays
MALPELGQDKGYLSETIFSSIFISFVLWTFHPFIYHSKRFYTVLIWRRVLAFLVASQFLRIITFYSTQLPGPNYHCREGSKLATLPPPNSVLEVLLINFPRGVLFGCGDLIFSSHMIFTLVFVRTYQKYGSKRFIKFLAWFMAIIQSLLIIASRKHYSVDVVVAWYTVNLVVFFVDNKLPEMPDRTSGLHLLPLSSKEKEGRQKEEKDSKLKDEFHKLLNGNHADPTDRRQRAQMNGRHDEDINHALSEATANGT

SEQ ID NO: 187616 - protein, 114 aa, Zea Mays
MAIIQSLLIIASRKHYSVDVVVAWYTVNLVVFFVDNKLPEMPDRTSGLHLLPLSSKEKEGRQKEEKDSKLKDEFHKLLNGNHADPTDRRQRAQMNGRHDEDINHALSEATANGT

SEQ ID NO: 187617 - protein, 206 aa, Zea Mays
MVLRTLGIDCCDGIADLERLCRTTSIWTVDLAYLLNKFSVSFSFCTVTLGANPQYSAESFYREQLQEDIDRVDELFGKALDAGISIQCRSITAYDIAFLLLSGHCIAIALVDKSKLNLPCMSDHDVQQHNDEPDYMGHYVVICGYDADDCEFEIRDPASSRKRERVTMKSLDEARKSFGTDEDILLVSLTGKSGMKLSRKLLACSM

SEQ ID NO: 187618 - protein, 178 aa, Zea Mays
MWPLCVISEKLFRMAGDDGAQGAAGSPYPDGRISLARRSYYIDVPHVQQAFTWDCGLACVLMVLRTLGIDCCDGIADLERLCRTTSIWTVDLAYLLNKFSVSFSFCTVTLGANPQYSAESFYREQLQEDIDRVDELFGKALDAGISIQVHHRIRHCFSTVIWALHCYCFSGQIEAKKR

SEQ ID NO: 187619 - protein, 182 aa, Zea Mays
MWPLCVISEKLFRMAGDDGAQGAAGSPYPDGRISLARRSYYIDVPHVQQAFTWDCGLACVLMVLRTLGIDCCDGIADLERLCRTTSIWTVDLAYLLNKFSVSFSFCTVTLGANPQYSAESFYREQLQEDIDRVDELFGKALDAGISIQCRSITAYDIAFLLLSGHCIAIALVDKSKLKRGDS

SEQ ID NO: 187620 - protein, 208 aa, Zea Mays
MIIREYLVRVVISSEKCNSCFIQNKCSIWTVDLAYLLNKFSVSFSFCTVTLGANPQYSAESFYREQLQEDIDRVDELFGKALDAGISIQCRSITAYDIAFLLLSGHCIAIALVDKSKLNLPCMSDHDVQQHNDEPDYMGHYVVICGYDADDCEFEIRDPASSRKRERVTMKSLDEARKSFGTDEDILLVSLTGKSGMKLSRKLLACSM

SEQ ID NO: 187621 - protein, 96 aa, Zea Mays
MAVALQMANHTAALLTRMENMLIQMTRQNPLTSVRPCITVVGNSTAARYRSSQPMNPRQNTRRTSRMALLLEVIGGKVHFITEQSAGNSPFFVNKE

SEQ ID NO: 187622 - protein, 91 aa, Zea Mays
MAVALQMANHTAALLTRMENMLIQMTRQNPLTSVRPCITVVGNSTAARYRSSQPMNPRQNTRRTSRMALLLEVHFITEQSAGNSPFFVNKE

SEQ ID NO: 187623 - protein, 62 aa, Zea Mays
MEAKKSGPAAAGAAAPPPANGYFSTVFSASPAGSANDAKQADLYTMLNKQSSRGQNGSGITV

SEQ ID NO: 187624 - protein, 194 aa, Zea Mays
MDEGYSNLPTSHLLGSVPAVTQDDRKLGPPAAQVADAAATSRLQEFPPGGGNVGGYRPPGGPADGDVENQADWKGYFNVASYAPYFNVDTDVVVDRLISSVYPMDGFYRKIDANPDMYGPLWITTTLIFMLAVFVFWITPKSCSILVYVGLFSVYLHTCICTFAYSCGISSMGHHSSCWWCIILVHHFKFEGMH

SEQ ID NO: 187625 - protein, 262 aa, Zea Mays
MDEGYSNLPTSHLLGSVPAVTQDDRKLGPPAAQVADAAATSRLQEFPPGGGNVGGYRPPGGPADGDVENQADWKGYFNVASYAPYFNVDTDVVVDRLISSVYPMDGFYRKIDANPDMYGPLWITTTLIFMLAVFGNYATYLVQTKKDMDIWNFDVGYFSWAASVMYSYAIIVPVVFFFLFQYFGSRPSLVRFWCMWGYSLFIFIPASVSIRFPSVCFVIYITGKNTQTFNFNMMYIHRNFQFSRLQLYITVLKIDSLNVKNP

SEQ ID NO: 187626 - protein, 190 aa, Zea Mays
MDEGYSNLPTSHLLGSVPAVTQDDRKLGPPAAQAATSRLQEFPPGGGNVGGYRPPGGPADGDVENQADWKGYFNVASYAPYFNVDTDVVVDRLISSVYPMDGFYRKIDANPDMYGPLWITTTLIFMLAVFVFWITPKSCSILVYVGLFSVYLHTCICTFAYSCGISSMGHHSSCWWCIILVHHFKFEGMH

SEQ ID NO: 187627 - protein, 279 aa, Zea Mays
MDFDPNFCILKVLAGLLKGVPSAVARRLPALCGVWGRVSLSAKSYPYNMQRLWLEPGPYPYNMQRLGLEPRTFRLDSTTAPGPPFSCWIIVLVNFVVNFSFFVLHQSFGSLDSAFSCVMNYFNFCRYGPLWITTTLIFMLAVFGNYATYLVQTKKDMDIWNFDVGYFSWAASVMYSYAIIVPVVFFFLFQYFGSRPSLVRFWCMWGYSLFIFIPASVLLLIPVGFLQWVIIALAGGASSWFITLNLKECTEGADLMVLMASASVLQFALALFIKVYFFA

SEQ ID NO: 187628 - protein, 143 aa, Zea Mays
MEEMIDLTGDGGVLKTVVRKAKDDAIAPSESLPLVDVHYEGTLAETGEVFDTTHEDNSIFSFEIGQGAVIKAWDIALRTMKVGEVAKITCKSEYAYGAAGSPPEIPPNATLIFEVELVACRPRKGSSLGSVSDEKARLESNGS

SEQ ID NO: 187629 - protein, 136 aa, Zea Mays
MEEMIDLTGDGGVLKTVVRKAKDDAIAPSESLPLVDVHYEGTLAETGEVFDTTHEDNSIFSFEIGQGAVIKAWDIALRTMKVGEVAKITCKSEYAYGAAGSPPEIPPNATLIFEVELVACRPRKGSSLENLRSNGS

SEQ ID NO: 187630 - protein, 116 aa, Zea Mays
MEEMIDLTGDGGVLKTVVRKAKDDAIAPSESLPLVDVHYEGTLAETGEVFDTTHEDNSIFSFEIGQGAVIKAWDIALRTMKVGEVAKITCKSEYAYGAAGSPPEIPPMQPLFLRWS

SEQ ID NO: 187631 - protein, 62 aa, Zea Mays
MSFGASPCLKACWQGWQIRQACWESIHLSNDVNLDPLSNLESLRAQINRPIFMEIIILCWAI

SEQ ID NO: 187632 - protein, 162 aa, Zea Mays
MHREARADARTAAAGPSSMQLASPWVAPVHGGRIVVVGRRRPNPANPWLDRACPWPNLVCLHGGGPRQAPWQPLGLDGSDATARLPTATTATHSRCCELWAVWPLGLRSPDLAPRWWCVAPASGQQRPQRRMRWCDTFCLGVLARSCVRGFLGRKPWRRQRP

SEQ ID NO: 187633 - protein, 81 aa, Zea Mays
MGILLVYDVTDESSFNNIRNWIRNIEQHASDNVNKILVGNKADMDESKRAVPTAKGQALADEYGIKFFETFWIPGPLFGFQ

SEQ ID NO: 187634 - protein, 246 aa, Zea Mays
MSWFGPNPKVTIVDPDLAKDVLSNKFGHFEKLKVPVLSKMLGSGVASHEGEKWVKHRRILNPAFHLEKLKRMLPAFSTCCEELVSRWAAESLGSDGSCELDVWPELQNLTGDVISRTAFSSSYSEGRRIFQLQAEQASLVMTNIRKIMIPDYMKMRRNNREVESILREIIGKRIQAMERGEGTKDDLVGLLLETNMRDDMGMTIEDVIEECKVFYFAGMETMSVLLRGRWWCSACTRSGRTARGRR

SEQ ID NO: 187635 - protein, 175 aa, Zea Mays
MLPAFSTCCEELVSRWAAESLGSDGSCELDVWPELQNLTGDVISRTAFSSSYSEGRRIFQLQAEQASLVMTNIRKIMIPDYMKMRRNNREVESILREIIGKRIQAMERGEGTKDDLVGLLLETNMRDDMGMTIEDVIEECKVFYFAGMETMSVLLRGRWWCSACTRSGRTARGRR

SEQ ID NO: 187636 - protein, 242 aa, Zea Mays
MSWFGPNPKVTIVDPDLAKDVLSNKFGHFEKLKVPVLSKMLGSGVASHEGEKWVKHRRILNPAFHLEKLKLVSRWAAESLGSDGSCELDVWPELQNLTGDVISRTAFSSSYSEGRRIFQLQAEQASLVMTNIRKIMIPDYMYLPTVNNRKMRRNNREVESILREIIGKRIQAMERGEGTKDDLVGLLLETNMRDDMGMTIEDVIEECKVFYFAGMETMSVLLRGRWWCSACTRSGRTARGRR

SEQ ID NO: 187637 - protein, 209 aa, Zea Mays
MSWFGPNPKVTIVDPDLAKDVLSNKFGHFEKLKVPVLSKMLGSGVASHEGEKWVKHRRILNPAFHLEKLKNLTGDVISRTAFSSSYSEGRRIFQLQAEQASLVMTNIRKIMIPDYMKMRRNNREVESILREIIGKRIQAMERGEGTKDDLVGLLLETNMRDDMGMTIEDVIEECKVFYFAGMETMSVLLRGRWWCSACTRSGRTARGRR

SEQ ID NO: 187638 - protein, 879 aa, Zea Mays
MNVVGRVGSVISQGVYSVATPFHPFGGAVDIIAVEQPDGSYRTTPWYVRFGKFQGVLKGAEKVVTIRVNGVEANFHMQLDNSGQAYFMRELVPGGEDSGTGSDDETVNEPEPPARSKSDGELYIGPSDRLGSQELNVEHQEKQTRDEFESYDGYGRLEESEDLSTQADGGNSEVVLVSVDGHVLTAPISSTEEGMEDVQLCDPQFHLGPGQSSSGEFTRSGEVWDADILDGLYISQEKVKINSGHQSEVLTENGEVPVEKDGSHHISVDKDEVHVSINDDEAHAVSTNEVEVQDVSRSGNGDVVYQTMTSEGESHSILGDIDVGHQTLTREDDSPGVSGENVVGYQPLTNEHKAHDILENNDEDQPPLNNEDESCDVPVLEKDKDCNSPANKDEVCDLNNEDTEDTSASFGKNDAFQSCLDLTSQIDDGDSGNELFSPGSDSQRDAEHNLGNCSVAETDLEEGESKTAYCGQYGPLQEGVNVSLFTLEVDKTQNKESSPAGGSHDRDKEIASEIEAAASDGLQSSMATSGKDKLGSIPEHSEVEDEQNKEEHSQSQNGLGVEISLCGNMLRPGMGRESAEEVFQQNLVHEEDFKSSGSTMIKNANLIVKVDNNYFPWNKVSHVILGKAVYGSKFPLEPTDAVPVEQQETPKSREDSLRMSPSSRRWRLWLNPFRITRSLQRSNSDSSEDIFLDSESVLSPMDDQTLENNKNQSPRKQFVRTLIPTSEQVASLNLKEGQNLVTFSFSTRVLGKQQVMPLVGRDWSHSGVARLFSAIKENGYQLLFLSARAIVQAYLTKNFLFNLKQDGKALPNGPVVISPDGLFPSLYREVIRRAPHEFKIACLEDIKALFPSDYNPFYAGFGNRDTDELSYKKMGIPKG

SEQ ID NO: 187639 - protein, 942 aa, Zea Mays
MNVVGRVGSVISQGVYSVATPFHPFGGAVDIIAVEQPDGSYRTTPWYVRFGKFQGVLKGAEKVVTIRVNGVEANFHMQLDNSGQAYFMRELVPGGEDSGTGSDDETVNEPEPPARSKSDGELYIGPSDRLGSQELNVEHQEKQTRDEFESYDGYGRLEESEDLSTQADGGNSEVVLVSVDGHVLTAPISSTEEGMEDVQLCDPQFHLGPGQSSSGEFTRSGEVWDADILDGLYISQEKVKINSGHQSEVLTENGEVPVEKDGSHHISVDKDEVHVSINDDEAHAVSTNEVEVQDVSRSGNGDVVYQTMTSEGENVVGYQPLTNEHKAHDILENNDEDQPPLNNEDESCDVPVLEKDKDCNSPANKDEVCDLNNEDTEDTSASFGKNDAFQSCLDLTSQIDDGDSGNELFSPGSDSQRDAEHNLGNCSVAETDLEEGESKTAYCGQYGPLQEGVNVSLFTLEVDKTQNKESSPAGGSHDRDKEIASEIEAAASDGLQSSMATSGKDKLGSIPEHSEVEDEQNKEEHSQSQNGLGVEISLCGNMLRPGMGRESAEEVFQQNLVHEEDFKSSGSTMIKNANLIVKVDNNYFPWNKVSHVILGKAVYGSKFPLEPTDAVPVEQQETPKSREDSLRMSPSSRRWRLWLNPFRITRSLQRSNSDSSEDIFLDSESVLSPMDDQTLENNKNQSPRKQFVRTLIPTSEQVASLNLKEGQNLVTFSFSTRVLGKQQVDAHIYLWKWNAKIVISDVDGTITRSDVLGQVMPLVGRDWSHSGVARLFSAIKENGYQLLFLSARAIVQAYLTKNFLFNLKQDGKALPNGPVVISPDGLFPSLYREVIRRAPHEFKIACLEDIKALFPSDYNPFYAGFGNRDTDELSYKKMGIPKGKIFIINPKGEVAVNSSVDVKSYTSLHTLVNDMFPPTTLVEQEDYNNWNYWKVPLPDVDL

SEQ ID NO: 187640 - protein, 844 aa, Zea Mays
MNVVGRVGSVISQGVYSVATPFHPFGGAVDIIAVEQPDGSYRTTPWYVRFGKFQGVLKGAEKVVTIRVNGVEANFHMQLDNSGQAYFMRELVPGGEDSGTGSDDETVNEPEPPARSKSDGELYIGPSDRLGSQELNVEHQEKQTRDEFESYDGYGRLEESEDLSTQADGGNSEVVLVSVDGHVLTAPISSTEEGMEDVQLCDPQFHLGPGQSSSGEFTRSGEVWDADILDGLYISQEKVKINSGHQSEVLTENGEVPVEKDGSHHISVDKDEVHVSINDDEAHAVSTNEVEVQDVSRSGNGDVVYQTMTSEGESHSILGDIDVGHQTLTREDDSPGVSGENVVGYQPLTNEHKAHDILENNDEDQPPLNNEDESCDVPVLEKDKDCNSPANKDEVCDLNNEDTEDTSASFGKNDAFQSCLDLTSQIDDGDSGNELFSPGSDSQRDAEHNLGNCSVAETDLEEGESKTAYCGQYGPLQEGVNVSLFTLEVDKTQNKESSPAGGSHDRDKEIASEIEAAASDGLQSSMATSGKDKLGSIPEHSEVEDEQNKEEHSQSQNGLGVEISLCGNMLRPGMGRESAEEVFQQNLVHEEDFKSSGSTMIKNANLIVKVDNNYFPWNKVSHVILGKAVYGSKFPLEPTDAVPVEQQETPKSREDSLRMSPSSRRWRLWLNPFRITRSLQRSNSDSSEDIFLDSESVLSPMDDQTLENNKNQSPRKQFVRTLIPTSEQVASLNLKEGQNLVTFSFSTRVLGKQQVDAHIYLWKWNAKIVISDVDGTITRSDVLGQVMPLVGRDWSHSGYFYFSTRKTVINYYSLVLEQLSRHISRRTSSLISNRMGKHYPMGLL

SEQ ID NO: 187641 - protein, 234 aa, Zea Mays
MGSSWDHRKFLQSSQAPSNKVNQRSAKKQKMGSNLSQIQNGNASSDSEKEHDLTKYYASATALANSPEEKKRREHRSKRFEKSKDSSFKSRNVSANKDAMTNLRARRAILSFRTRTYEGGTLAVEDMDWDALTVKGTCQEIEKRYLRLTEAPDPAKIRPEDVLEKALAMVETSQKNYLYKCDQLKSIRQDLTVQRIQNELTIKVYETHARLAMQAGDLHEFNQLIKRSQTRCSC

SEQ ID NO: 187642 - protein, 394 aa, Zea Mays
MGSSWDHRKFLQSSQAPSNKVNQRSAKKQKMGSNLSQIQNGNASSDSEKEHDLTKYYASATALANSPEEKKRREHRSKRFEKSKDSSFKSRNVSANKDAMTNLRARRAILSFRTRTYEGGTLAVEDMDWDALTVKGTCQEIEKRYLRLTEAPDPAKIRPEDVLEKALAMVETSQKNYLYKCDQLKSIRQDLTVQRIQNELTIKVYETHARLAMQAGDLHEFNQCQSQLKRLYAQGIKGCYFEFSAYNLLCVMLHSNNKRDLLSSMASLSKEAKQDAAVKHALAVHASVLSGNYVLFFKLYKKAPNLNSCLMDLYVERMRFEAMKCMSRSYRPTVPVGYVAQILGFMRTDTGCATNGDDGLEECEKWLKAHGIVLSEGFVFYTLHARARECGCTW

SEQ ID NO: 187643 - protein, 834 aa, Zea Mays
MPTIIIATHKQQMILLSSKEQTNIQTVPGYGSSSYYYQNNTWNGGSTGNTFAQSYQNYSSSDTNAQQSSTSVPANSLPYQQQYNQWPYYYNQSVPSASSNPVAGNSTTDNLTGNMPSGYSYPSSQPPPPGTTSWKSNSVASVAPPMQVPGVPGQQSQYGNQAEGHYNQGPGVQWSQNHYAYQTQPYPQKTNSNHPQLSNHEDQQETVYSNSPSTNLSSNHVSENFKPNLQDSVTMDTSSEGKIQVPINPQIAPGFSMVIPKNEKKHSGLDLSKKPAYRLPFSLRNYATRNLNRCKNDAQREACRSIMNEITKKAFAEGTLLTKNWDTEPLFPLPESTVGMTGTSSVNNLSPFSSVSTPRKRVKSRWEPVVDENVTNKVEQIAKGLIGSNVHSTSDPKNRMGSSWDHRKFLQSSQAPSNKVNQRSAKKQKMGSNLSQIQNGNASSDSEKEHDLTKYYASATALANSPEEKKRREHRSKRFEKSKDSSFKSRNVSANKDAMTNLRARRAILSFRTRTYEGGTLAVEDMDWDALTVKGTCQEIEKRYLRLTEAPDPAKIRPEDVLEKALAMVETSQKNYLYKCDQLKSIRQDLTVQRIQNELTIKVYETHARLAMQAGDLHEFNQCQSQLKRLYAQGIKGCYFEFSAYNLLCVMLHSNNKRDLLSSMASLSKEAKQDAAVKHALAVHASVLSGNYVLFFKLYKKAPNLNSCLMDLYVERMRFEAMKCMSRSYRPTVPVGYVAQILGFMRTDTGCATNGDDGLEECEKWLKAHGIVLSEGNSGELQIDMKASSSTLYMPEPENAVAHGDASLAVDDFLARTDGHLKRCSSDEPTVDTP

SEQ ID NO: 187644 - protein, 998 aa, Zea Mays
MASHGAGVAAGSDAPHAEVVSMGQTNLSPYPLSSSHHSWSSATGSATVSWNNTVDKLSQDTVYYDPQRDVSDSGGNQNVESSVPHVAQSSRGMADVAHSHMSYSSSDQHVYNPVEYANYYYSYPQATNDSSVQQGANQHPGAAYQPLTSFQNSGSYIDPTSNTYYNAGGHQTVPGYGSSSYYYQNNTWNGGSTGNTFAQSYQNYSSSDTNAQQSSTSVPANSLPYQQQYNQWPYYYNQSVPSASSNPVAGNSTTDNLTGNMPSGYSYPSSQPPPPGTTSWKSNSVASVAPPMQVPGVPGQQSQYGNQAEGHYNQGPGVQWSQNHYAYQTQPYPQKTNSNHPQLSNHEDQQETVYSNSPSTNLSSNHVSENFKPNLQDSVTMDTSSEGKIQVPINPQIAPGFSMVIPKNEKKHSGLDLSKKPAYVSVSMPTNDAKATQVGLDARLPFSLRNYATRNLNRCKNDAQREACRSIMNEITKKAFAEGTLLTKNWDTEPLFPLPESTVGMTGTSVNNLSPFSSVSTPRKRVKSRWEPVVDENVTNKVEQIAKGLIGSNVHSTSDPKNRMGSSWDHRKFLQSSQAPSNKVNQRSAKKQKMGSNLSQIQNGNASSDSEKEHDLTKYYASATALANSPEEKKRREHRSKRFEKSKDSSFKSRNVSANKDAMTNLRARRAILSFRTRTYEGGTLAVEDMDWDALTVKGTCQEIEKRYLRLTEAPDPAKIRPEDVLEKALAMVETSQKNYLYKCDQLKSIRQDLTVQRIQNELTIKVYETHARLAMQAGDLHEFNQCQSQLKRLYAQGIKGCYFEFSAYNLLCVMLHSNNKRDLLSSMASLSKEAKQDAAVKHALAVHASVLSGNYVLFFKLYKKAPNLNSCLMDLYVERMRFEAMKCMSRSYRPTVPVGYVAQILGFMRTDTGCATNGDDGLEECEKWLKAHGIVLSEGNSGELQIDMKASSSTLYMPEPENAVAHGDASLAVDDFLARTDGHLKRCSSDEPTVDTP

SEQ ID NO: 187645 - protein, 116 aa, Zea Mays
MGKTRGMGAGRKLKTHRRNQRWADKAYKKSHLGNEWKKPFAGSSHAKGIVLEKIGIEAKQPNSAIRKCARVQLVKNGKKIAAFVPNDGCLNYIEENDEVLIAGFGRKGHAVGDIPG

SEQ ID NO: 187646 - protein, 672 aa, Zea Mays
MSLRIGKKQSSAGKQQAKDGTHHVKGEESKLSEDSDDEFYDVDKVDLSQEAQSSDTRNADVGSRNQEENYISREELECLVHGGLPMVLRGELWQAFVGTGARRIEGYYDSLAAEGELDNKSSPTSEGVQEKWIGQIDKDLPRTFPGHPALDEDGRNALRRLLIAYAKHNPSVGYCQAMNFFAGLLLLLMPEENAFWTLVGIMEDYFDGYFSEEMIESQVDQLVLEELVREKFPKLANHLDYLGLQVAWVTGPWFLSIFTNVLPWESVLRVWDVLLFDGNRVMLFRTALALLEFYGPALVTTKDAGDAVTLLQSLAGSTFDSSQLVLTARMGYQSVNETILQELSNKHRPSVMSAMEERAKDQLSDVGDGDANQESDPVNMDDEYVGVTVKSEIDSLPDPKDQVAWLKLELCQLLEERRSAVLRADELETALMEMVKQDNRRQLSAKVEQFEQEISEFREALSDKQEQEQAMFQVLMRVEQELKIAEEARISAEQDAAAQRYAANVLQEKYEEAMASLAQMENRAVMAETMLEATLQYQSSQQKALSPCPSPRPSMLDASPSQASQNSSQVFQPRRKNLLGPFSLSWRDKNKEKPNNVEDSANTKFTNSDEMVDEKQMETLDLDNEQRAESTKEDGKMRAETPQKDDDLVRVQLTTDHLNGHHEQMQEIKLDW

SEQ ID NO: 187647 - protein, 774 aa, Zea Mays
MKPKSLPFIAFEHKRDAYGFAVRPQHLQRYKEYAGIYKEEEEERSDRWKNFLERQPESSGQDAGDNATGDGSESLHEKTVAGPQKIQIWTPIRSSLSNIEQIMSLRIGKKQSSAGKQQAKDGTHHVKGEESKLSEDSDDEFYDVDKVDLSQEAQSSDTRNADVGSRNQEENYISREELECLVHGGLPMVLRGELWQAFVGTGARRIEGYYDSLAAEGELDNKSSPTSEGVQEKWIGQIDKDLPRTFPGHPALDEDGRNALRRLLIAYAKHNPSVGYCQAMNFFAGLLLLLMPEENAFWTLVGIMEDYFDGYFSEEMIESQVDQLVLEELVREKFPKLANHLDYLGLQVAWVTGPWFLSIFTNVLPWESVLRVWDVLLFDGNRVMLFRTALALLEFYGPALVTTKDAGDAVTLLQSLAGSTFDSSQLVLTARMGYQSVNETILQELSNKHRPSVMSAMEERAKDQLSDVGDGDANQESDPVNMDDEYVGVTVKSEIDSLPDPKDQVAWLKLELCQLLEERRSAVLRADELETALMEMVKQDNRRQLSAKVEQFEQEISEFREALSDKQEQEQAMFQVLMRVEQELKIAEEARISAEQDAAAQRYAANVLQEKYEEAMASLAQMENRAVMAETMLEATLQYQSSQQKALSPCPSPRPSMLDASPSQASQNSSQVFQPRRKNLLGPFSLSWRDKNKEKPNNVEDSANTKFTNSDEMVDEKQMETLDLDNEQRAESTKEDGKMRAETPQKDDDLVRVQLTTDHLNGHHEQMQEIKLDW

SEQ ID NO: 187648 - protein, 892 aa, Zea Mays
MLQRAASNAYSWWWASHIRTAQSKWLETTGGEMEDRVKSMLELIGADGDSFGKKAELYFQSRPELINHVEEMFRSYQALADRFDRISSELHKANHTIATVFPDHVQFSMQEGDGEEFPKAIGGIDLSNFKFPTLEGLSMGSQSASRGTSPVPKRGTKPHRRVTTNMNEEKAQEEIDKLQKQILALQTEKEFLKTTYDSALGKYLDIEKQVAELQDEVCNLQDAFSTGVAIEDNEARALMAAQAIISCEDTLVNLQDQKNRMTEEAKVELRRANEAIEKLKSFKNECELPHAPMNVHDHYEIELVNALPLDDADDSALNESRLDLQEICQTVKDIIESYPELSVAELAEKVDRLVEKVINLELATTSQNAHINRMKIEIDGLHERLHALEQDNVALAVDSSNLADRLRIVEEMLQEVQQIWKSIRNGSENICKQMTEATHELTEFIETLHSPKQEISDFVDSLRDSKGDASLEDDSGLTSLYVQNEPSKSLRVATSEIEKYEETSEGLVAQKQLVPKESEGEGKIILEDYASVLQSYKNTEQKLSEIEKRNQDYHLEAMSELKELKSVNARKDEEIHSLRHMLSSLQKKMSASIIESLEKSEETSKISAITTTEDKEIAKSEQTSKISTSPTTEDKEIAEIEEYIKQWQVDEPLASSVAEEKFRVEIDRVLGENLNFWLRFSTLYHQIRNFQISFDMLKTEMHRMTDEQEDEGIYGFAGSYQVAKLESAVLEKKLRDLNTDLQVWIERNVRLKGELENRFSSLCSIQEDISKITTLDKCDEVHFNPFQAAKFQGEVLNMKQENNKVAKELEAGLDHVRGLQVELGRVILKLRENLKVSIARSHRTQQNFRTLSTKGGVPLRAFLFGSKSKRPSLFSCMPGVHKQHSGSKAGRG

SEQ ID NO: 187649 - protein, 601 aa, Zea Mays
MSAPGFDDPQLPPLRLRASCGGSGGVIASPRSCSSSDTFVSMRSTPSASGMPNLCGGLRSPPRTPSEASSSEMEFGTAREYDTTDPFFSDYWLYDNHLFHSKLESDGSEGEDKFVVGPDVSLQRSEVRELGDGCGRGHVRTDRNADSDGCTDANACSSPPCGCCYNEELVVRDSCSAVYGRCQIMEDHAEGLDECVAEAFRFRLNAFVDAGDQSVASKKGQDDWLDLTVLEKELQMLTPHLADADALENTGLEDDLRGNINLDVCMVTNEKNADGKEFLKDTYCIHSLPESAIPFDVYGVEDFKEYEVFDLKIFHRKSRTGFEENKEFAIVMDSVVAGRYRITEYLGSAAFSKVVRAHDLHTGVDVCLKIIKNDKDFFDQSLDEIKLLKFVNKYDPDDDHHILRLYDYFYYQEHLFIVTELLRANLYEFQKYNQQSGDEVYFSLPRIQAIAQQCLEALVYLHHLNIVHCDLKPENILLKSYSRCEIKVIDLGSSCFLSDNLNLYVQSRSYRSPEVILGLPYDQKIDIWSLGCILAELYTGEVLFPNESVPIILARMIGTIGPIDMEMLASGQETQKYFTDDYDLFHKDETSKLLWKLRFSK

SEQ ID NO: 187650 - protein, 625 aa, Zea Mays
MSAPGFDDPQLPPLRLRASCGGSGGVIASPRSCSSSDTFVSMRSTPSASGMPNLCGGLRSPPRTPSEASSSEMEFGTAREYDTTDPFFSDYWLYDNHLFHSKLESDGSEGEDKFVVGPDVSLQRSEVRELGDGCGRGHVRTDRNADSDGCTDANACSSPPCGCCYNEELVVRDSCSAVYGRCQIMEDHAEGLDECVAEAFRFRLNAFVDAGDQSVASKKGQDDWLDLTVLEKELQMLTPHLADADALENTGLEDDLRGNINLDVCMVTNEKNADGKEFLKDTYCIHSLPESAIPFDVYGVEDFKQEYEVFDLKIFHRKSRTGFEENKEFAIVMDSVVAGRYRITEYLGSAAFSKVVRAHDLHTGVDVCLKIIKNDKDFFDQSLDEIKLLKFVNKYDPDDDHHILRLYDYFYYQEHLFIVTELLRANLYEFQKYNQQSGDEVYFSLPRIQAIAQQCLEALVYLHHLNIVHCDLKPENILLKSYSRCEIKVIDLGSSCFLSDNLNLYVQSRSYRSPEVILGLPYDQKIDIWSLGCILAELYTGEETQKYFTDDYDLFHKDEETGQLEYLIPEKSSLRRHLQCPDKKFVEFLSYLLQINPRNRPTASEALQHRWLSFKYSPTANQTRY

SEQ ID NO: 187651 - protein, 656 aa, Zea Mays
MSAPGFDDPQLPPLRLRASCGGSGGVIASPRSCSSSDTFVSMRSTPSASGMPNLCGGLRSPPRTPSEASSSEMEFGTAREYDTTDPFFSDYWLYDNHLFHSKLESDGSEGEDKFVVGPDVSLQRSEVRELGDGCGRGHVRTDRNADSDGCTDANACSSPPCGCCYNEELVVRDSCSAVYGRCQIMEDHAEGLDECVAEAFRFRLNAFVDAGDQSVASKKGQDDWLDLTVLEKELQMLTPHLADADALENTGLEDDLRGNINLDVCMVTNEKNADGKEFLKDTYCIHSLPESAIPFDVYGVEDFKQEYEVFDLKIFHRKSRTGFEENKEFAIVMDSVVAGRYRITEYLGSAAFSKVVRAHDLHTGVDVCLKIIKNDKDFFDQSLDEIKLLKFVNKYDPDDDHHILRLYDYFYYQEHLFIVTELLRANLYEFQKYNQQSGDEVYFSLPRIQAIAQQCLEALVYLHHLNIVHCDLKPENILLKSYSRCEIKVIDLGSSCFLSDNLNLYVQSRSYRSPEVILGLPYDQKIDIWSLGCILAELYTGEVLFPNESVPIILARMIGTIGPIDMEMLASGQETQKYFTDDYDLFHKDEETGQLEYLIPEKSSLRRHLQCPDKKFVEFLSYLLQINPRNRPTASEALQHRWLSFKYSPTANQTRY

SEQ ID NO: 187652 - protein, 281 aa, Zea Mays
MGNCCRSPAAAAREDVKSSHFPASAGGKKKPHQARNGGGGGAGEKKRLSVLGEEGCDVGAGIEEKYALDRELGRGEFGVTYLCMDRGTRELLACKSISKRKLRTPVDVEDVRREVAIMRHLPKSPTIVSLREACEDDGAVHLVMELCEGGELFDRIVARGHYTERAAAAVTRTILEVVQLCHRHGVIHRDLKPENFLFANKKENSPLKAIDFGLSIFFKPGEKFSEIVGSPYYMAPEVLKRNYGPEIDIWSAGVILYILLCGVPPFWRLNKELHKLFFGEM

SEQ ID NO: 187653 - protein, 193 aa, Zea Mays
MFKVMDTDNDGIVSYEELKSGIANFGSHLAESEVQMLIEAVDTNGRGALDYGEFLAVSLHLQRMANDEHLRRAFLFFDKDGNGFIEPEELQEALMEDGGADTMDVVNDILQEVDTDKDGKISYDEFVAMMKTGTDWRKASRHYSRGRFNSLSIKLIKDGSVKLGSGSLFQCRWGASAEGLHTCTPAHLLRCST

SEQ ID NO: 187654 - protein, 97 aa, Zea Mays
MCNQALCASVQETALIEDFLFPPMIFCCMDCNELSIEQLQFRMMLCDVSLGTAGSRVQYHRDIDFASNQFCQMAQQSPQLKTKSPQPIDTGRNILTF

SEQ ID NO: 187655 - protein, 50 aa, Zea Mays
MYHQNNILIASISMDAKQTWLFAMEASDKIWWLVDLLKNQKSDKVDITIQ

SEQ ID NO: 187656 - protein, 57 aa, Zea Mays
MQSRLGCLRWRLRIVRYHMSARELLPPLTITNFVTKIWWLVDLLKNQKSDKVDITIQ

SEQ ID NO: 187657 - protein, 572 aa, Zea Mays
MGTCGRRVLGVWFFFWFLLTLEQCTSLNREGAALLRFKAAIEADPYGALLDWNQESLSPCTWFGVECSDDGLVMSLSLANLGLKGVLSPELGKLMQMKSLILHNNSFYGTIPREIGDLQDLKMLDLGYNNFSGSIPSELQHILSLEFLCRFLEGNRLSGRSPVGVHQLTRICEHENQVPTTTTRIVTIKIRRLLMSKQKDFKMVNITGHPIRFPLNSPAAPSPSDPIPPPPAPPSPSEPIPPPSAPPSQENKSKSSATLYASIGAVIVFFMVASSALCFFYYCRKKTSTVVPLSANSSSRQLQTTTMEGTLPCGAEIAVASTSVAYAGGWSAIDEAHYMNKVGALSKVNHKNLLNLVGYCEDEKPFIRMMVFEYASNGSLFERLHVKEAEHLNWQSRLRIAMGVLYCLQYMHQQNTPVTLKNLNSSYIYLTEDDAAKVSDISFSVDKREDDEYDAPDEYSTVYKFALLLLETISGRRPYSEDDGLLVLWARRYLTCASPVMGMIDPTLNSVPEEHARALSELIRLCLSEDRRQRPTMAEVTKRMQEITGITQDQAIPRNSALWWAELEIMTS

SEQ ID NO: 187658 - protein, 70 aa, Zea Mays
MNQHLNCKHDIIIVEYRDNYLLCLTVKSETIVLQLLSMHFTLQLPEITSCCILHQFITFINAFYANSRYF

SEQ ID NO: 187659 - protein, 315 aa, Zea Mays
MVTDITAFFLRIAKVHKQGQDWISGDSTYRLNIVEGKMQYLFDEDGRRYLDAFGGIATVCCGHCHPDVVEAIVNQAKRIQHSTVLYLNHAIADFAEALASKMPGDLKVVFFTNSGTEANELALMIARLYTGCNDIISLRNGYHGNAAGTMGATAQSNWKFNVVQTGVHHALNPDPFRGAFGSDGEKYARDVQEIIEFGTTGRVGGFISEAIQGVGGIVELAPGYLPVAYSMVRKAGGLCIADEVQAGVARTGSHFWGFEGHGVIPDIVTMAKGIGNGIPIGAVVTTPEIAQAGMRCSKCWRRRSSRRMRLLWAPT

SEQ ID NO: 187660 - protein, 396 aa, Zea Mays
MALLQHQPATHTPARRFCRAPTNRAGRKPPQHMQRLASSRRLLQAALAPARANSSLSAAAVAAPAPANGAFPKMPAFDYTPPPYDGPRAEEIFRKRAQFLSPSLFHFYDRPLNIVEGKMQYLFDEDGRRYLDAFGGIATVCCGHCHPDVVEAIVNQAKRIQHSTVLYLNHAIADFAEALASKMPGDLKVVFFTNSGTEANELALMIARLYTGCNDIISLRNGYHGNAAGTMGATAQSNWKFNVVQTGVHHALNPDPFRGAFGSDGEKYARDVQEIIEFGTTGRVGGFISEAIQGVGGIVELAPGYLPVAYSMVRKAGGLCIADEVQAGVARTGSHFWGFEGHGVIPDIVTMAKGIGNGIPIGAVVTTPEIAQAGMRCSKCWRRRSSRRMRLLWAPT

SEQ ID NO: 187661 - protein, 89 aa, Zea Mays
MLRLAQRAPSPACMHMGWAAWQLDRCVLRMARCARWRSRARAFFPSPAGLAAAGGPALAVTRTSPERRARERETRQVVAGAANWCRCSS

SEQ ID NO: 187662 - protein, 146 aa, Zea Mays
MPGRPYLYLAFLLAPIGLSELARSLLPHCCHACTRISAQWQRQYTTSIALHRAYTCIRAPGGSRQEAGVSGWKERALECGAYAQASSARTVSGMHAYGLGGMAARSMCAEDGEVRAVEKQGTCILSVAGRLGSGRRPGSRSHAYVA

SEQ ID NO: 187663 - protein, 290 aa, Zea Mays
MTVTASFIDENWRLHKKLIGFFMVKGHKGDDIGRNVLRCMTDWGLQRVMTVTVDNASANDNCIGYLKRHLTKTNVAGDKYLHMRCAAHIVNLIVHDGLKEVDLSVKRIRAVVRYIRNGGSRIIKFKELIEEEKLNNKQFLKIDVPTRWNSTFLMLKAALVYEKVFTRLADEDMSYVNDLSEEKDGYGHLEEHDWQNAKNMADFLEHFHDLTVRVSATNHITSHTLFHEIGEVHLLVQSWLNSEDVFQASMVKRMKEKIYKYWGLWHTSKNIDGNANDKEKGRGKGKGKET

SEQ ID NO: 187664 - protein, 107 aa, Zea Mays
MARLSPLRSPGRPPPQPPHASNVIAGKILPHPQKAKNSKPRKTLQEWAVPCDGRWRGWTSGVTTPYTKVRDEANGRGPCSAVKSLNPSERNVKKDVAGRKFTSQKNS

SEQ ID NO: 187665 - protein, 59 aa, Zea Mays
MGRFILGLLRMHFSCFSCWSSPKDELLLLTIGIGAACSLYFILVFSLEMLHGVSVSDVP

SEQ ID NO: 187666 - protein, 74 aa, Zea Mays
MFLLISHIWKVKNPNDFFTGSLDQSSTHGALHPRPPTHALLLLLLLVIAQDVAWCQCVRCAVTDDSKMDCMLFK

SEQ ID NO: 187667 - protein, 79 aa, Zea Mays
MISSQEAWTNLQLMGRFILGLLRMHFSCFSCWSSPKDELLLLTIGIGAACSLYFILVFSLECVRCAVTDDSKMDCMLFK

SEQ ID NO: 187668 - protein, 77 aa, Zea Mays
MISFQCYIFLFPMHFLKVLLHVHLLIPLFFLHLKDELLLLTIGIGAACSLYFILVFSLECVRCAVTDDSKMDCMLFK

SEQ ID NO: 187669 - protein, 72 aa, Zea Mays
MISSQEAWTNLQLMGRFILGLLRMHFSCFSCWSSPKDELLLLTIGIGAACSLYFILVFSLEMLHGVSVSDVP

SEQ ID NO: 187670 - protein, 89 aa, Zea Mays
MDKDPDSPIAYEEAKEMASQSCTISDDHSLLLLSIISSEALLLNSTADMAGTCPLSSQGIALEPFKIWHIDIMTWVGHGLDVNFAPCTL

SEQ ID NO: 187671 - protein, 76 aa, Zea Mays
MNLDRQNAAPLYAELSLKHSDLVFFSIDVDELPELVTQFDVRATPTFIFMRDMKEIDKLVGGNQEELQKKFDPYCQ

SEQ ID NO: 187672 - protein, 334 aa, Zea Mays
MRAGLSRHDLVLSLFIRCLNTDLQGECSKPSSGCRLIRPVTNNQVELPRTSSRLAIFSSMPVDIIADQRSYSLFRSEVEFGDQGEDSIILSPRLKEISTPDRPAALRFLGEKYNNLMERYKKQVVKCSEECEPRYNGLKKKYTDECAERRRLYNELIELRGNIRVFCRCRPLSSDEVNHGCLSVVEIDPSHETELQFVPSEKERKPFKFDHVSGPEDDQGSRGEGGILRNSEGPLKDHIYLHQNHLPPEVLKERLPGISETAAIFAGVDVTKEPIPVLPTVHYNMGGIPTNYHKEVVDIKGDNPDAVIPGLMAAGEAACAAPRWWMIDRPVVCD

SEQ ID NO: 187673 - protein, 218 aa, Zea Mays
MERYKKQVVKCSEECEPRYNGLKKKYTDECAERRRLYNELIELRGNIRVFCRCRPLSSDEVNHGCLSVVEIDPSHETELQFVPSEKERKPFKFDHVSGPEDDQGSRGEGGILRNSEGPLKDHIYLHQNHLPPEVLKERLPGISETAAIFAGVDVTKEPIPVLPTVHYNMGGIPTNYHKEVVDIKGDNPDAVIPGLMAAGEAACAAPRWWMIDRPVVCD

SEQ ID NO: 187674 - protein, 274 aa, Zea Mays
MAMGDRLRAIDLYEILLFATRLARRATTSSIYRVARMRRNLKMHHSLRLRRTRRARRMKKKKRNLRISSLWNDVCSDHEQEMTLEEYEKGSDKDLKKKESAEREERGKKACLGSVTTQRRNCLSSGRRRGDLSKSILCQRCPALLTEIEIIEDRDRPPYNHLRWTRGITLLDNGLGLYQIGILGSFLVLLKTRLYYYNMRAGLSRHDLVLSLFIRCLNTDLQGECSKPSSGCRLIRPVTNNQVELPRTSSRLAIFSSMVLTAEAGRSGSVLAGR

SEQ ID NO: 187675 - protein, 89 aa, Zea Mays
MNPQTTDAESSNNKRVNKRKHNSFTPYIPLPTNVVEARKTRRVLPNQNRLGRRDSMMTTTTTSQCAYFTNEYIQSLKGSNMDLCASKKS

SEQ ID NO: 187676 - protein, 55 aa, Zea Mays
MEGVHGARRPARGARACLPTRGPTISSMRTRCSPCTGTGRRSSWLSRRIGLPMRP

SEQ ID NO: 187677 - protein, 65 aa, Zea Mays
MSTYPRTYDLIHADSVFTLYRNREKILLVVKTYWTTHEAMTKISSRTVNTCSDRKFNMWGEGRIY

SEQ ID NO: 187678 - protein, 85 aa, Zea Mays
MAPALCAGLSCHLKRQKIWMSLAMWTEQRTPMRKSGPMALKMTVRAVTERGPLFLGSVGYSQHLNHKLSEALSLISRLAPLLEPT

SEQ ID NO: 187679 - protein, 173 aa, Zea Mays
MVVAAMRRPCAVPALLVAAATATLVLLLLLSPSSAQPVPSPAAAPGPAGGTGIDSACLNSLLNMSDCLPYVSQGSTARRPDAPCCPGAGGPRRLQPRLPLRAPLRRRRLLRHRRRLRPRARAPRGLPRRHTARLHLHSPRISRPRGPSCGAHVRVSLAHVRHLSLRGGPTVPR

SEQ ID NO: 187680 - protein, 214 aa, Zea Mays
MGAAAACSLRLCHTSPSAATVRREALRQAEELDELTRMVDLQQARLEAAVVGRRRALEAVERGKERLQEQIDRVLPLSRSLTAAHHRVQEAKEALSGDKFRLKDLQRLLRTRQQCMVSQVAGLYPVRVFHDLPRHAENPCADTNGEHVTLPEENRTFSGGDGTHLPTIIKSPEARGWTFFGWDIMKHKMKQKSYRNKVLQRSAAVLGYAAHSCS

SEQ ID NO: 187681 - protein, 219 aa, Zea Mays
MGAAAACSLRLCHTSPSAATVRREALRQAEELDELTRMVDLQQARLEAAVVGRRRALEAVERGKERLQEQIDRVLPLSRSLTAAHHRVQEAKEALSGDKFRLKDLQRLLRTRQQCMVSQVAGLYPVRVFHDLPRHAENPCADTNGEHVTLPEENRTFSGGDGTHLPTIIKSPEARGWTFFGWDIMKHKMKQKSYRNKVLQRSAAVLGYAAHLIQHHRLL

SEQ ID NO: 187682 - protein, 147 aa, Zea Mays
MVSQVAGLYPVRVFHDLPRHAENPCADTNGEHVTLPEENRTFSGGDGTHLPTIIKSPEARGWTFFGWDIMKHKMKQKSYRNKVLQRSAAVLGYAAHVSFSYEVFLLCSITNIPTYATFGTGNFHTNKFFFTGNMLETEKNPLIKWGI

SEQ ID NO: 187683 - protein, 575 aa, Zea Mays
MYRASNFIPDPNQVLLDAKPLRSLAPMFPAPMGVNVNQSSTPPLVCVTPVGQFSAGFGAGTSANGAIDATPISAYKTRSNISLDGDDDPYSGNQTERKPRRGRPPGSGRDGSNVHMTFEALRRRHLQMDETQDASRRADLKAGAIMMASNIRANSGKRVGTVPGVEIGDIFYFRMELCVIGLHAPSMGGIDYMTSKFGNDEDSVAICIVSAGGYENDDDDTDVLVYSGQGGNSRNTEERQDQKLERGNLALERSLHRKNEIRVVRGFKDPFCLTGKIYIYDGLYKIHESWKEKTRSGINCFKYKLLREPGQRDGAALWKMTQKWIDDPATRGRVLLADLSSKAETIPVSLVNEVDHEKGPAHFTYTNQVKYVRPLSSMKKLQGCGCQSVCLPGDASCACGQHNGGDLPYSSLGLLSCRKPMIYECGESCNCSTNCRNRVTQKGPRLHFEVFRTTNRGWGLRCWEPVRAGSFICEASTYVSADEFEPLPIKISAKNMGNVSRFMNHSCSPNVFWQPVQYDHGDDGHPHIMFFALKHIPPMTELTYDYGVAGAESSGSGSRRTKNCMCGSQNCRGLF

SEQ ID NO: 187684 - protein, 158 aa, Zea Mays
MMYHAKNFSVPFAPQRAQDNEHASNIGGIGGPNISNPANPVGSGKQRLRWTSDLHNRFVDAIAQLGGPDRATPKGVLTVMGVPGITIYHVKSHLQKYRLAKYIPDSPAEGSKDEKKDSSDSLSNTDSAPGLQINEALKMQMEVQKRLHEQLETTATKN

SEQ ID NO: 187685 - protein, 688 aa, Zea Mays
MQLPLPSPGLGAMWSLLPLLLFLSSSLLAATTIAYDLWYTECASNTNYTRGGAFQANLDALLSSLPAAAAASYGFADNFTGAAPDQAYGLAQCRGDVNASTCLACLDGAARHMAATCPGQKDAMLIYDECLLRHSNASFLGAADASVRFCAWNPQNATQPEEFRTRLGALMGNLTARAAFASPRMFAAGKAAVSPFANVYGMAQCTRDLADDDCNRCLDGVVAFIPNCCDGKQGGRVIARSCSIRFEVYSFYDALGAQEAMSPAAAPVPGGGPTNGSGHSVDGNTGSSSHTVRTALLVAIPVAVALLLLVAVFLFLCRRNRQLHKHVQVASSVHEDEEDMRSSESLLYDLSTLRAATDNFSEENKLGEGGFGPVYKGTLQDGQDIAVKRLSATSQQGQVEMKNEVVLLAKLQHRNLVRLLGCCTEEHERLLVYEFLTNNSLDKIIFARRHELGWGLRQRIIEGIGRGLLYLHEDSRLTIIHRDLKASNILLDADMNPKISDFGLAKLFSIDSSVGNTSRIAGTYGYMAPEYALHGIFSAKSDVFSYGVLVLEIVTGRRNSYTHASGPSEDLLTFVWTHWSRGSVQPLLEGCPDEGLRAQEVLRCIHVALLCVQEDPHDRPSMASVVVMLNSRSITLPAPAAPAYAVPGRAVTASENPPRRMSLGRQGPMAAAREPSINEASVSELHPR

SEQ ID NO: 187686 - protein, 89 aa, Zea Mays
MAENDLEAIELARFAVAEHNSKTNAMLEFERLVKVRHQVVAGTLHHFTVEVKEAGGGEKKLYEAKVWEKAWENFKQLQSFELVGDAAVA

SEQ ID NO: 187687 - protein, 96 aa, Zea Mays
MSSYWCEDRNRTYYKLVCTSLEMLLAGSAGATEFWKLIEVLTGPVYQEKIVGIYIPKLLLYWFVFSFCALQFFVSYIGAGGFLQQDYMDGWGWRRV

SEQ ID NO: 187688 - protein, 187 aa, Zea Mays
MVFSSNKIIIWMDGWMVFKRLACPVLPFVPSSPRASACSHFPLLRFDFEPGIIFTCCFVPLLCASVLPQIPLGRFASARRWERAEYGLAGLFSLRCILPAILVFVLIRYRPRLLSVWVAGLGPIGVVRVRHDGVWRGDTGRCTQAEIEFPTIGVVSRAHPCSTGHLVRLGFEGSLSISLSQNRKKKS

SEQ ID NO: 187689 - protein, 329 aa, Zea Mays
MVFSSNKIIIWMDGWMVFKRLACPVLPFVPSSPRASACSHFPLLRFDFEPGIIFTCCFVPLLCASVLPQIPLGRFASARRWERAEYGLAGLFSLRCILPAILVFVLIRYRPRLLSVWVAGLGPIGVVRVRHDGVWRGDTGSRPDFRSRRKGPALVTEILVEGLRFSYGSFIVFRLMSSYWCEDRNRTYYKLVCTSLEMLLAGSAGATEFWKLIEVLTGPVYQEKIVGIYIPKLLLYWGNIVFEVDCGIDWIDAIDHSTGRRLLGYIYLVVNRSSIGLWFPFVSKSAVLGDTTRVRPHRYKRTLLVMERSVEGWRFDYVRCFFICYIWLF

SEQ ID NO: 187690 - protein, 66 aa, Zea Mays
MNSPLQLLFEPVTFSSLCRCTQKLRENFQQLLSPESILVPLAIWFALDLKMSDKLMDVWLDFCSWS

SEQ ID NO: 187691 - protein, 95 aa, Zea Mays
MDGVQVPCLSCLALALGLGVLAFSVTSFFILCFDFEPGHYLLHLLICSVALRLRALADPFGLFHLRTTPGVSRVWFGRVIQFILYYAILVFESIL

SEQ ID NO: 187692 - protein, 179 aa, Zea Mays
MDEWVVGEFGPAYACAIRSSELFKFLVDNRVLEVDWCVDWTGIHISREDCSDTIMWMDGWCSSALPLLSCPCLGPWRARIFHPFGLFHLRTTPGVSRVWIGSDQWRIHHDDMLRGDGGRSVFCQIRRFIDFVDWTWIGGFRLKCLRVWYHQNLRSILTLTAEKKGSLLVTGRGATEFWK

SEQ ID NO: 187693 - protein, 109 aa, Zea Mays
MLRGDGGRSVFCQIRRFIDFVDWTWIGGFRLKCLRVWYHQNLRSILTLTAEKKGSLLVTGRGLLMVHSLFLVLMLSYWCEDRHRTYYKLLYPSLEMLLAGSSGATEFWK

SEQ ID NO: 187694 - protein, 119 aa, Zea Mays
MDEWVVGEFGPAYACAIRSSELFKFLVDNRVLEVDWCVDWTGIHISREDCSDTIMWMDGWCSSALPLLSCPCLGPWRARIFHPFGLFHLRTTPGVSRVWFGRVIQFILYYAILVFESIL

SEQ ID NO: 187695 - protein, 53 aa, Zea Mays
MGTGCRLPQRIRLLRYVACAFYFSIFFKEFSDYSVHSITRILYYLWRWPNPSL

SEQ ID NO: 187696 - protein, 141 aa, Zea Mays
MPPSRPRLGREAFFFLDRSRRSPLPRLSNFPLHRGGAEAKAVLLPNRNAATLKDEGRRRRGQSNRSLAAPCRSARPGPLSPLLPPFLTTSTPPPPPTAIKVPSAAPPSSVSSFHLKTQPTRSRLREEKHRGPWRRERQRER

SEQ ID NO: 187697 - protein, 621 aa, Zea Mays
MMQSRDVDKYLNKADNINHVLMNSGDISKIGGHCLHGTHGLGTRLDSDAQSSSPGENMNNKIRRPIEICTFDAQGRCKKGKSCISLHEREGFGSAKTGLLAPAGSGNHRGMSFLTRAICEQQLAITEPTSYCSLLCIGSEGGSQVQHISDLKVHQFKDSEGLSKDEMCRNLIYAFGKDNQMSVHLAGKHSSPIPGVSQRMPVSIGHSLAQNPLVHEKNNKRFMGHHIDVAAENYLDAGGTYPRLDGGIFQFDIDKESSVSDSHVSRTYLSDYPYKSFGLSISSDPLQLSEKLSAYGGVTNTIPNIHQKEHHSCHASYSSHSLTGSRNPCFATSEHTFGSPSLLATSHLGIQSHHLFTSDIEKADLHRCLDVGKGYGTSSSGPALLVSSKPEPSMTPVGPHSPIKNEVWETSVPFVPSFSFPDSTTASESQYDPFVDYVEPPKVGNTNNLKPSTISCNITSQHTDQYAVTDKSLNCNDKLTRNITAKGSNEPAYFIAPDRGCSSSLDDTIKVKACDRKKDAVDYNEKTRDFRFHLAEHIKELVKPIWKKGNLSKDAHKLVVRKSVEKVVDSIEPNQVPTTEELITKYIATCGPKIEKLVKAYVDRHSTCHPTIKYSSSEMGA

SEQ ID NO: 187698 - protein, 230 aa, Zea Mays
MTGVNIFIYDRPAKRLRAFRDNASSYWEMIPLFPETWLSKHKEKVPAVIATRQLKVTAESKMGSMLLQLLEVVPHRPHLGLAQLLSAAGIHLDSKMHGPGITFCTYIIHGMHQWWLQRYQLGLCRVTCLSVLLLCSVTVTEARELNGLEVALTPSGCVLDVVHHPTGRSRLGHGCWSLWRGRKAVQREKEEAAARRDRRRQTLLSPACSSRAPTTGYCIPSMGRSPNLEV

SEQ ID NO: 187699 - protein, 689 aa, Zea Mays
MEQRLGATYQWWSWSHSKSCESVERKGREWLDEAGLASGLQLVLDMLVTVGEPELGSSRGPVSWGVAGFCGVTVAEKRPMMQSRDVDKYLNKADNINHVLMNSGDISKIGGHCLHGTHGLGTRLDSDAQSSSPGENMNNKIRRPIEICTFDAQGRCKKGKSCISLHEREGFGSAKTGLLAPAGSGNHRGSEGGSQVQHISDLKVHQFKDSEGLSKDEMCRNLIYAFGKDNQMSVHLAGKHSSPIPGVSQRMPVSIGHSLAQNPLVHEKNNKRFMGHHIDVAAENYLDAGGTYPRLDGGIFQFDIDKESSVSDSHVSRTYLSDYPYKSFGLSISSDPLQLSEKLSAYGGVTNTIPNIHQKEHHSCHASYSSHSLTGSRNPCFATSEHTFGSPSLLATSHLGIQSHHLFTSDIEKADLHRCLDVGKGYGTSSSGPALLVSSKPEPSMTPVGPHSPIKNEVWETSVPFVPSFSFPDSTTASESQYDPFVDYVEPPKVGNTNNLKPSTISCNITSQHTDQYAVTDKSLNCNDKLTRNITAKGSNEPAYFIAPDRGCSSSLDDTIKVKACDRKKDAVDYNEKTRDFRFHLAEHIKELVKPIWKKGNLSKDAHKLVVRKSVEKVVDSIEPNQVPTTEELITKYIATCGPKIEKLVKRHMLIGTVHVIQPSNTAALRWELELNGDDSLNLLSYQSG

SEQ ID NO: 187700 - protein, 541 aa, Zea Mays
MLIRNRSSLESNRNNSSLESVDSLMLAKSATRIAILGISTSNLNDARRINVSVMQQRGDPLLIVGSPFGLMSPFHFFNSVSVGAVANCLPPCTARSSLLMADMHCLPGMEGAPVFDQNSCLVGLLMNPLTQKGSNIEVQLVITWDAICTEWNSKKLEEIERPPRKLPNDKNTDSKSMELRHVYNYVRVFSSTDNKTNQHCISPRSLREAISAVVLVTVGDTSWASGIVLNKRGLVLTNAHLLEPWRFGRTSPSDLQASFAGEHLNAGENKSLQPQQGKISNEDAVKHKVSSFNLGFKRGKRISVRLDHEERQIWCNASVVFISKGPLDVALLQIEKVPVELNTIRPEFVCPTAGSPVYVVGHGLFGPRSGLHSSLYSGVVSKVVQIPANQLSHLARAEADNMDIPVMLQTTAAVHPGASGGVLVNTHGLMVGIITSNAKHGGGSTIPHLNFSIPCKLLVAVFEYSANGNLVVLEQLDKPNEVLSSVWALAPSSSPFVRSSPEKGKEEKVLEFSKFLSDKQQALKSNVDLKELFRYKTPSKI

SEQ ID NO: 187701 - protein, 714 aa, Zea Mays
MEAQEIAAAARHFCAMDPKAVKMRRHAFHFHHSGSTTLSASALLLPRGALAEPPLLLDHICSAHGHAAGDVALTAASLVEPFLVAEQRNNSGEELQPRLVPETRLDVFVEYELGNAQDGKSGPPRWLPARLLAMVDVPTAAVSALSLLRHDDSFIRRPTWDVGWSLADANQKQVENDSRSSLESNRNNSSLESVDSLMLAKSATRIAILGISTSNLNDARRINVSVMQQRGDPLLIVGSPFGLMSPFHFFNSVSVGAVANCLPPCTARSSLLMADMHCLPGMEGAPVFDQNSCLVGLLMNPLTQKGSNIEVQLVITWDAICTEWNSKKLEEIERPPRKLPNDKNTDSKSMELRHVYNYVRVFSSTDNKTNQHCISPRSLREAISAVVLVTVGDTSWASGIVLNKRGLVLTNAHLLEPWRFGRTSPSDLQASFAGEHLNAGENKSLQPQQGKISNEDAVKHKVSSFNLGFKRGKRISVRLDHEERQIWCNASVVFISKGPLDVALLQIEKVPVELNTIRPEFVCPTAGSPVYVVGHGLFGPRSGLHSSLYSGVVSKVVQIPANQLSHLARAEADNMDIPVMLQTTAAVHPGASGGVLVNTHGLMVGIITSNAKHGGGSTIPHLNFSIPCKLLVAVFEYSANGNLVVLEQLDKPNEVLSSVWALAPSSSPFVRSSPEKGKEEKVLEFSKFLSDKQQALKSNVDLKELFRYKTPSKI

SEQ ID NO: 187702 - protein, 557 aa, Zea Mays
MCLLSMSWGMLKMGSLDLRGGFQLDCLPWNNSSLESVDSLMLAKSATRIAILGISTSNLNDARRINVSVMQQRGDPLLIVGSPFGLMSPFHFFNSVSVGAVANCLPPCTARSSLLMADMHCLPGMEGAPVFDQNSCLVGLLMNPLTQKGSNIEVQLVITWDAICTEWNSKKLEEIERPPRKLPNDKNTDSKSMELRHVYNYVRVFSSTDNKTNQHCISPRSLREAISAVVLVTVGDTSWASGIVLNKRGLVLTNAHLLEPWRFGRTSPSDLQASFAGEHLNAGENKSLQPQQGKISNEDAVKHKVSSFNLGFKRGKRISVRLDHEERQIWCNASVVFISKGPLDVALLQIEKVPVELNTIRPEFVCPTAGSPVYVVGHGLFGPRSGLHSSLYSGVVSKVVQIPANQLSHLARAEADNMDIPVMLQTTAAVHPGASGGVLVNTHGLMVGIITSNAKHGGGSTIPHLNFSIPCKLLVAVFEYSANGNLVVLEQLDKPNEVLSSVWALAPSSSPFVRSSPEKGKEEKVLEFSKFLSDKQQALKSNVDLKELFRYKTPSKI

SEQ ID NO: 187703 - protein, 715 aa, Zea Mays
MEAQEIAAAARHFCAMVRIVGPDPKAVKMRRHAFHFHHSGSTTLSASALLLPRGALAEPPLLLDHICSAHGHAAGDVALTAASLVEPFLVAEQRNNSGEELQPRLVPETRLDVFVEYELGNAQDGKSGPPRWLPARLLAMVDVPTAAVSALSLLRHDDSFIRRPTWDVGWSLADANQKQVSLFIESKNNSSLESVDSLMLAKSATRIAILGISTSNLNDARRINVSVMQQRGDPLLIVGSPFGLMSPFHFFNSVSVGAVANCLPPCTARSSLLMADMHCLPGMEGAPVFDQNSCLVGLLMNPLTQKGSNIEVQLVITWDAICTEWNSKKLEEIERPPRKLPNDKNTDSKSMELRHVYNYVRVFSSTDNKTNQHCISPRSLREAISAVVLVTVGDTSWASGIVLNKRGLVLTNAHLLEPWRFGRTSPSDLQASFAGEHLNAGENKSLQPQQGKISNEDAVKHKVSSFNLGFKRGKRISVRLDHEERQIWCNASVVFISKGPLDVALLQIEKVPVELNTIRPEFVCPTAGSPVYVVGHGLFGPRSGLHSSLYSGVVSKVVQIPANQLSHLARAEADNMDIPVMLQTTAAVHPGASGGVLVNTHGLMVGIITSNAKHGGGSTIPHLNFSIPCKLLVAVFEYSANGNLVVLEQLDKPNEVLSSVWALAPSSSPFVRSSPEKGKEEKVLEFSKFLSDKQQALKSNVDLKELFRYKTPSKI

SEQ ID NO: 187704 - protein, 365 aa, Zea Mays
MELRHVYNYVRVFSSTDNKTNQHCISPRSLREAISAVVLVTVGDTSWASGIVLNKRGLVLTNAHLLEPWRFGRTSPSDLQASFAGEHLNAGENKSLQPQQGKISNEDAVKHKVSSFNLGFKRGKRISVRLDHEERQIWCNASVVFISKGPLDVALLQIEKVPVELNTIRPEFVCPTAGSPVYVVGHGLFGPRSGLHSSLYSGVVSKVVQIPANQLSHLARAEADNMDIPVMLQTTAAVHPGASGGVLVNTHGLMVGIITSNAKHGGGSTIPHLNFSIPCKLLVAVFEYSANGNLVVLEQLDKPNEVLSSVWALAPSSSPFVRSSPEKGKEEKVLEFSKFLSDKQQALKSNVDLKELFRYKTPSKI

SEQ ID NO: 187705 - protein, 99 aa, Zea Mays
MAKIAAAAAAALCFAALVAVAVCQGEVERQRLRDLQCWQEVQESPLDARRRREEEEDRGATTTPAAGQERDTATVRVASGRCIHRVVPAPPAAGQGSAA

SEQ ID NO: 187706 - protein, 82 aa, Zea Mays
MAKIAAAAAAALCFAALVAVAVCQGEVERQRLRDLQCWQEVQESPLDACRQERDTATVRVASGRCIHRVVPAPPAAGQGSAA

SEQ ID NO: 187707 - protein, 227 aa, Zea Mays
MSRVAILTPQNLQVPTMNEMIDMWKKNKMNTFGIIYSWFLAKVASQLEVLPGAEFRVAFEEAMSYGGKVILGDRPVQITLRRTWGKMSLWHRAKFLYYIIFQSVFLPSPEELNKMLKDMDDVDMLTLVIQEMSKAFPSLMDTLLHERDMYMSSTLLKSAREYSSVVAVVGKGHVSGIKKNWQQPIQVNCLLELPDANQGPSKLKILASIGALTGVIIASGIYVWGRK

SEQ ID NO: 187708 - protein, 239 aa, Zea Mays
MIRAPRLLAAHAPSPIRHRLSLAPISTIYRRLPWSPRAAFLAAQAPISTTRLASSSRLVPLLALPMDPAAPEPVPAPATDTDAETNGYEDASEFEDAEAGGEGAGAGTETGTGTGSGSGTMPAGGVAEMKELPEELAKGVVCLECETSAEAAVSGVGGTCRVYVVGTAHVSQESCDQVKAIINYLKPQAVFLELCMSRVAILTPQNLQVPTMNEMIDMWKKNKMNTFGIIYSWFLAKPT

SEQ ID NO: 187709 - protein, 236 aa, Zea Mays
MLCLVVSGLLNHRRRRIICACQVPTMNEMIDMWKKNKMNTFGIIYSWFLAKVASQLEVLPGAEFRVAFEEAMSYGGKVILGDRPVQITLRRTWGKMSLWHRAKFLYYIIFQSVFLPSPEELNKMLKDMDDVDMLTLVIQEMSKAFPSLMDTLLHERDMYMSSTLLKSAREYSSVVAVVGKGHVSGIKKNWQQPIQVNCLLELPDANQGPSKLKILASIGALTGVIIASGIYVWGRK

SEQ ID NO: 187710 - protein, 227 aa, Zea Mays
MKSSSSSSNLFPQVPTMNEMIDMWKKNKMNTFGIIYSWFLAKVASQLEVLPGAEFRVAFEEAMSYGGKVILGDRPVQITLRRTWGKMSLWHRAKFLYYIIFQSVFLPSPEELNKMLKDMDDVDMLTLVIQEMSKAFPSLMDTLLHERDMYMSSTLLKSAREYSSVVAVVGKGHVSGIKKNWQQPIQVNCLLELPDANQGPSKLKILASIGALTGVIIASGIYVWGRK

SEQ ID NO: 187711 - protein, 497 aa, Zea Mays
MMGSDVENEEQKGGTKSKYEAEVLPPVPKIEIQLEPHHQTLPVGTISAIMGERVIVEGSVQHNPLNEGSILWITESRMPLGIVDELFGPVKNPYYLVRYNSEEEVPAGISAGTDVCFVAEFADHILNMKELYAKGYDESDSVDKDAEDLPDFSDDEKEAEYKRSLRQAKRQTDRQHEPMKTSCYMKGSQPRGSGIRKPMPPRNLDTSTRGHQPQPHFRRSDMAPAGTENTARSLGPQNAPMIAPTMLQPGPMNPAVPPPVPLANQMGGCFMNLAQQQLLPQQPNMVWPGGFPQPPLPNMGVDGAALAANIMQNLLAGASQFQHQFQNLNFSGAGANQFPQQFQNQNFSGGTGANQFPQQFQNQNLSGPGTNQFQQQFPNQNFSGFPNQMPMPFLQTMHQTGMPANPMPFGGRPPANPPSGPASIAPMGQGNFGQPPNPQGFTIPAPPGEDGKQGSPPQFSSRQFHQGSSSSFGRGRTQHRGGRHSYGRGGRGGRHPR

SEQ ID NO: 187712 - protein, 167 aa, Zea Mays
MQYLAFSSFLGLIACLFWNVIATTTAWIKGEGVMIWLLAIIYFISGAPGAYVLWYRPLYNAMRTESALKFGWFFLFYMIHIIFCVWAAVAPPFPFKGKSLAGILPAIDVISKNAIVGIFYFVGFGLFCLESLLSIGVIQQVYMYFRGSGKAAEMKREAARSALSSAF

SEQ ID NO: 187713 - protein, 607 aa, Zea Mays
MPSPIQRRAFPVDHVHASDLHWHTPPAKKDASEVKRSKVEIIKEKSNFLRYPLNEELVSEAPNINESAVQLIKFHGSYQQTDRDVRGQKNYSFMLRTKNPCGKVPNQLYLAMDTLADEFGIGTLRLTTRQTFQLHGVLKKNLKTVLSTVIKNMGSTLGACGDLNRNVLAPAAPFVKKDILFAQQTAENIAALLTPQSGAYYDLWVDGEKIMSAEEPPEVTKARNDNSHGTNFPDSPEPIYGTQYLPRKFKVAVTAAGDNSVDILTNDIGVVVVSDDAGEPIGFNIYVGGGMGRTHRVETTFPRLADPLGYVPKEDILYAIKAIVVTQRENGRRDDRKYSRMKYLIDRWGIDRFRAEVEKYYGKKFESFRPLPEWQFNSYLGWQEQGDGKLFYGVHVDNGRVGGQAKKTLREIIEKYNLDVSITPNQNLILCGIDQAWREPITTALAQAGLLEPKDVDPLNLTAMACPALPLCPLAQTEAERGILPILKRIRAVFNKVGIKDSESVVVRITGCPNGCARPYMAELGFVGDGPKSYQIWLGGTPNQSTLAESFMDKVKLDDIEKVLEPLFTYWNGTRQEGESFGSFTNRTGFDKLKEVVNKWAESPSAA

SEQ ID NO: 187714 - protein, 263 aa, Zea Mays
MDPEPLIVKFIEELDKCIVGYFSFHWKYATYIITQVLTVEGATKRKFKNFVLEATRAFWSGAAANSVIVEADAFKETDVIYRAISSRGHHNDMLQTAELVHQSSLDAASSLLVTALNEGRDVIMDGTLSWEPFVQQTIAMARAVHRQRYRMGCGYKLTDDGTITEEYWEPVEDSNTDEENEVPARKPYRIELVGVVCDAYLAVVRGIRRAVVTGRAVRVKSQLQSHKRFATAFNSYCSLVDNARLYSTNTLGVPKVSQLNLVN

SEQ ID NO: 187715 - protein, 413 aa, Zea Mays
MRAEATGSAAKLLAPRMVVSASSRVQELERFSHYVARQIGFDDVKECPHLCTLAYDYLRKNKGYEENIFAFFQNSMDPEPLIVKFIEELDKCIVGYFSFHWKYATYIITQVLTVEGATKRKFKNFVLEATRAFWSGAAANSVIVEADAFKETDVIYRAISSRGHHNDMLQTAELVHQSSLDAASSLLVTALNEGRDVIMDGTLSWEPFVQQTIAMARAVHRQRYRMGCGYKLTDDGTITEEYWEPVEDSNTDEENEVPARKPYRIELVGVVCDAYLAVVRGIRRAVVTGRAVRVKSQLQSHKRFATAFNSYCSLVDNARLYSTNTLGVPKLIGWKDGESSLLVDPEEIGCLDRLRSLNEEADCVHELYADGQPTGGSSSAWQDLLVMSPSRVSAQRELKAAIERNEGRFVKPA

SEQ ID NO: 187716 - protein, 904 aa, Zea Mays
MEREERRLTELAQKILETFVLSHIFSGIEVAYQEAVALKRQEELIREEEEEAGLLEHQMKGKRGGGANEKDKRAKKKQTKQKKNNRKAKDKERDVKCEVKILERLHDETVIDNSDGLPAKVEVIAKVDALEEGSSDGSDMPNRGKNQCNKGLSISLAKEGDGLPSTSSVTGGSGRNSSGCCTAPKLDQDTVLLTLRDKLRKLGQRLQEKNIEGQKLLKAHFEARDTKVKVEESSDSSNSLDRPPDVPESSMHSSEDTVDLKVNGTPNKDASVVNPVLEESVSGIPVTAKNESLPSARTKEGPVSNKDNASSLKMKTMASCLKLHPADVDKDAPFPSKSPRINRAAPVPSKLPSADKATPVLPKSSLSVNKAALVRPKSPAVDKATPVCPESPAVDKVTPVRPRSPAVDKATPVRSQSPAVDKATHVCPQSPSVDKATPSIDKATPVRPKSPAIDKVTPIPPKSPPVDKASPAPPKSLSGAKDVPVPSRSLQIDRFIPAPPRLSQVDKAALPSSEQPHISPATNSEAQGATTSRKVTASSVLEVAAASRPSSAPVLPTPRSTAPVASHIQTSTLLSRSMSEAAGRRSVNDPSFSAPSYTPQTYRNAIIGKTGLATTSANLAYQSYSLGQDTAPSQPLSAYASSTAVMMPPAGRSDQSSARHGFKSGSGKLEAHDSWQQWKGDNNVDMHLWRDHTTYQQMTRGQAYDQSRRDDTYQQTCSRGTEKFSRHAGLQARQFQTETPASHVWHQQQGQVAEEFPHLDIINDLLEEDQINGSIPESFHQDYNVFGLPFSPRGNVSDMGMASVRSPARFNSTKYEYDGGFSGAYDINAVNGLRERQFPSLDSYSNGLSDVSASKPWLNGSPSPSVMSLGVNTNGYHPQVADYPSLGNGVNGVSLWRRHANGRW

SEQ ID NO: 187717 - protein, 654 aa, Zea Mays
MHSSEDTVDLKVNGTPNKDASVVNPVLEESVSGIPVTAKNESLPSARTKEGPVSNKDNASSLKMKTMASCLKLHPADVDKDAPFPSKSPRINRAAPVPSKLPSADKATPVLPKSSLSVNKAALVRPKSPAVDKATPVCPESPAVDKVTPVRPRSPAVDKATPVRSQSPAVDKATHVCPQSPSVDKATPSIDKATPVRPKSPAIDKVTPIPPKSPPVDKASPAPPKSLSGAKDVPVPSRSLQIDRFIPAPPRLSQVDKAALPSSEQPHISPATNSEAQGATTSRKVTASSVLEVAAASRPSSAPVLPTPRSTAPVASHIQTSTLLSRSMSEAAGRRSVNDPSFSAPSYTPQTYRNAIIGKTGLATTSANLAYQSYSLGQDTAPSQPLSAYASSTAVMMPPAGRSDQSSARHGFKSGSGKLEAHDSWQQWKGDNNVDMHLWRDHTTYQQMTRGQAYDQSRRDDTYQQTCSRGTEKFSRHAGLQARQFQTETPASHVWHQQQGQVAEEFPHLDIINDLLEEDQINGSIPESFHQDYNVFGLPFSPRGNVSDMGMASVRSPARFNSTKYEYDGGFSGAYDINAVNGLRERQFPSLDSYSNGLSDVSASKPWLNGSPSPSVMSLGVNTNGYHPQVADYPSLGNGVNGVSLWRRHANGRW

SEQ ID NO: 187718 - protein, 1292 aa, Zea Mays
MAGSVVTDDSAASTTGMRDDENSLSGESFSEWRSCDRADSDTPSTSPPFWDSDGDDDDPGRVWHLPAGVKEDEKVQVETWKKGDGGDGPKPSELFGHHTWRIENFSKEKKREMKSEPFEAGGYKWYILVYPQGCDVSNHLSLFLCVANHDKLLPGWSHFAQFTIAVANIDPKKMKYSGELNLVCFLLGRFWKKEHDWGWKKFMELSKIQDGFLVDDVLEIIAQVQVIREKVDRPFRCLDRPYRRELIRIYMTNVEQIYRRFVEERRSKLSKLIEDKMKWSSFRAFWSAIDPNTRHHMSREKTETILKILVKQFFVEKEVTSTLVMDSLYTSLKALEYRMKSKKCKTKLADLEELPAPMVHVDMDMFVLADDVIALLERAALEPLPCQPVAPKDDKTSQSRMKDGSSGEVYKVSMEREERRLTELAQKILETFVLSHIFSGIEVAYQEAVALKRQEELIREEEEEAGLLEHQMKGKRGGGANEKDKRAKKKQTKQKKNNRKAKDKERDVKCEVKILERLHDETVIDNSDGLPAKVEVIAKVDALEEGSSDGSDMPNSVTGGSGRNSSGCCTAPKLDQDTVLLTLRDKLRKLGQRLQEKNIEGQKLLKAHFEARDTKVKVEESSDSSNSLDRPPDVPESSMHSSEDTVDLKVNGTPNKDASVVNPVLEESVSGIPVTAKNESLPSARTKEGPVSNKDNASSLKMKTMASCLKLHPADVDKDAPFPSKSPRINRAAPVPSKLPSADKATPVLPKSSLSVNKAALVRPKSPAVDKATPVCPESPAVDKVTPVRPRSPAVDKATPVRSQSPAVDKATHVCPQSPSVDKATPSIDKATPVRPKSPAIDKVTPIPPKSPPVDKASPAPPKSLSGAKDVPVPSRSLQIDRFIPAPPRLSQVDKAALPSSEQPHISPATNSEAQGATTSRKVTASSVLEVAAASRPSSAPVLPTPRSTAPVASHIQTSTLLSRSMSEAAGRRSVNDPSFSAPSYTPQTYRNAIIGKTGLATTSANLAYQSYSLGQDTAPSQPLSAYASSTAVMMPPAGRSDQSSARHGFKSGSGKLEAHDSWQQWKGDNNVDMHLWRDHTTYQQMTRGQAYDQSRRDDTYQQTCSRGTEKFSRHAGLQARQFQTETPASHVWHQQQGQVAEEFPHLDIINDLLEEDQINGSIPESFHQDYNVFGLPFSPRGNVSDMGMASVRSPARFNSTKYEYDGGFSGAYDINAVNGLRERQFPSLDSYSNGLSDVSASKPWLNGSPSPSVMSLGVNTNGYHPQVADYPSLGNGVNGVSLWRRHANGRW

SEQ ID NO: 187719 - protein, 1257 aa, Zea Mays
MAGSVVTDDSAASTTGMRDDENSLSGESFSEWRSCDRADSDTPSTSPPFWDSDGDDDDPGPKPSELFGHHTWRIENFSKEKKREMKSEPFEAGGYKWYILVYPQGCDVSNHLSLFLCVANHDKLLPGWSHFAQFTIAVANIDPKKMKYSDTLHRFWKKEHDWGWKKFMELSKIQDGFLVDDVLEIIAQVQVIREKVDRPFRCLDRPYRRELIRIYMTNVEQIYRRFVEERRSKLSKLIEDKMKWSSFRAFWSAIDPNTRHHMSREKTETILKILVKQFFVEKEVTSTLVMDSLYTSLKALEYRMKSKKCKTKLADLEELPAPMVHVDMDMFVLADDVIALLERAALEPLPCQPVAPKDDKTSQSRMKDGSSGEVYKVSMEREERRLTELAQKILETFVLSHIFSGIEVAYQEAVALKRQEELIREEEEEAGLLEHQMKGKRGGGANEKDKRAKKKQTKQKKNNRKAKDKERDVKCEVKILERLHDETVIDNSDGLPAKVEVIAKVDALEEGSSDGSDMPNSVTGGSGRNSSGCCTAPKLDQDTVLLTLRDKLRKLGQRLQEKNIEGQKLLKAHFEARDTKVKVEESSDSSNSLDRPPDVPESSMHSSEDTVDLKVNGTPNKDASVVNPVLEESVSGIPVTAKNESLPSARTKEGPVSNKDNASSLKMKTMASCLKLHPADVDKDAPFPSKSPRINRAAPVPSKLPSADKATPVLPKSSLSVNKAALVRPKSPAVDKATPVCPESPAVDKVTPVRPRSPAVDKATPVRSQSPAVDKATHVCPQSPSVDKATPSIDKATPVRPKSPAIDKVTPIPPKSPPVDKASPAPPKSLSGAKDVPVPSRSLQIDRFIPAPPRLSQVDKAALPSSEQPHISPATNSEAQGATTSRKVTASSVLEVAAASRPSSAPVLPTPRSTAPVASHIQTSTLLSRSMSEAAGRRSVNDPSFSAPSYTPQTYRNAIIGKTGLATTSANLAYQSYSLGQDTAPSQPLSAYASSTAVMMPPAGRSDQSSARHGFKSGSGKLEAHDSWQQWKGDNNVDMHLWRDHTTYQQMTRGQAYDQSRRDDTYQQTCSRGTEKFSRHAGLQARQFQTETPASHVWHQQQGQVAEEFPHLDIINDLLEEDQINGSIPESFHQDYNVFGLPFSPRGNVSDMGMASVRSPARFNSTKYEYDGGFSGAYDINAVNGLRERQFPSLDSYSNGLSDVSASKPWLNGSPSPSVMSLGVNTNGYHPQVADYPSLGNGVNGVSLWRRHANGRW

SEQ ID NO: 187720 - protein, 1310 aa, Zea Mays
MAGSVVTDDSAASTTGMRDDENSLSGESFSEWRSCDRADSDTPSTSPPFWDSDGDDDDPGRVWHLPAGVKEDEKVQVETWKKGDGGDGPKPSELFGHHTWRIENFSKEKKREMKSEPFEAGGYKWYILVYPQGCDVSNHLSLFLCVANHDKLLPGWSHFAQFTIAVANIDPKKMKYSDTLHRFWKKEHDWGWKKFMELSKIQDGFLVDDVLEIIAQVQVIREKVDRPFRCLDRPYRRELIRIYMTNVEQIYRRFVEERRSKLSKLIEDKMKWSSFRAFWSAIDPNTRHHMSREKTETILKILVKQFFVEKEVTSTLVMDSLYTSLKALEYRMKSKKCKTKLADLEELPAPMVHVDMDMFVLADDVIALLERAALEPLPCQPVAPKDDKTSQSRMKDGSSGEVYKVSMEREERRLTELAQKILETFVLSHIFSGIEVAYQEAVALKRQEELIREEEEEAGLLEHQMKGKRGGGANEKDKRAKKKQTKQKKNNRKAKDKERDVKCEVKILERLHDETVIDNSDGLPAKVEVIAKVDALEEGSSDGSDMPNRGKNQCNKGLSISLAKEGDGLPSTSSVTGGSGRNSSGCCTAPKLDQDTVLLTLRDKLRKLGQRLQEKNIEGQKLLKAHFEARDTKVKVEESSDSSNSLDRPPDVPESSMHSSEDTVDLKVNGTPNKDASVVNPVLEESVSGIPVTAKNESLPSARTKEGPVSNKDNASSLKMKTMASCLKLHPADVDKDAPFPSKSPRINRAAPVPSKLPSADKATPVLPKSSLSVNKAALVRPKSPAVDKATPVCPESPAVDKVTPVRPRSPAVDKATPVRSQSPAVDKATHVCPQSPSVDKATPSIDKATPVRPKSPAIDKVTPIPPKSPPVDKASPAPPKSLSGAKDVPVPSRSLQIDRFIPAPPRLSQVDKAALPSSEQPHISPATNSEAQGATTSRKVTASSVLEVAAASRPSSAPVLPTPRSTAPVASHIQTSTLLSRSMSEAAGRRSVNDPSFSAPSYTPQTYRNAIIGKTGLATTSANLAYQSYSLGQDTAPSQPLSAYASSTAVMMPPAGRSDQSSARHGFKSGSGKLEAHDSWQQWKGDNNVDMHLWRDHTTYQQMTRGQAYDQSRRDDTYQQTCSRGTEKFSRHAGLQARQFQTETPASHVWHQQQGQVAEEFPHLDIINDLLEEDQINGSIPESFHQDYNVFGLPFSPRGNVSDMGMASVRSPARFNSTKYEYDGGFSGAYDINAVNGLRERQFPSLDSYSNGLSDVSASKPWLNGSPSPSVMSLGVNTNGYHPQVADYPSLGNGVNGVSLWRRHANGRW

SEQ ID NO: 187721 - protein, 1366 aa, Zea Mays
MRVFRHAACIITAKPRHPPFQLQARRKRSGTGTAFTLLFLPTLTPHRVPSLALSLSWGRLGDRRRRRLTPGAQVLVGPFAGDEDLPGSVVTDDSAASTTGMRDDENSLSGESFSEWRSCDRADSDTPSTSPPFWDSDGDDDDPGPKPSELFGHHTWRIENFSKEKKREMKSEPFEAGGYKWYILVYPQGCDVSNHLSLFLCVANHDKLLPGWSHFAQFTIAVANIDPKKMKYSDTLHRFWKKEHDWGWKKFMELSKIQDGFLVDDVLEIIAQVQVIREKVDRPFRCLDRPYRRELIRIYMTNVEQIYRRFVEERRSKLSKLIEDKMKWSSFRAFWSAIDPNTRHHMSREKTETILKILVKQFFVEKEVTSTLVMDSLYTSLKALEYRMKSKKCKTKLADLEELPAPMVHVDMDMFVLADDVIALLERAALEPLPCQPVAPKDDKTSQSRMKDGSSGEVYKVSMEREERRLTELAQKILETFVLSHIFSGIEVAYQEAVALKRQEELIREEEEEAGLLEHQMKGKRGGGANEKDKRAKKKQTKQKKNNRKAKDKERDVKCEVKILERLHDETVIDNSDGLPAKVEVIAKVDALEEGSSDGSDMPNRGKNQCNKGLSISLAKEGDGLPSTSSVTGGSGRNSSGCCTAPKLDQDTVLLTLRDKLRKLGQRLQEKNIEGQKLLKAHFEARDTKVKVEESSDSSNSLDRPPDVPESSMHSSEDTVDLKVNGTPNKDASVVNPVLEESVSGIPVTAKNESLPSARTKEGPVSNKDNASSLKMKTMASCLKLHPADVDKDAPFPSKSPRINRAAPVPSKLPSADKATPVLPKSSLSVNKAALVRPKSPAVDKATPVCPESPAVDKVTPVRPRSPAVDKATPVRSQSPAVDKATHVCPQSPSVDKATPSIDKATPVRPKSPAIDKVTPIPPKSPPVDKASPAPPKSLSGAKDVPVPSRSLQIDRFIPAPPRLSQVDKAALPSSEQPHISPATNSEAQGATTSRKVTASSVLEVAAASRPSSAPVLPTPRSTAPVASHIQTSTLLSRSMSEAAGRRSVNDPSFSAPSYTPQTYRNAIIGKTGLATTSANLAYQSYSLGQDTAPSQPLSAYASSTAVMMPPAGRSDQSSARHGFKSGSGKLEAHDSWQQWKGDNNVDMHLWRDHTTYQQMTRGQAYDQSRRDDTYQQTCSRGTEKFSRHAGLQARQFQTETPASHVWHQQQGQVAEEFPHLDIINDLLEEDQINGSIPESFHQDYNVFGLPFSPRGNVSDMGMASVRSPARFNSTKYEYDGGFSGAYDINAVNGLRERQFPSLDSYSNGLSDVSASKPWLNGSPSPSVMSLGVNTNGYHPQVADYPSLGNGVNGVSLWRRHANGRW

SEQ ID NO: 187722 - protein, 1282 aa, Zea Mays
MAGSVVTDDSAASTTGMRDDENSLSGESFSEWRSCDRADSDTPSTSPPFWDSDGDDDDPGPKPSELFGHHTWRIENFSKEKKREMKSEPFEAGGYKWYILVYPQGCDVSNHLSLFLCVANHDKLLPGWSHFAQFTIAVANIDPKKMKYSDTLHRFWKKEHDWGWKKFMELSKIQDGFLVDDVLEIIAQVQVIREKVDRPFRCLDRPYRRELIRIYMTNVEQIYRRFVEERRSKLSKLIEDKMKWSSFRAFWSAIDPNTRHHMSREKTETILKILVKQFFVEKEVTSTLVMDSLYTSLKALEYRMKSKKCKTKLADLEELPAPMVHVDMDMFVLADDVIALLERAALEPLPCQPVAPKDDKTSQSRMKDGSSGEVYKVSMEREERRLTELAQKILETFVLSHIFSGIEVAYQEAVALKRQEELIREEEEEAGLLEHQMKGKRGGGANEKDKRAKKKQTKQKKNNRKAKDKERDVKCEVKILERLHDETVIDNSDGLPAKVEVIAKVDALEEGSSDGSDMPNRGKNQCNKGLSISLAKEGDGLPSTSSVTGGSGRNSSGCCTAPKLDQDTVLLTLRDKLRKLGQRLQEKNIEGQKLLKAHFEARDTKVKVEESSDSSNSLDRPPDVPESSMHSSEDTVDLKVNGTPNKDASVVNPVLEESVSGIPVTAKNESLPSARTKEGPVSNKDNASSLKMKTMASCLKLHPADVDKDAPFPSKSPRINRAAPVPSKLPSADKATPVLPKSSLSVNKAALVRPKSPAVDKATPVCPESPAVDKVTPVRPRSPAVDKATPVRSQSPAVDKATHVCPQSPSVDKATPSIDKATPVRPKSPAIDKVTPIPPKSPPVDKASPAPPKSLSGAKDVPVPSRSLQIDRFIPAPPRLSQVDKAALPSSEQPHISPATNSEAQGATTSRKVTASSVLEVAAASRPSSAPVLPTPRSTAPVASHIQTSTLLSRSMSEAAGRRSVNDPSFSAPSYTPQTYRNAIIGKTGLATTSANLAYQSYSLGQDTAPSQPLSAYASSTAVMMPPAGRSDQSSARHGFKSGSGKLEAHDSWQQWKGDNNVDMHLWRDHTTYQQMTRGQAYDQSRRDDTYQQTCSRGTEKFSRHAGLQARQFQTETPASHVWHQQQGQVAEEFPHLDIINDLLEEDQINGSIPESFHQDYNVFGLPFSPRGNVSDMGMASVRSPARFNSTKYEYDGGFSGAYDINAVNGLRERQFPSLDSYSNGLSDVSASKPWLNGSPSPSVMSLGVNTNGYHPQVADYPSLGNGVNGVSLWRRHANGRW

SEQ ID NO: 187723 - protein, 1285 aa, Zea Mays
MAGSVVTDDSAASTTGMRDDENSLSGESFSEWRSCDRADSDTPSTSPPFWDSDGDDDDPGRVWHLPAGVKEDEKVQVETWKKGDGGDGPKPSELFGHHTWRIENFSKEKKREMKSEPFEAGGYKWYILVYPQGCDVSNHLSLFLCVANHDKLLPGWSHFAQFTIAVANIDPKKMKYSDTLHRFWKKEHDWGWKKFMELSKIQDGFLVDDVLEIIAQVQVIREKVDRPFRCLDRPYRRELIRIYMTNVEQIYRRFVEERRSKLSKLIEDKMKWSSFRAFWSAIDPNTRHHMSREKTETILKILVKQFFVEKEVTSTLVMDSLYTSLKALEYRMKSKKCKTKLADLEELPAPMVHVDMDMFVLADDVIALLERAALEPLPCQPVAPKDDKTSQSRMKDGSSGEVYKVSMEREERRLTELAQKILETFVLSHIFSGIEVAYQEAVALKRQEELIREEEEEAGLLEHQMKGKRGGGANEKDKRAKKKQTKQKKNNRKAKDKERDVKCEVKILERLHDETVIDNSDGLPAKVEVIAKVDALEEGSSDGSDMPNSVTGGSGRNSSGCCTAPKLDQDTVLLTLRDKLRKLGQRLQEKNIEGQKLLKAHFEARDTKVKVEESSDSSNSLDRPPDVPESSMHSSEDTVDLKVNGTPNKDASVVNPVLEESVSGIPVTAKNESLPSARTKEGPVSNKDNASSLKMKTMASCLKLHPADVDKDAPFPSKSPRINRAAPVPSKLPSADKATPVLPKSSLSVNKAALVRPKSPAVDKATPVCPESPAVDKVTPVRPRSPAVDKATPVRSQSPAVDKATHVCPQSPSVDKATPSIDKATPVRPKSPAIDKVTPIPPKSPPVDKASPAPPKSLSGAKDVPVPSRSLQIDRFIPAPPRLSQVDKAALPSSEQPHISPATNSEAQGATTSRKVTASSVLEVAAASRPSSAPVLPTPRSTAPVASHIQTSTLLSRSMSEAAGRRSVNDPSFSAPSYTPQTYRNAIIGKTGLATTSANLAYQSYSLGQDTAPSQPLSAYASSTAVMMPPAGRSDQSSARHGFKSGSGKLEAHDSWQQWKGDNNVDMHLWRDHTTYQQMTRGQAYDQSRRDDTYQQTCSRGTEKFSRHAGLQARQFQTETPASHVWHQQQGQVAEEFPHLDIINDLLEEDQINGSIPESFHQDYNVFGLPFSPRGNVSDMGMASVRSPARFNSTKYEYDGGFSGAYDINAVNGLRERQFPSLDSYSNGLSDVSASKPWLNGSPSPSVMSLGVNTNGYHPQVADYPSLGNGVNGVSLWRRHANGRW

SEQ ID NO: 187724 - protein, 141 aa, Zea Mays
MRTSLQNELLRLLRCLEEVKHPLEVHSTQSEKTVALPGGTPPCTESRNLLHAGIWMPARFASEHYEHAHNLARTVRCANCTQRRLCYLYSEAFLCFVKKASLTFILHYQINGKLIENKMFSSSCLVANALYFWQAVKELNQ

SEQ ID NO: 187725 - protein, 291 aa, Zea Mays
MEATPISMKPPSPAPAAPPPATLEPGDLPTHAFGGTELEPSSMNQLAIAPDPKRPRVEEAADGNGCKHCACKKSRCLKLYCPCFSGGGYCSDKCGCQPCFNKEAFAETVHTTRKVLLSRQKRMSMKINRRPEANTEPMEDAHHSSSSTPPKRGCNCKKSSCLKKYCDCYQDGTGCSLFCRCDDCQNPFGKNEGIMADDSKRYLYTGADLDHSEGEHDFVVERSPRLQSPISKESSFPPNPTSSQGVKQRRARFPTRDIPVAGAAPLVALFQQEEQQRPSHGRLRELQELEP

SEQ ID NO: 187726 - protein, 262 aa, Zea Mays
MDGSIGQAAFDQAQAFKQSASVGAVIVTKMDGHAKGGGALSAVAATKSPVIFIGTGEHIPDFEVFEVNPFVSRLLGMGDLSGLVNKIQEFMPDNQQMQIMDKLGEGTFTLRLLYEMFQNLQRIGPLGQLVSMIPGFSGQFIEKGNEKEGQAKIKRYMTMMDSMTDAELDGTDPKLMNQSRINRIARGSGRRVEEVVHMLDEYKRIAKVWKKLPVLNNNRRSDMNRDIRRISDAIPPNMLTQLGGIAGLQNMIKQMGGRDRSR

SEQ ID NO: 187727 - protein, 85 aa, Zea Mays
MFDQRVIGPKDLPKPAQWHRIAVHNDYLSAYAVQKLVKKVYNDSVNDQVKNIPEICVRRDGKIQLVKSGDSAANISLDELREGLF

SEQ ID NO: 187728 - protein, 192 aa, Zea Mays
MELAQTNTGNTPKSYSLNMFKDFVPMCVFSESNQGKLSCEGKVEHKFDMEPHSDNLANYGKLCRERTQKYMVKSRQVQVLDNDHGMSMRPMPGLVGLIPSGSKEKKKQAPAKPSDVKRTRRDRTEMENIIFKLFERQPNWALKALVQETDQPEQFLKEILNDLCVYNKRGPNQGTHELKPEYKKSTGDTDAA

SEQ ID NO: 187729 - protein, 195 aa, Zea Mays
MFKMELAQTNTGNTPKSYSLNMFKDFVPMCVFSESNQGKLSCEGKVEHKFDMEPHSDNLANYGKLCRERTQKYMVKSRQVQVLDNDHGMSMRPMPGLVGLIPSGSKEKKKQAPAKPSDVKRTRRDRTEMENIIFKLFERQPNWALKALVQETDQPEQFLKEILNDLCVYNKRGPNQGTHELKPEYKKSTGDTDAA

SEQ ID NO: 187730 - protein, 184 aa, Zea Mays
MIILKQESGYADVNDNSFLKVNFQMEQGLPLVPKSLTFNRVKCAVSKGIKLGPTFLVTSLTGGSIVGDMAPYQAFAIGGLGSVRGYGEGAVGSGRLCLIANCEYTIPLVKHLEGSIFMDCGSDLGSARHVPGNPALRQGKPGFGIGFGYGLHFNTDLGQIRVDYAMNAFNRKTIYFGINSSGGS

SEQ ID NO: 187731 - protein, 358 aa, Zea Mays
MGAQQSVNAGKAKVDMKVDLTHMLCEALLLPPLRSSGVTLSQIVGRISLKHPNLFGRSEKLDVILDKGINDSNFVIAYRRPRAEWLSQQSFVFQHSMTPEVAVHGFPADNFTRSGSRGINLSRLSFGLELNEPATSNWTSGTSVKFENIRPVNNQGHSIARDHDGFPLTCSGNLHDNMIILKQESGYADVNDNSFLKVNFQMEQGLPLVPKSLTFNRVKCAVSKGIKLGPTFLVTSLTGGSIVGDMAPYQAFAIGGLGSVRGYGEGAVGSGRLCLIANCEYTIPLVKHLEGSIFMDCGSDLGSARHVPALRQGKPGFGIGFGYGLHFNTDLGQIRVDYAMNAFNRKTIYFGINSSGGS

SEQ ID NO: 187732 - protein, 894 aa, Zea Mays
MDNLVAVFKSMEAAAGISVVSTQLTPAPKAAECSEYTAGKPRRSNKKKLASKKEKNTVKATANSASCSTAKPSISKNKRIHVTPFPESETPIRPKKIMKSDEQKRKEDKDNTLNSDIPDNPSLSPFFWLKEQEENVGGTAETLSEPLSLDTALCHNVPTFSDIKDSDDEMPNDMTPNSKVEVSELFDSEIFEWSQRPCSPELRSTPLKKQGQSKNTLDQITEVDDGGYMNLGDLFDKLDHESNVTQPANAEEAKKRKLARARNRKNSKLPSRVKLCTKGSDAEHQVKNIPVSIAAKPNQKDINKKKRCTLNGGNKVSGNNTKVVFSSDKYMYTFSPQSGGLDIEAPENQPSERILKKPKNSRSKLHIAGDSAVKTAKNKSEQRVKQTIRCSGGVVDENLRVLSEAENEIESFQLHRLAKGCTQHKPFDDRSKQNMESNIGPNTPSILPGRCQFDEAIHTIPTVKNVSVKNGRAKSIEQPDYPGSIRLCTAHNTALKKCEGKASKLSCAFCQSDDTTQESGEMVHYHNGKQVPAAFDAGAGVVHCHKNCLEWAPDVYFEDDSVFNLANELARSKRIKCACCGIKGAALGCFETSCRKSFHLTCARLIPECRWDNENFVMLCPLHQSSKLPRETSGFKNKSHRKLARKSSSEVNTSQSHDNKWTWPSGSPPKWVLCCSALSAAEKGIVSELAKIAGVPISTSWSPNVTHVIASTNMSGSCKRTLKFLMAILNGKWVISMDWVKTCMELMEPADEMKFEVSTDVHGTADGPRLGRQRVINKQPKLFDGIQFYLHGDYTKSYRGYLQDLVVAAGGTVLQRKPVSRNHQKLLDESSLILIVYSIENQDKAKPGSSDGMDTGRSQADAQALACASGGKAVSSAWIIDSIAACNLRPSMLP

SEQ ID NO: 187733 - protein, 945 aa, Zea Mays
MADVGSLERMGRELKCPICLSLLTSAVSITCNHIFCNACLTESKKSASCCPVCKVPFHRREIRPAPHMDNLVAVFKSMEAAAECSEYTAGKPRRSNKKKLASKKEKNTVKATANSASCSTAKPSISKNKRIHVTPFPESETPIRPKKIMKSDEQKRKEDKDNTLNSDIPDNPSLSPFFWLKEQEENVGGTAETLSEPLSLDTALCHNVPTFSDIKDSDDEMPNDMTPNSKVEVSELFDSEIFEWSQRPCSPELRSTPLKKQGQSKNTLDQITEVDDGGYMNLGDLFDKLDHESNVTQPANAEEAKKRKLARARNRKNSKLPSRVKLCTKGSDAEHQVKNIPVSIAAKPNQKDINKKKRCTLNGGNKVSGNNTKVVFSSDKYMYTFSPQSGGLDIEAPENQPSERILKKPKNSRSKLHIAGDSAVKTAKNKSEQRVKQTIRCSGGVVDENLRVLSEAENEIESFQLHRLAKGCTQHKPFDDRSKQNMESNIGPNTPSILPGRCQFDEAIHTIPTVKNVSVKNGRAKSIEQPDYPGSIRLCTAHNTALKKCEGKASKLSCAFCQSDDTTQESGEMVHYHNGKQVPAAFDAGAGVVHCHKNCLEWAPDVYFEDDSVFNLANELARSKRIKCACCGIKGAALGCFETSCRKSFHLTCARLIPECRWDNENFVMLCPLHQSSKLPRETSGFKNKSHRKLARKSSSEVNTSQSHDNKWTWPSGSPPKWVLCCSALSAAEKGIVSELAKIAGVPISTSWSPNVTHVIASTNMSGSCKRTLKFLMAILNGKWVISMDWVKTCMELMEPADEMKFEVSTDVHGTADGPRLGRQRVINKQPKLFDGIQFYLHGDYTKSYRGYLQDLVVAAGGTVLQRKPVSRNHQKLLDESSLILIVYSIENQDKAKPGSSDGMDTGRSQADAQALACASGGKAVSSAWIIDSIAACNLRPSMLP

SEQ ID NO: 187734 - protein, 322 aa, Zea Mays
MNLGDLFDKLDHESNVTQPANAEEAKKRKLARARNRKNSKLPSRVKLCTKGSDAEHQVKNIPVSIAAKPNQKDINKKKRCTLNGGNKVSGNNTKVVFSSDKYMYTFSPQSGGLDIEAPENQPSERILKKPKNSRSKLHIAGDSAVKTAKNKSEQRVKQTIRCSGGVVDENLRVLSEAENEIESFQLHRLAKGCTQHKPFDDRSKQNMESNIGPNTPSILPGRCQFDEAIHTIPTVKNVSVKNGRAKSIEQPDYPGSIRLCTAHNTALKKCEGKASKLSCAFCQSDDTTQESGEMVHYHNGKQVPAAFDAGAGVVHCHKNCLE

SEQ ID NO: 187735 - protein, 725 aa, Zea Mays
MPNDMTPNSKVEVSELFDSEIFEWSQRPCSPELRSTPLKKQGQSKNTLDQITEVDDGGYMNLGDLFDKLDHESNVTQPANAEEAKKRKLARARNRKNSKLPSRVKLCTKGSDAEHQVKNIPVSIAAKPNQKDINKKKRCTLNGGNKVSGNNTKVVFSSDKYMYTFSPQSGGLDIEAPENQPSERILKKPKNSRSKLHIAGDSAVKTAKNKSEQRVKQTIRCSGGVVDENLRVLSEAENEIESFQLHRLAKGCTQHKPFDDRSKQNMESNIGPNTPSILPGRCQFDEAIHTIPTVKNVSVKNGRAKSIEQPDYPGSIRLCTAHNTALKKCEGKASKLSCAFCQSDDTTQESGEMVHYHNGKQVPAAFDAGAGVVHCHKNCLEWAPDVYFEDDSVFNLANELARSKRIKCACCGIKGAALGCFETSCRKSFHLTCARLIPECRWDNENFVMLCPLHQSSKLPRETSGFKNKSHRKLARKSSSEVNTSQSHDNKWTWPSGSPPKWVLCCSALSAAEKGIVSELAKIAGVPISTSWSPNVTHVIASTNMSGSCKRTLKFLMAILNGKWVISMDWVKTCMELMEPADEMKFEVSTDVHGTADGPRLGRQRVINKQPKLFDGIQFYLHGDYTKSYRGYLQDLVVAAGGTVLQRKPVSRNHQKLLDESSLILIVYSIENQDKAKPGSSDGMDTGRSQADAQALACASGGKAVSSAWIIDSIAACNLRPSMLP

SEQ ID NO: 187736 - protein, 85 aa, Zea Mays
MMPPPPLRLHLLFRSETLIPLLRQRPSCDAPHCRTRRYISVRASAAQLAAADVSTAQQPALELGLEAAAAGFVTGKRKATEVAHA

SEQ ID NO: 187737 - protein, 227 aa, Zea Mays
MMPPPPLRLHLLFRSETLIPLLRQRPSCDAPHCRTRRYISVRASAAQLAAADVSTAQQPALELGLEAAAAGFVTGKRKATEVAHAFWRNIVQKGDTVVDATCGNGNDTLALLKMVADETGRGRVYGMDIQDSAIENTSSFLKMAVDDEHQRGLVKLFPICHSRMEEIVPKDAPVRLVAFNLGYLPGGDKTVITVPRTTELALRAASRILSSGGLISVLVYIGHPGGR

SEQ ID NO: 187738 - protein, 780 aa, Zea Mays
MRGVRADGGGGAFSSSTAENSCFDAAQYSFFGKAPMEGAELGGLLEGGVDGDGGGFGGHDDAGYQFSSTGEEIDCMSNLSEIDDLASTFAMLNRNISGTRNPGIIGDRRSISRENQDILDGDESLDSKQWCSQLQSSPHFGESKPLSRTSSYPNQPLQHRSSEPILLHRSTSFTSYPPSGESPGLPYPAQGLTRHSSIPSPGAGHLMGSPSSSLSGSPYHMPGLSHGLPYGRNMSYTTGDLSTNNVLQNEWSNQAGPLVFDHLNRRPSFLQPHLSLSSSSMSSLLFSQQHQRLAPGQPPLQNYINMQPHLFHHHQPPDVPSPRDKRSRSGRGGKHNIRFSQQPSDAGSQHSESSGIKFRSKYMSSEEIESILKMQHSANHSNDPYFDDYYHQACKAKRSVTFQKSNFCPMSIKDFPSKSRSGVDQHSYLQVDANGGVSFSAIRRPRPLLEADLPGSGDGFYDHKSSKRSLEKEPMLAARITVEDSLRLLLVVDDIDRFLQSSQPQDSSFQLKRRREVLLEGLATSLQLVDPFGPNKHGHSGGLAPKDDLIFLRIISLPKGRKLLARYLRLLFSGSELTRIVCMAVFRHLRSLFGGLPSDYSAAETTIVLAKAVSSCVRHMELSALSACLAAVVCSSQQPPLRPLGSASGDGASLIIKSVLDRATELLADPHSAANYSRSARSLWHASFDAFFGLLTKYCDSKYESIVQRFAMQGSNSMGGPETTKAVSREMPVELLRASLPHTNEQHRQTLLDFARKSTHLPGFSPTANRGLVNSESVPG

SEQ ID NO: 187739 - protein, 574 aa, Zea Mays
MGSPSSSLSGSPYHMPGLSHGLPYGRNMSYTTGDLSTNNVLQNEWSNQAGPLVFDHLNRRPSFLQPHLSLSSSSMSSLLFSQQHQRLAPGQPPLQNYINMQPHLFHHHQPPDVPSPRDKRSRSGRGGKHNIRFSQQPSDAGSQHSESSGIKFRSKYMSSEEIESILKMQHSANHSNDPYFDDYYHQACKAKRSVTFQKSNFCPMSIKDFPSKSRSGVDQHSYLQVDANGGVSFSAIRRPRPLLEADLPGSGDGFYDHKSSKRSLEKEPMLAARITVEDSLRLLLVVDDIDRFLQSSQPQDSSFQLKRRREVLLEGLATSLQLVDPFGPNKHGHSGGLAPKDDLIFLRIISLPKGRKLLARYLRLLFSGSELTRIVCMAVFRHLRSLFGGLPSDYSAAETTIVLAKAVSSCVRHMELSALSACLAAVVCSSQQPPLRPLGSASGDGASLIIKSVLDRATELLADPHSAANYSRSARSLWHASFDAFFGLLTKYCDSKYESIVQRFAMQGSNSMGGPETTKAVSREMPVELLRASLPHTNEQHRQTLLDFARKSTHLPGFSPTANRGLVNSESVPG

SEQ ID NO: 187740 - protein, 93 aa, Zea Mays
MDNVESAPDSPAQAPPSSASSLPKEQSQVELELRLLQALEFYPPSKLKGVHRHFVLYGLMEYLRKSLDRQFSSDEVLQLLDRFFNLEMLLGHN

SEQ ID NO: 187741 - protein, 112 aa, Zea Mays
MDNVESAPDSPAQAPPSSASSLPKVELELRLLQALEFYPPSKLKGVHRHFVLYGLMEYLRKSLDRQFSSDEVLQLLDRFFNLEMLKPEDDEKDNFRQGEEFSLPESFLNKEE

SEQ ID NO: 187742 - protein, 553 aa, Zea Mays
MVARAQAAADTDVCVLVDAEIVLLPEIVNALDRFSKVDGDWFLVSLSRNVTDPRYQLADSGSHWVQADGKEVSFTELQEIPAEWSSSEGSDRGLIMAWNNPSSALHAGVLPSFLYGRGAQNWWLAHEVLSSEMRLFFDASSLVLGLYPESISAMQHVMASSKNGRLPSVSWEYGVNHHLAAVYGSYCCRSPARRFPMLHRVVKQSEDYMLSKVDTLVSSDFFISKQGNAHGVDSLRKKQNVSLSGYLHGCSSETSAPDLPYSLSMLLDLVADENGSVVLGVAGKSYRDMLMSWACRLRRLRVTNFLVCALDHETYEFSILQGLPVFRDPLSPTNVSFDDCHFGTKCFQQVTKVKSRIVLEILRLGYNVLLSDVDVYWFGNPMPLLYSLGLATFGAQSDEYNETGPINLPRRLNSGFYFARSDNATIIAMEMIVKHAASSGLSEQPSFYDVLCGENGTNRIGEDRCLEPNTNLTVVFLDRDLFPNGAYKGLWEKRDVRATCKELGCFIIHNNWINKRRKKVHRQMVSGLWDYDPTSRQCLQEWSAQNDGAIPFV

SEQ ID NO: 187743 - protein, 458 aa, Zea Mays
MAWNNPSSALHAGVLPSFLYGRGAQNWWLAHEVLSSEMRLFFDASSLVLGLYPESISAMQHVMASSKNGRLPSVSWEYGVNHHLAAVYGSYCCRSPARRFPMLHRVVKQSEDYMLSKVDTLVSSDFFISKQGNAHGVDSLRKKQNVSLSGYLHGCSSETSAPDLPYSLSMLLDLVADENGSVVLGVAGKSYRDMLMSWACRLRRLRVTNFLVCALDHETYEFSILQGLPVFRDPLSPTNVSFDDCHFGTKCFQQVTKVKSRIVLEILRLGYNVLLSDVDVYWFGNPMPLLYSLGLATFGAQSDEYNETGPINLPRRLNSGFYFARSDNATIIAMEMIVKHAASSGLSEQPSFYDVLCGENGTNRIGEDRCLEPNTNLTVVFLDRDLFPNGAYKGLWEKRDVRATCKELGCFIIHNNWINKRRKKVHRQMVSGLWDYDPTSRQCLQEWSAQNDGAIPFV

SEQ ID NO: 187744 - protein, 378 aa, Zea Mays
MVARAQAAADTDVCVLVDAEIVLLPEIVNALDRFSKVDGDWFLVSLSRNVTDPRYQLADSGSHWVQADGKEVSFTELQEIPAEWSSSEGSDRGLIMAWNNPSSALHAGVLPSFLYGRGAQNWWLAHEVLSSEMRLFFDASSLVLGLYPESISAMQHVMASSKNGRLPSVSWEYGVNHHLAAVYGSYCCRSPARRFPMLHRVVKQSEDYMLSKVDTLVSSDFFISKQGNAHGVDSLRKKQNVSLSGYLHGCSSETSAPDLPYSLSMLLDLVADENGSVVLGVAGKSYRDMLMSWACRLRRLRVTNFLVCALDHETYEFSILQVVIFCYLGFFYAFQTTDRPPQKLFNSNSRGCQFSETHCHQQMSALTTATLERSVFNK

SEQ ID NO: 187745 - protein, 120 aa, Zea Mays
MWEMMTAQLIQNNDNIKRGEDDEFSLAFARIENHYFVNKGFLPSDSFLLDNVDKIRHIKGFIVQGRYDVCCPMMSAWDLHKAWPEAEFKVVADAGHSANEVGIAAELRSATDKLRDLLRK

SEQ ID NO: 187746 - protein, 53 aa, Zea Mays
MISKKLSSANFFFCCYFLFKLNLWIGTYQKQKHRVNHLNNTVILKAPCKWNTF

SEQ ID NO: 187747 - protein, 81 aa, Zea Mays
MRDQIQDLVSTGWYLCCSANLAGVRFLHQKCAKTSTAEALHGNITSALPVLHISTVKGKVDRVEEGLGKSRDHRPLHGYTI

SEQ ID NO: 187748 - protein, 109 aa, Zea Mays
MLRLQLPQSHRVIFLQYLSATDPLVMARVLQDVLDTFTPTIPLRITYNNSQVLAGAELKPSAVISKPRVDIGGNDMRTFYTLVLIDPDAPSPSHPSLREYLHWPRASIL

SEQ ID NO: 187749 - protein, 116 aa, Zea Mays
MGCATSKQFSRSAPAHADPAVLATQTSFTVNEVEALYELYKKLSCSIVKDGLIHKEEFQLALFRNSRRANLFADRVFDLFDLKRNGVIDFEEFVRSLSVFHPKADTSEKTARFQAV

SEQ ID NO: 187750 - protein, 284 aa, Zea Mays
MFSAARRLLTSRARSRALAAATPYPHSAVASPSCPRFPTPKEIRRGLDEFVVGQDKAKKVLSVAVHNHYKRIYNESSNKCSVKSWVRGGVATNSDDVIELEKSNILLIGPTGSGKTLLAKTLARYVNVPFVIADATAITQAGYSGEDVESVIYKLLVAADFNIEAAEHGIVYIDEVDKLTKKADCRKDRRDVSGEGVQQALLKIFEGTIISVPGKRSRENIPQGYVEVDTRNILFICGGAFFGLEKIVSERHQFYPVGFGIPICHELRNCSWRTVQESSSIDTG

SEQ ID NO: 187751 - protein, 176 aa, Zea Mays
MLMPLPFLYRTGKTLLAKTLARYVNVPFVIADATAITQAGYSGEDVESVIYKLLVADCRKDRRDVSGEGVQQALLKIFEGTIISVPGKRSRENIPQGYVEVDTRNILFICGGAFFGLEKIVSERHQFYPVGFGIPICHELRNCSWRTVQESSSIDTVGSIASAVGIVLDNFCLILH

SEQ ID NO: 187752 - protein, 259 aa, Zea Mays
MFSAARRLLTSRARSRALAAATPYPHSAVASPSCPRFPTPKEIRRGLDEFVVGQDKAKKVLSVAVHNHYKRIYNESSNKCSVKSWVRGGVATNSDDVIELEKSNILLIGPTGSGKTLLAKTLARYVNVPFVIADATAITQAGYSGEDVESVIYKLLVAADFNIEAAEHGIVYIDEVDKLTKKADCRKDRRDVSGEGVQQALLKIFEGTIISVPGKRSRENIPQGYVEVDTRNILFICGGAFFGLEKIVSERCSWSPKTQ

SEQ ID NO: 187753 - protein, 487 aa, Zea Mays
MFSAARRLLTSRARSRALAAATPYPHSAVASPSCPRFPTPKEIRRGLDEFVVGQDKAKKVLSVAVHNHYKRIYNESSNKCSVKSWVRGGVATNSDDVIELEKSNILLIGPTGSGKTLLAKTLARYVNVPFVIADATAITQAGYSGEDVESVIYKLLVAADFNIEAAEHGIVYIDEVDKLTKKADCRKDRRDVSGEGVQQALLKIFEGTIISVPGKRSRENIPQGYVEVDTRNILFICGGAFFGLEKIVSERHQFYPVGFGIPICHELRNCSWRTVQESSSIDTVENDDLIAYGLIPEFIGRLPITVGLTNLSEEQLVQVVLMEPKNAIGKQYKKLFKMNDVKLHFTDNALRMIAKKALAKETGARGLRSIMEDILTEAMFEIPDGRHGKEKVIAVLVDEESVGPLHSRGCRAKIFRDDGALELYVYQNNIKLPGLIQSNPRRRRIFRLCLLVALSATKLWIYQTIPCFSSIYEWIAWILCKVYNFTQ

SEQ ID NO: 187754 - protein, 505 aa, Zea Mays
MLGPVTLHTPHADDDSNSISIVNNYEVPNAIQKSVYPSTTRPLMMSGNQYSTSVVNKIELPNRLHLTYANFTHPCEGFSVPPPLVDKKRTGPRPCPVCYVSVDQAFALMPLQASPSPVVKNLNYVSEDGVTANLSNLGSGFGGHPSLEQRNKSFNINESMTVHCGFVRGKKPGQGTGFDIKDDDLLEMEQCRELVVASAIFGNYDMIQHPRNISEFSKANACFYMFVDEETEAYVKNSSSLYNNNKVGLWRLVVVRNLPYEDPRRTGKIPKLLLHRLFPNVKFSVWIDAKLQLVADPYLLLERFLWRKNTTFAISRHYKRFDVFEEAEANKAAGKYYNASIDYQIEFYRNEGLTHYSPAKLPITSDVPEGCVIIREHIPITNLFTCLWFNEVDRFTSRDQISFSTVRDKIRARVGWMPEMFMDCERRNFVVQAYHRELLEQMIASGRMPPSGAVVVTDAAPSRKVRAGSRKATPSKKPSVKRKKEKKSSSRRRLPKPVAGGLGAM

SEQ ID NO: 187755 - protein, 485 aa, Zea Mays
MLLAVVSAAVFSSLFAVVKDDSNSISIVNNYEVPNAIQKSVYPSTTRPLMMSGNQYSTSVVNKIELPNRLHLTYANFTHPCEGFSVPPPLVDKKRTGPRPCPVCYVSVDQAFALMPLQASPSPVVKNLNYVSEDGVTANLSNLGSGFGGHPSLEQRNKSFNINESMTVHCGFVRGKKPGQGTGFDIKDDDLLEMEQCRELVVASAIFDEETEAYVKNSSSLYNNNKVGLWRLVVVRNLPYEDPRRTGKIPKLLLHRLFPNVKFSVWIDAKLQLVADPYLLLERFLWRKNTTFAISRHYKRFDVFEEAEANKAAGKYYNASIDYQIEFYRNEGLTHYSPAKLPITSDVPEGCVIIREHIPITNLFTCLWFNEVDRFTSRDQISFSTVRDKIRARVGWMPEMFMDCERRNFVVQAYHRELLEQMIASGRMPPSGAVVVTDAAPSRKVRAGSRKATPSKKPSVKRKKEKKSSSRRRLPKPVAGGLGAM

SEQ ID NO: 187756 - protein, 373 aa, Zea Mays
MLLAVVSAAVFSSLFAVVKDDSNSISIVNNYEVPNAIQKSVYPSTTRPLMMSGNQYSTSVVNKIELPNRLHLTYANFTHPCEGFSVPPPLVDKKRTGPRPCPVCYVSVDQAFALMPLQASPSPVVKNLNYVSEDGVTANLSNLGSGFGGHPSLEQRNKSFNINESMTVHCGFVRGKKPGQGTGFDIKDDDLLEMEQCRELVVASAIFGNYDMIQHPRNISEFSKANACFYMFVDEETEAYVKNSSSLYNNNKVGLWRLVVVRNLPYEDPRRTGKIPKLLLHRLFPNVKFSVWIDAKLQLVADPYLLLERFLWRKNTTFAISRHYKRFDVFEEAEANKAAGKYYNASIDYQIEFYRNEGLTHYSPAKLPITSGQ

SEQ ID NO: 187757 - protein, 714 aa, Zea Mays
MPAPASGGGGGDHLRGHAHLTNCIHLRHHHAHAHAHGASGRRRSPTGSSASASAALMRDLLALQRSRSLRDPSTRRSVDDSASNNRVAADPDDADHSRAGAIKTLLDQLTENPHPKPGRRPRRRFRRSATRRVAQPAAAPRVSVNSSSQEAVCGNRYLFGGTGGADGGVELMQQQQQVSHESHNVCGIPWNWSRIHHRGKSILDMAGRSLSCGLSDPKSTSAARRSEPATSAASCGHVNGSRSHPHFPVTARLTSSSSSDSDSLPLLVDGVRNAVGGISSSFSGELGIFSKSSELDSDLASEARSGQKSRGSHRARHRSFTQKYAPRTFKDVVGQSLVVQALSNAILKKKIGLVYVFYGPHGTGKTSCARVFAKALNCHSPEHPRPCDSCASCIAHNLGKSRSLLEIGPVGNIDLDGIVDILDNVMLSPVKSQHRVFIIDDCNTLPPDTWSVISKVVERAPRRVVFILISPNLDLPHIIVSRCQKFFFPKLKECDIISTLQWISTSEGLDVDRDALKLIASRSDGSLRDAEMTLDQLSLLGQTISMSLVQELVGLVSDDKLVDLLDLALSADTVNTVKTLRDITETGVEPLALMSQLATIITDILAGTYTLTRERVRRKFFKRPTLSKDDMEKLRQALKTLSEAEKQLRVSNDKMTWLTAALLQLAPDKQYVLPSSSPSTSLIQATTWQTITMLEGDLGNIPQTAMCCQPVLQE

SEQ ID NO: 187758 - protein, 116 aa, Zea Mays
MGCAGSTPKVDENSKKLKRPKAWKHTQPITPARLKQMRDEFWDTAPHYGGQKGTGFSCLCQVEQNQFLCGCVCARARALHGPRDVEIWDALRVAAESDLALAQTIVDSAGIIEIGA

SEQ ID NO: 187759 - protein, 117 aa, Zea Mays
MGCAGSTPKVDENSKKLKRPKAWKHTQPITPARLKQMRDEFWDTAPHYGGQKEIWDALRVAAESDLALAQTIVDSAGIIVSNPDMTLCYDERDSVAGAKYELPKYVLSEPANLIRDG

SEQ ID NO: 187760 - protein, 246 aa, Zea Mays
MRHKIGEDLVRPAVTHFATSILTLASMHKRRNGLRNLFVSDEWHATSFSTSKEGRQVENIVLSMPFWNEVDNCLRTSQTLLVALRIADGDETPAASKIMTAMDVAKTAIKDSLKDKPSLLIEDYTKKRNRELGSKGKKYNTLLLEQFHWENECVDENCELVQEGGGNAMNWALVDDVIGVTQSLEGRNLPRAAAAAPMRHTYTRNRKRPRKKVTQDNDEEDDDEDQDQHGESDSATSMEEDEESIR

SEQ ID NO: 187761 - protein, 125 aa, Zea Mays
MPVRRRQPRRPETGAAERYREMGIGAALSRPWDYPTACGELAALLRLGYADLPKAAQALVASDVLLAFRLLPDVQTGYAVSTANVLLQAVEVALPKQKKAQAVSEFKHSIIAHKRRARVQQISGT

SEQ ID NO: 187762 - protein, 226 aa, Zea Mays
MPVRRRQPRRPETGAAERYREMGIGAALSRPWDYPTACGELAALLRLGYADLPKAAQALVASDVLLAFRLLPDVQTGYAVSTANVLLQAVEVALPKQKKAQAVSEFKHSIIAHKRRARVQQISGSPHIPQDILVHIFSFLDMHSLVAAGLVCWSWNSAANDNKLWKMNYSIFFGLSHLSCNNIPVSGVQYSTNSVPNYPNFSWKESFHTKYAGRSGILPFAYNSRH

SEQ ID NO: 187763 - protein, 81 aa, Zea Mays
MPVRRRQPRRPETGAAERYREMGIGAALSRPWDYPTACGELAALLRLGYADLPKAAQALVASDVLLAFRLLPEKNKAGALL

SEQ ID NO: 187764 - protein, 1150 aa, Zea Mays
MVFLIKWSKPAMAHCRLLHRYVSSAAARAAAPIPARHVPRSPGTSAQSARIRELGRLGRLHEAREVFDSMPFRDIIAWNSMIFAYCNNGMPDAGRSLADAISGGNLRTGTILLSGYARAGRVRDARRVFDGMGVRNTVAWNAMVTCYVQNGDITLARKLFDAMPSRDVSSWNTMLTGYCHSQLMEEARNLFERMPERNGVSWTVMISGYVLIEQHGRAWDMFRTMLCEGMTPEQPNLVSVLSAVRHLGKPGILESIHVLVHKTGFERDVVVGTAILNGYTKDVNMLDSAVKFFEGMAARNEYTWSTIIAALSQAGRIDDAFAVYQRDPLKSVPSRTSMLTGLARYGRIDDAKILFDQIHEPNVVSWNAMITGYMQNEMVDEAEDLFNRMPFRNTISWAGMIAGYARNGRSEQALVSLQALHRKGMLPSLSSLTSSFFACSNIEALETGKQVHSLAVKAGCQFNSYVCNALITLYGKYRSIGSVRQIFDRMTVKDTVSYNSFMSALVQNNLFDEARDVFNNMPSPDVVSWTTIISACAQADQGNEAVEIFRSMLHERELPNPPILTILLGLSGNLGAPQLGQQIHTIAIKLGMDSGLVVANALVSMYFKCSSADSLKVFDSMEERDIFTWNTIITGYAQHGLGREAIRMYQLMVSAGVLPNEVTFVGLLHACSHSGLVDEGHQFFKSMSSDYGLTPLLEHYACMVDLLGRAGDVQGAEHFIYDMPIEPDSVIWSALLGACKIHKNVEIGRRAAEKLFSIEPSNAGNYVMLSNIYSSQGMWDEVAKVRKLMKERGVNKDPGCSWMQIKNKMHSFVTGDEEHEQIQNIYATLWELYTLLKATGYVPDTDFVLHDIDEEQKESSLLYHSEKLAVAYGLLVTPKGMPIQIMKNLRICGDCHTFIKFVSSVTKREIDVRDGNRFHHFRNGSCSCEFLKLDPVWSAVRATRVRHKSLADVCMFYAFIRYEKLLEEDTSRHVVALLEGMGAAIQRRTRLGPASTLLSFLSSLACCPTLLLFPPPSLSSTPSCPPTLDARHPHPRARGRVQGRQDEPDRDRLAVSSKEEARAPVDVRVPSWWPARSRFNKKEDDALLCLNTERTATIGQSEEETEELSKITLENKDIQLDIDIREESRSSSQQVNFYTESTSSSEAACL

SEQ ID NO: 187765 - protein, 1094 aa, Zea Mays
MVFLIKWSKPAMAHCRLLHRYVSSAAARAAAPIPARHVPRSPGTSAQSARIRELGRLGRLHEAREVFDSMPFRDIIAWNSMIFAYCNNGMPDAGRSLADAISGGNLRTGTILLSGYARAGRVRDARRVFDGMGVRNTVAWNAMVTCYVQNGDITLARKLFDAMPSRDVSSWNTMLTGYCHSQLMEEARNLFERMPERNGVSWTVMISGYVLIEQHGRAWDMFRTMLCEGMTPEQPNLVSVLSAVRHLGKPGILESIHVLVHKTGFERDVVVGTAILNGYTKDVNMLDSAVKFFEGMAARNEYTWSTIIAALSQAGRIDDAFAVYQRDPLKSVPSRTSMLTGLARYGRIDDAKILFDQIHEPNVVSWNAMITGYMQNEMVDEAEDLFNRMPFRNTISWAGMIAGYARNGRSEQALVSLQALHRKGMLPSLSSLTSSFFACSNIEALETGKQVHSLAVKAGCQFNSYVCNALITLYGKYRSIGSVRQIFDRMTVKDTVSYNSFMSALVQNNLFDEARDVFNNMPSPDVVSWTTIISACAQADQGNEAVEIFRSMLHERELPNPPILTILLGLSGNLGAPQLGQQIHTIAIKLGMDSGLVVANALVSMYFKCSSADSLKVFDSMEERDIFTWNTIITGYAQHGLGREAIRMYQLMVSAGVLPNEVTFVGLLHACSHSGLVDEGHQFFKSMSSDYGLTPLLEHYACMVDLLGRAGDVQGAEHFIYDMPIEPDSVIWSALLGACKIHKNVEIGRRAAEKLFSIEPSNAGNYVMLSNIYSSQGMWDEVAKVRKLMKERGVNKDPGCSWMQIKNKMHSFVTGDEEHEQIQNIYATLWELYTLLKATGYVPDTDFVLHDIDEEQKESSLLYHSEKLAVAYGLLVTPKGMPIQIMKNLRICGDCHTFIKFVSSVTKREIDVRDGNRFHHFRNGSCSCEFLKLDPVWSAVRATRVRHKSLADVCMFYAFIRYEKLLEEDTSRHVVALLEGMGAAIQRRTRLGPASTLLSFLSSLACCPTLLLFPPPSLSSTPSCPPSEVPPSLSPPIPIDCARLQSRPAPAWPHPWSPPRSGRHPHHRALADLPAAAPHVIAARRQHVQVVLPA

SEQ ID NO: 187766 - protein, 513 aa, Zea Mays
MASHIILPPDDADENHNHQAAAAAEEEEEERDELGRDDDDDEHGVPPALPPKAALPFSATCVRISRDSYPNLRALRNASSVSLADAAYVKISEADFGYVLDDVPHFTDYLPDIPTYPNPLQDHPAYSTVKQYFVNEDDTVPQKVVVQKNSRRGVHFRRAGPRQRVYFGTDEVKACIVTCGGLCPGLNTVIRELVCGLSHMYNVSSIFGIQNGYKGFYSSNYLPLTPKSVNDIHKRGGTVLGTSRGGHDTKKIVDNIQDRGINQVYIIGGDGTQKGAYEIFKEIRKRGLKVSVAGVPKTIDNDIAIIDKSFGFDTAVEEAQRAIDSAHVEACSAENGIGLVKLMGRYSGFIAMYATLASRDVDCCLIPESPFYLDGEGGLLQYVEKRLKENKHMVIVVAEGAGQDLIAKSLATSDQQDASGNKLLLDIGLWLTHKIKDYFKSKKMEMTIKYIDPTYMVRAIPSNASDNVYCTLLAHSAIHGAMAGYSFTVGMVNGRHTYIPFYVSNNPLQTLRG

SEQ ID NO: 187767 - protein, 583 aa, Zea Mays
MASHIILPPDDADENHNHQAAAAAEEEEEERDELGRDDDDDEHGVPPALPPKAALPFSATCVRISRDSYPNLRALRNASSVSLADAAYVKISEADFGYVLDDVPHFTDYLPDIPTYPNPLQDHPAYSTVKQYFVNEDDTVPQKVVVQKNSRRGVHFRRAGPRQRVYFGTDEVKACIVTCGGLCPGLNTVIRELVCGLSHMYNVSSIFGIQNGYKGFYSSNYLPLTPKSVNDIHKRGGTVLGTSRGGHDTKKIVDNIQDRGINQVYIIGGDGTQKGAYEIFKEIRKRGLKVSVAGVPKTIDNDIAIIDKSFGFDTAVEEAQRAIDSAHVEACSAENGIGLVKLMGRYSGFIAMYATLASRDVDCCLIPESPFYLDGEGGLLQYVEKRLKENKHMVIVVAEGAGQDLIAKSLATSDQQDASGNKLLLDIGLWLTHKIKDYFKSKKMEMTIKYIDPTYMVRAIPSNASDNVYCTLLAHSAIHGAMAGYSFTVGMVNGRHTYIPFYRVTSTRNKVKVTDRMWARLLSSTNQPSFLSQKDIDEASEADRLANRPPLPTGASSRVNLLTIVLSSGAWAASPRNEFCSCC

SEQ ID NO: 187768 - protein, 174 aa, Zea Mays
MLMGGGGSFSAGGPGKGMHSRLYLRVLTNFQQIESFSAFNSVYNNSGLFGIYAVTSPDFSSKAVDLAAGELLEIATPGKVTQEQLDRAKEATKSAVLMNLESRSIASEDIGRQVLTYGERKPIEYFLKTVEEITLNDILSTAKEMMSTPLTMASWGDVIHVPSYESVSRKFHSK

SEQ ID NO: 187769 - protein, 260 aa, Zea Mays
MLAAWRNLLLMVLAASGVDHDALISVVEPLLSDLPCVKRPEEPKSVYVGGDYRCQADSPNTHIALAFEVPGGWNQEKTAMVVTVLQMLMGGGGSFSAGGPGKGMHSRLYLRVLTNFQQIESFSAFNSVYNNSGLFGIYAVTSPDFSSKAVDLAAGELLEIATPGKVTQEQLDRAKEATKSAVLMNLESRSIASEDIGRQVLTYGERKPIEYFLKTVEEITLNDILSTAKEMMSTPLTMASWGDVIHVPSYESVSRKFHSK

SEQ ID NO: 187770 - protein, 311 aa, Zea Mays
MYRAAGSHLRSLKHHGASRLASTSVAKQSSEPSKTKVTTLPNGVKIASETSSSPAASVGLYIDCGSIYETPASSGVSHLLERMAFKSTVNRTHLRLVREVEAIGGNVSASASREQMSYTYDALKSYTPEMVEVLIDSMLMGGGGSFSAGGPGKGMHSRLYLRVLTNFQQIESFSAFNSVYNNSGLFGIYAVTSPDFSSKAVDLAAGELLEIATPGKVTQEQLDRAKEATKSAVLMNLESRSIASEDIGRQVLTYGERKPIEYFLKTVEEITLNDILSTAKEMMSTPLTMASWGDVIHVPSYESVSRKFHSK

SEQ ID NO: 187771 - protein, 277 aa, Zea Mays
MASESAVNRLDVSSLEEFVAEHYTAPRMVLAASGVDHDALISVVEPLLSDLPCVKRPEEPKSVYVGGDYRCQADSPNTHIALAFEVPGGWNQEKTAMVVTVLQMLMGGGGSFSAGGPGKGMHSRLYLRVLTNFQQIESFSAFNSVYNNSGLFGIYAVTSPDFSSKAVDLAAGELLEIATPGKVTQEQLDRAKEATKSAVLMNLESRSIASEDIGRQVLTYGERKPIEYFLKTVEEITLNDILSTAKEMMSTPLTMASWGDVIHVPSYESVSRKFHSK

SEQ ID NO: 187772 - protein, 233 aa, Zea Mays
MRTKIEQMEKANLEPSTWTMQGEVTASRRPKNSALEVDLDFEHNVRPAPVITEEVTASLEEMIKKRIAESHFDDVEKPSLLPSKAPKEHKELDETKSKKGLAELYEDDYAQKAGIAPAPLSISDELKEEANTLFKRICLKLDALSHFHFAPKPVIEDMSVQANVPALAMEEIAPVAVSDAAMLAPEEIFEGKGDVKEEGELTQAERKRRRANKKRRYAASHKERTAPAKLQKD

SEQ ID NO: 187773 - protein, 515 aa, Zea Mays
MVDLDEPLDAAVTAEKGKAALQRLLEADPALFLSPSADLAAAARAASQHIYSSLIWSQIELLARPLLPQLGRQLRRIVQQPSSQQPPLKMPAVAEGEQLEEDGESSDSEELKNAEELEGTEDGEELEGTDDEEEMGDKEEEEAELDGRGGNGVEDEFLKIDELTEFLEKGEEEEYGDGAKRREKSVKNWMVESDTEDEDEDQLDLEDFEDDDEDGEAGGGDILYEDFFENGHNKQAKKRDGSTKKVQFKDEAHEVELHDSENDDGNDEQEHGLSTHEKERLKMRTKIEQMEKANLEPSTWTMQGEVTASRRPKNSALEVDLDFEHNVRPAPVITEEVTASLEEMIKKRIAESHFDDVEKPSLLPSKAPKEHKELDETKSKKGLAELYEDDYAQKAGIAPAPLSISDELKEEANTLFKRICLKLDALSHFHFAPKPVIEDMSVQANVPALAMEEIAPVAVSDAAMLAPEEIFEGKGDVKEEGELTQAERKRRRANKKRRYAASHKERTAPAKLQKD

SEQ ID NO: 187774 - protein, 52 aa, Zea Mays
MLANMIKYLMNYSRAATLKNYTIPSVDELKRRASCKWHNSLFHATNDCNVLR

SEQ ID NO: 187775 - protein, 284 aa, Zea Mays
MERQGLDMKVTALVNDTVGTLAGGRYMDNDVVAAVILGTGTNAAYVEHANAIPKWTGLLPKSGNMVINTEWGSFKSGKLPLSEYDKAMDFESLNPGEQIYEKMISGMYLGEIVRRILLKLAHDASLFGDVVPTKLEQPFILRTPDMSAMHHDSSHDLKTLGSKLKDIVGVADTSLEVRYITRHICDLVAERGARLAAAGIYSILKKIGRDKVPSSGSKMPRTVIALDGGLYEHYKKFSSCVEATLTDLLGEEASSSVVAKLANDGSGIGAALLAASHSQYGESD

SEQ ID NO: 187776 - protein, 288 aa, Zea Mays
MALPSRARLLLLLCFVAAAALLVAPGEVSATAAAADAGGHGKRRGHSTHTRRLRPGKGAAAAKPYPANAARVEAIERQFARWVRSMGGHGHNSSSTAYSRALSRASLPARTLVVDKNPGAGNFTSIQAAVDSLPLINLARVVIRVNAGTYTEKVSISPMRAFVTVEGAGADKTVVQWGDTADTAGAWGRPMGTFGSATFAVNSMFFVAKNITFKGVALRISADSAAFVGCNFLGAQDTLYDHLGRHYYRDCYIEGSVDFIFGNALSLYEVSSTHATQMHETKLSLRHL

SEQ ID NO: 187777 - protein, 290 aa, Zea Mays
MALPSRARLLLLLCFVAAAALLVAPGEVSATAAAADAGGHGKRRGHSTHTRRLRPGKGAAAAKPYPANAARVEAIERQFARWVRSMGGHGHNSSSTAYSRALSRASLPARTLVVDKNPGAGNFTSIQAAVDSLPLINLARVVIRVNAGTYTEKVSISPMRAFVTVEGAGADKTVVQWGDTADTAGAWGRPMGTFGSATFAVNSMFFVAKNITFKNTAPVPRPGALGKQGVALRISADSAAFVGCNFLGAQDTLYDHLGRHYYRDCYIEGSVDFIFGNALSLYEDGVLRAV

SEQ ID NO: 187778 - protein, 88 aa, Zea Mays
MTGGSPKHRSHPQRLHFVETVSLVFHNGNCLSHEKARAGALCSSPRVLSLSLARAATTRLVGYRRRPLRQLPSSSSGPSPSTSTQHIS

SEQ ID NO: 187779 - protein, 422 aa, Zea Mays
MFYLQGVVLFPGATLPLRVIQDRLVVTIDKALRLVDAPCTIGVVLMRRLPNHRHYATASVGTTAEIRQFGRLEDGSLNVVARGQQRFRLRRHWIDVDRVVWGEVQIIEEDTPLRTPRDAFAQVAACNTFNLHASSSVISLDRSPMKQDHIDSELECNTPSPNSKISNPSSMDSRLCHLGSQSSDSMKSSSDEDGDLMPKQFWKRKQHSVRESGASSHSDKKTNMRNDNNLCLTPLQSSPIAKTRDAKRRRQYHAYSKQASHAPLSFWPRWVYEMYDSYTLARSAAELWRQIIANPSMDDHKEIQLLKAFNHIKCRNCQSHIAKRSDMVVMSTDGPLGAYVNPHGCVHETITVSNATGLALIGNPSKVHSWFPGYSWTIAACMACESHIGWLFRATKKNLRPRSFWGIRSSQIADDTQVDQGD

SEQ ID NO: 187780 - protein, 458 aa, Zea Mays
MFYLQGVVLFPGATLPLRVIQDRLVVTIDKALRLVDAPCTIGVVLMRRLPNHRHYATASVGTTAEIRQFGRLEDGSLNVVARGQQRFRLRRHWIDVDRVVWGEVQIIEEDTPLRTPRDAFAQVAACNTFNLHASSSVISLDRSPMKQDHIDSELECNTPSPNSKISNPSSMDSRLCHLGSQSSDSMKSSSDEDGDLMPKQFWKRKQHSVRESGASSHSDKKTNMRNDNNLCLTPLQSSPIAKTRDAKRRRQYHAYSKQASHAPLSFWPRWVYEMYDSYTLARSAAELWRQIIANPSMDDHVRKPDILSFHIGSKLPVSESVRQKLLEIDGVSYRLQKEIQLLKAFNHIKCRNCQSHIAKRSDMVVMSTDGPLGAYVNPHGCVHETITVSNATGLALIGNPSKVHSWFPGYSWTIAACMACESHIGWLFRATKKNLRPRSFWGIRSSQIADDTQVDQGD

SEQ ID NO: 187781 - protein, 214 aa, Zea Mays
MADWEGIPPRERRQMEEILQLDMEELNVEVVDDNEEDEEEEEGDGNEEDYDVDAFLRDNNGDGVASTSGPFTFNRSLASLHTYLGEVDDTRGRVTLLDGGTILNLPMFYLQGVVLFPGATLPLRVIQDRLVVTIDKALRLVDAPCTIGVVLMRRLPNHRHYATASVGTTAEIRQFGRLEDGSLNVVARGQQRFRLRRHWIDVDRVVSPNMLSFF

SEQ ID NO: 187782 - protein, 429 aa, Zea Mays
MADWEGIPPRERRQMEEILQLDMEELNVEVVDDNEEDEEEEEGDGNEEDYDVDAFLRDNNGDGVASTSGPFTFNRSLASLHTYLGEVDDTRGRVTLLDGGTILNLPMFYLQGVVLFPGATLPLRVIQDRLVVTIDKALRLVDAPCTIGVVLMRRLPNHRHYATASVGTTAEIRQFGRLEDGSLNVVARGQQRFRLRRHWIDVDRVVWGEVQIIEEDTPLRTPRDAFAQVAACNTFNLHASSSVISLDRSPMKQDHIDSELECNTPSPNSKISNPSSMDSRLCHLGSQSSDSMKSSSDEDGDLMPKQFWKRKQHSVRESGASSHSDKKTNMRNDNNLCLTPLQSSPIAKTRDAKRRRQYHAYSKQASHAPLSFWPRWVYEMYDSYTLARSAADNCKPKHGRSCKKARYFVISHRKQTSSLRICETKTSGD

SEQ ID NO: 187783 - protein, 381 aa, Zea Mays
MADWEGIPPRERRQMEEILQLDMEELNVEVVDDNEEDEEEEEGDGNEEDYDVDAFLRDNNGDGVASTSGPFTFNRSLASLHTYLGEVDDTRGRVTLLDGGTILNLPMFYLQGVVLFPGATLPLRVIQDRLVVTIDKALRLVDAPCTIGVVLMRRLPNHRHYATASVGTTAEIRQFGRLEDGSLNVVARGQQRFRLRRHWIDVDRVVAACNTFNLHASSSVISLDRSPMKQDHIDSELECNTPSPNSKISNPSSMDSRLCHLGSQSSDSMKSSSDEDGDLMPKQFWKRKQHSVRESGASSHSDKKTNMRNDNNLCLTPLQSSPIAKTRDAKRRRQYHAYSKQASHAPLSFWPRWVYEMYDSYTLARSAADKCKLPEVSLEYL

SEQ ID NO: 187784 - protein, 164 aa, Zea Mays
MRVYGFGGVGMVVEVLTDKITRSVADIRNVVKDCGAKLADPGSVTFRFRQARVVNIKVTDADKDQLLTVALDAGADDVLEPNFDDDDSEEEAERFYKIVTTSENYPVLLSKLQEEGLKFETDNGYELVPLNPIEVDDEAVELNKELVSNLLELDDVDAVYTDQK

SEQ ID NO: 187785 - protein, 80 aa, Zea Mays
MASATRALGALLHRASSLSSSAPALRGASLLRGDGPIGSAGLFRRHAARRRISSFQPLCMGRRSCKIAGRKGGNPLDFKM

SEQ ID NO: 187786 - protein, 92 aa, Zea Mays
MASATRALGALLHRASSLSSSAPALRGASLLRGDGPIGSAGLFRRHAARRRISSFQPLCMGRRSCKIAGRKDAQNLKKMKRNSKIGKEIVAA

SEQ ID NO: 187787 - protein, 120 aa, Zea Mays
MASATRALGALLHRASSLSSSAPALRGASLLRGDGPIGSAGLFRRHAARRRISSFQPLCMGRRSCKIAGRKVMFSCHDAQCHINEVRDGWLCIFWLAKPWKYPVQSIMLCMRAIKQSNSQ

SEQ ID NO: 187788 - protein, 233 aa, Zea Mays
MYPQSNSNSLTKLNKISKKKKSLVKNASNRLAFYLSSPSGSSSTPLARHLCRGRTARHFLLSRPTALPPSRQIPAPATATLHPRHRDQPVPPHSSVAMYKPCSPGRIDPEAHRTGGDLDQSTVGLMHRRLLPPTSFEGLMSANLSHANRINRDESYTGRQSFGFQNVVDLIHAYAAKAVTEQLDQNENLVSVNADVCNFWEKDVMPMLFCRSCRFFFKKKTSAETGCYIETLN

SEQ ID NO: 187789 - protein, 203 aa, Zea Mays
MASATRALGALLHRASSLSSSAPALRGASLLRGDGPIGSAGLFRRHAARRRISSFQPLCMGRRSCKIAGRKCSPGRIDPEAHRTGGDLDQSTVGLMHRRLLPPTSFEGLMSANLSHANRINRDESYTGRQSFGFQNVVDLIHAYAAKAVTEQLDQNENLVSVNADVCNFWEKDVMPMLFCRSCRFFFKKKTSAETGCYIETLN

SEQ ID NO: 187790 - protein, 156 aa, Zea Mays
MASATRALGALLHRASSLSSSAPALRGASLLRGDGPIGSAGLFRRHAARRRISSFQPLCMGRRSCKIAGRKCSPGRIDPEAHRTGGDLDQSTVGLMHRRLLPPTSFEGLMSANLSHANRINRDESYTDFGTGRHMWTRTLMCRLKWIFARQISLLA

SEQ ID NO: 187791 - protein, 55 aa, Zea Mays
MEHSTRSQARSARPWNPMTRTRRRLATGSRGCHTLNLLSPDLHPQSYSSYTSSCS

SEQ ID NO: 187792 - protein, 478 aa, Zea Mays
MRHTRSSDEGRVTRCAVRVSEEARLLHLATGDRTINSSARLRFVTRRRRPPPVPVDAASTKVSKPPPKPKRRAKSPIPKRVISDVFKEAKAATKRFSSPQRQRKPMSPRSPDDSPPLGFASLRAPSKLKINTRASSWPRTNLDSGPARVAAPEILERWTVDRSELLIGHRFASGAYSRLFHGIYKDQPVAVKFIRQPDDGEDDELSAKLDKQFTSEVTILARLQHRNVIKLVGACNCPTVFCVITEFLSGGSLRAFLRKLERETLPLEKVISIALDIARGLEYIHLQGIVHRDIKPENILFDGEFCAKVVDFGVACEEKYCNLLGDDPGTYRWMAPEMYKHKPYGRKVDVYSFGLVLWELVTGSLPYQDMTPLQAAFAVVNKNLRPAIPLSCPAALKLLIEQCWSWQPERRPEFQQIVSVLENLKTVLERDGTLDKIPGSICQALEPNDQNKKKAGNWIQRLSYAQPAFSGPPPPKLL

SEQ ID NO: 187793 - protein, 145 aa, Zea Mays
MAPEMYKHKPYGRKVDVYSFGLVLWELVTGSLPYQDMTPLQAAFAVVNKNLRPAIPLSCPAALKLLIEQCWSWQPERRPEFQQIVSVLENLKTVLERDGTLDKIPGSICQALEPNDQNKKKAGNWIQRLSYAQPAFSGPPPPKLL

SEQ ID NO: 187794 - protein, 664 aa, Zea Mays
MRHTRSSDEGRVTRCAVRVSEEARLLHLATGDRTINSSARLRFVTRRRRPPPVPVDACSCELLIYRIEEGKMDDEDYSWVRRTRFSQSVVRSSSGRERYGAFIIDPFGRGAKLRQDGLGTGPGVSSSARRLPIPKARPAVARSERKLKHASSEGQLNRARNGDRSSQGSPAKQSREGVGLSLDIPQLHDVAVRPPKESPDAALDFSFHSDEHSQRLQRVCSSPSPFFLQDATVTADDGSRVRSASTKVSKPPPKPKRRAKSPIPKRVISDVFKEAKAATKRFSSPQRQRKPMSPRSPDDSPPLGFASLRAPSKLKINTRASSWPRTNLDSGPARVAAPEILERWTVDRSELLIGHRFASGAYSRLFHGIYKDQPVAVKFIRQPDDGEDDELSAKLDKQFTSEVTILARLQHRNVIKLVGACNCPTVFCVITEFLSGGSLRAFLRKLERETLPLEKVISIALDIARGLEYIHLQGIVHRDIKPENILFDGEFCAKVVDFGVACEEKYCNLLGDDPGTYRWMAPEMYKHKPYGRKVDVYSFGLVLWELVTGSLPYQDMTPLQAAFAVVNKNLRPAIPLSCPAALKLLIEQCWSWQPERRPEFQQIVSVLENLKTVLERDGTLDKIPGSICQALEPNDQNKKKAGNWIQRLSYAQPAFSGPPPPKLL

SEQ ID NO: 187795 - protein, 733 aa, Zea Mays
MDYCGERLDSLVLFGLFSWWASKSTLGDFVSLWKGSNAAPTYLVVWHWLESSSVSQCSCCRLPHLGPLPSLSCSCELLIYRIEGGGGGGSIAAPTYLVVWHWLESSSVSQCSCCLLPHLGPLPSFSCSCELLIYRIEEGKMDDEDYSWVRRTRFSQSVVRSSSGRERYGAFIIDPFGRGAKLRQDGLGTGPGVSSSARRLPIPKARPAVARSERKLKHASSEGQLNRARNGDRSSQGSPAKQSREGVGLSLDIPQLHDVAVRPPKESPDAALDFSFHSDEHSQRLQRVCSSPSPFFLQDATVTADDGSRVRSASTKVSKPPPKPKRRAKSPIPKRVISDVFKEAKAATKRFSSPQRQRKPMSPRSPDDSPPLGFASLRAPSKLKINTRASSWPRTNLDSGPARVAAPEILERWTVDRSELLIGHRFASGAYSRLFHGIYKDQPVAVKFIRQPDDGEDDELSAKLDKQFTSEVTILARLQHRNVIKLVGACNCPTVFCVITEFLSGGSLRAFLRKLERETLPLEKVISIALDIARGLEYIHLQGIVHRDIKPENILFDGEFCAKVVDFGVACEEKYCNLLGDDPGTYRWMAPEMYKHKPYGRKVDVYSFGLVLWELVTGSLPYQDMTPLQAAFAVVNKNLRPAIPLSCPAALKLLIEQCWSWQPERRPEFQQIVSVLENLKTVLERDGTLDKIPGSICQALEPNDQNKKKAGNWIQRLSYAQPAFSGPPPPKLL

SEQ ID NO: 187796 - protein, 227 aa, Zea Mays
MHVSLLFTAYASSYTHMHIHVITYIALIIWIKLKLKMPNFLTLYITSPFLFLMRPLPLVRPLRETNAPLSPRTRPIANGSCSCGEATPPHGAGPQLPVLLHHLALARRAVPAAAPAAVAGARAAHHRHHALPHHLRAGRHRQLQAGRPEAHRLRHAAACPEARQDPRPPPPPRRRRRAQEAGLQALRAPDRQEQPQDDRAAGGAVAAEGGAGGAVAQRARLPFPGAR

SEQ ID NO: 187797 - protein, 606 aa, Zea Mays
MEKKTVHVPAEGNGEIENGTSSSQNPETLEHPVLLSASQTVPNNLGIRKNYKRAANRGKKGSQGLTGQAYTLRSSDIDVRVLRSTSGSKTTSTEHVQPPGQPAAKRRKRSRASNKNSTDEFSQIRKRVRYILNRMNYEQSLIEAYASEGWKNQSLDKIRPEKELERAKSEILRCKLRIREVFQNIDSLLSKGKIDESLFDSEGEISCEDIFCATCGSKNATLGNDIILCDGACDRGFHQNCLNPPLRTEDIPMGDEGWLCPACDCKLDCIDLINELQGSDISIEDPWEKVFPEAAAMANSSKQDEAFDLPSDDSDDNDFDPNMPEEHVASKEEGSSEEEEDDDGGSDSDDSDFLTCSDDLEPLIDKKNVDDLGLPSEDSEDDDYDPAGPDSDKDVEKKSNSDESDFMSDSDDFCKEIKKSGGHDEVSSPPLPDVKVGDMEKNTAQSNTTSSADDPMETEIDQSVVLPVSRRRQAERLDYKRLYDEAYGEASSDSSDEEEWSGKNTPIKSNEEGEVGSPAGKGSRVAHHNELTTQNTKESLHSLHGSVDEKHGDLTSNGSNIKDRKGHFGPVISQKLHEHFKTQPYPSRSLKESLAEELGLTFHQMV

SEQ ID NO: 187798 - protein, 663 aa, Zea Mays
MEKKTVHVLAEGNGEIENGTSSSQNPETLEHPVLLSASQTVPNNLGIRKNYKRAANRGSKTTSTEHVQPPGQPAAKRRKRSRASNKNSTDEFSQIRKRVRYILNRMNYEQSLIEAYASEGWKNQSLDKIRPEKELERAKSEILRCKLRIREVFQNIDSLLSKGKIDESLFDSEGEISCEDIFCATCGSKNATLGNDIILCDGACDRGFHQNCLNPPLRTEDIPMGDEGWLCPACDCKLDCIDLINELQGSDISIEDPWEKVFPEAAAMANSSKQDEAFDLPSDDSDDNDFDPNMPEEHVASKEEGSSEEEEDDDGGSDSDDSDFLTCSDDLEPLIDKKNVDDLGLPSEDSEDDDYDPAGPDSDKDVEKKSNSDESDFMSDSDDFCKEIKKSGGHDEVSSPPLPDVKVGDMEKNTAQSNTTSSADDPMETEIDQSVVLPVSRRRQAERLDYKRLYDEAYGEASSDSSDEEEWSGKNTPIKSNEEGEVGSPAGKGSRVAHHNELTTQNTKESLHSLHGSVDEKHGDLTSNGSNIKDRKGHFGPVISQKLHEHFKTQPYPSRSLKESLAEELGLTFHQVNRWFENRRHFARLASSRKGISPDKHSPQNTNSPVTPSMQPKEPEGTVMEESNVCINRDATISKKAVSSKVGSRKNLSKSSPKSRVRS

SEQ ID NO: 187799 - protein, 663 aa, Zea Mays
MEKKTVHVPAEGNGEIENGTSSSQNPETLEHPVLLSASQTVPNNLGIRKNYKRAANRGSKTTSTEHVQPPGQPAAKRRKRSRASNKNSTDEFSQIRKRVRYILNRMNYEQSLIEAYASEGWKNQSLDKIRPEKELERAKSEILRCKLRIREVFQNIDSLLSKGKIDESLFDSEGEISCEDIFCATCGSKNATLGNDIILCDGACDRGFHQNCLNPPLRTEDIPMGDEGWLCPACDCKLDCIDLINELQGSDISIEDPWEKVFPEAAAMANSSKQDEAFDLPSDDSDDNDFDPNMPEEHVASKEEGSSEEEEDDDGGSDSDDSDFLTCSDDLEPLIDKKNVDDLGLPSEDSEDDDYDPAGPDSDKDVEKKSNSDESDFMSDSDDFCKEIKKSGGHDEVSSPPLPDVKVGDMEKNTAQSNTTSSADDPMETEIDQSVVLPVSRRRQAERLDYKRLYDEAYGEASSDSSDEEEWSGKNTPIKSNEEGEVGSPAGKGSRVAHHNELTTQNTKESLHSLHGSVDEKHGDLTSNGSNIKDRKGHFGPVISQKLHEHFKTQPYPSRSLKESLAEELGLTFHQVNRWFENRRHFARLASSRKGISPDKHSPQNTNSPVTPSMQPKEPEGTVMEESNVCINRDATISKKAVSSKVGSRKNLSKSSPKSRVRS

SEQ ID NO: 187800 - protein, 564 aa, Zea Mays
MEKKTVHVPAEGNGEIENGTSSSQNPETLEHPVLLSASQTVPNNLGIRKNYKRAANRGQPAAKRRKRSRASNKNSTDEFSQIRKRVRYILNRMNYEQSLIEAYASEGWKNQSLDKIRPEKELERAKSEILRCKLRIREVFQNIDSLLSKGKIDESLFDSEGEISCEDIFCATCGSKNATLGNDIILCDGACDRGFHQNCLNPPLRTEDIPMGDEGWLCPACDCKLDCIDLINELQGSDISIEDPWEKVFPEAAAMANSSKQDEAFDLPSDDSDDNDFDPNMPEEHVASKEEGSSEEEEDDDGGSDSDDSDFLTCSDDLEPLIDKKNVDDLGLPSEDSEDDDYDPAGPDSDKDVEKKSNSDESDFMSDSDDFCKEIKKSGGHDEVSSPPLPDVKVGDMEKNTAQSNTTSSADDPMETEIDQSVVLPVSRRRQAERLDYKRLYDEAYGEASSDSSDEEEWSGKNTPIKSNEEGEVGSPAGKGSRVAHHNELTTQNTKESLHSLHGSVDEKHGDLTSNGSNIKDRKGHFGPVISQKLHEHFKTQPYPSRSLKESLAEELGLTFHQMV

SEQ ID NO: 187801 - protein, 829 aa, Zea Mays
MGDEGWLCPACDCKLDCIDLINELQGSDISIEDPWEKVFPEAAAMTNGSKQDEAFDLPSDDSDDNDFDPNMPEEHVASKEEGSSEEEEDDDGGSDSDDSDFLTCSDDLEPLIDKKKVDDLGLPSEDSEDDDYDPAGPDSDKDVEKKSNSDESDFTSDSDDFCKEIKKSGGHDEVSSPPLPDVRVGDMEKNTAQSNTTSSADDPMEIEIDQSVVLPASTSPPPAPVSAPVTLAAPASTAPPPAPVFAPLIPPARFRERDETEVRPLAADPRLFDLQRATAARVRRFRYVPVESWLPAQRDPAAVDLFSTRIQESFFRAQMSAQIALRVHRLLDLPAFLLAAGADSEVHLSYLPGLLTLLTTSGRYVEEWVRVFYATVWIDPNHHWMRFRFEREDVTIYASQIRQLFGFHESSTRLHSLCYGTSDPPRRPHGGVAPGTAYVAALFRPPFSDGSRRSPADFTTTAKFLYQLMRRTLLPRIGSREATTHIQLWLQEAKISHSEFDVVDFLICEIEDTILDGLRARRQLPYAHYLCHIFAQLIRPPQFQGTLEVSRLVFGSYRPAPEDPVPAPAPVFDTQAEDTALHQFEAQDTAVDNNDFGIPPPMPPRSHDHEVESSRATPAAPPAIDPAFASILQTLTQQQAHLAAEQTRQAAAHQQLTERMLSMFQTIQDKHDSLMQQLLQDRAERRALMTLMLHHSGILIPPVQSVLPPPLQAPVVPTIQPGPSLPTVGPSSSPLRSVTLAFTSPVFSSVCPQPSVPPASAVPTTAMAVSVTTSDPAAPAAQPQSESVSALASTADPGSETDSDPQLAFALLPRPRPDVPPPPPPTSDA

SEQ ID NO: 187802 - protein, 257 aa, Zea Mays
MTYGLSQLSYLVSLNNVRRYKSHLSWPPIFASSWDESVSLRWGDLGLSVSHIFRPVPGCCTMLGPMNIEVKQRKVVAVGRKRTARPTENTCPEELAESSEEVKTDTDRNVLVMFDILRRKKSAKLENLVLNRLSFAQTVENVFALSFLVKDGRVEITVDDSGHIVRPRNAPAASAIASGEVSYSHFVFRFDLKDWKLMKEVVTEGEELLPHRTSQSNLCNEENDQPNLELWQRKFQAPLQLGVVLYSLMTSSLRCFH

SEQ ID NO: 187803 - protein, 182 aa, Zea Mays
MTYGLSQLSYLVSLNNVRRYKSLAINFCESDLSWPPIFASSWDESVSLRWGDLGLSVSHIFRPVPGCCTMLGPMNIEVKQRKVVAVGRKRTARPTENTCPEELAESSEEVKTDTDRNVLVMFDILRRKKSAKLENLVLNRLSFAQTVENVFALSFLVKDGRVEITVDDSGHIGQGMHLLLAL

SEQ ID NO: 187804 - protein, 95 aa, Zea Mays
MMVSSLVSSSIMMFPYWRSLWQNPTRSHSPENSFSSAAISSSMLSKQNSSVSSEEEYRLLAVLSQFLAETMQLWQSALRFDDKFCFTTCCTRATV

SEQ ID NO: 187805 - protein, 420 aa, Zea Mays
MASSSSSLTRLFIPPHRAHHEAAMAASAGASLRNGGGMQMLDLVMQRWAEMVLCCGADWNCVSQLWNRVVLRKWLNIGAGSGDSDFSADEHDTSEGETDREGMSGLNHALCNEERILGGLGASTTGDEMSDLPYCLRMHRSEISRAQYVDVRELRIYVGTWNVGGRFPPSDLDIEEWLATEEPAEIYVIGFQEIVPLNAGNIFGAEDNRPVAVWEHIIRETLNKNCSDKSGFKCHSDPLSPSRFNPSDVVLSMEHGLLSESDKDSDGELHPLIERDHNCGLQAKTNENLEAFPEDNLACDAIIDNRTKRKRPEFVRIISKQMVGIFLSIWVRRSLRKHIKNLRVSTVGVGAIGYIGNKGSISVSMSVHETPFCFVCCHLTAGEKDGDDLKRNSNAEEILRRTVFNPENVVGMPMRIYDHK

SEQ ID NO: 187806 - protein, 298 aa, Zea Mays
MEFWGLEVKPGSTVKCEPGYGFVLHLSQAALGESKKSDNALMYVKIDDQKLAIGTLSVDKNPHIQFDLIFDKEFELSHTSKTTSVFFTGYKVEQPFEEDEMDLDSEDEDEELNVPVVKENADEKKQKSQEKAVAAPSKSSPDSKKSKDDDDSDEDETDDSDEDETDDSDEGLSPEEGDDDSSDEDDTSDDEEEDTPTPKKPEVGKKRAAESSVLKTPLSDKKAKVATPSSQKTGGKKGAAVHVATPHPAKGKTIVNNDKSVKSPKSAPKSGVPCKSCSKSFISETALQAHSKAKHGGK

SEQ ID NO: 187807 - protein, 92 aa, Zea Mays
MTPEQTRAPPRPRYPLRRQVTASREGGARRSRSRRQRRGRSRRGAAVGTQVFGRRRDGSRWGSWGALLGVFVARWTRRGGWRRGRAAAWRAG

SEQ ID NO: 187808 - protein, 544 aa, Zea Mays
MVVGSADPVVAIGFRALLRWLHTPSFATVSPQEVSGSSPAEVQNFVQGSWTASANWNWIVDPLNGDKFIKVAEVQGTEIKPFVESLSKCPKHGLHNPLKAPERYLMYGDISAKAAHMLGQPAVLDFFAKLIQRVSPKSYQQALAEVQVSQKFLENFCGDQVRFLARSFAVPGNHLGQRSNGYRWPYGPVAIITPFNFPLEIPLLQLMGALYMGNKPVLKVDSKVSIVMEQMIRLLHDCGLPAEDMDFINSDGAVMNKLLLEANPKMTLFTGSSRVAEKLAADLKGRVKLEDAGFDWKILGPDVQEVDYVAWVCDQDAYACSGQKCSAQSVLFMHKNWSSSGLLEKMKKLSERRKLEDLTIGPVLTVTTEAMIEHMNNLLKIRGSKVLFGGEPLANHSIPKIYGAMKPTAVFVPLEEILKSGNFELVTKEIFGPFQVVTEYSEDQLELVLEACERMNAHLTAAVVSNDPLFLQDVLGRSVNGTTYAGIRARTTGAPQNHWFGPAGDPRGAGIGTPEAIKLVWSCHREVIYDVGPVPESWALPSAT

SEQ ID NO: 187809 - protein, 439 aa, Zea Mays
MYGDISAKAAHMLGQPAVLDFFAKLIQRVSPKSYQQALAEVQVSQKFLENFCGDQVRFLARSFAVPGNHLGQRSNGYRWPYGPVAIITPFNFPLEIPLLQLMGALYMGNKPVLKVDSKVSIVMEQMIRLLHDCGLPAEDMDFINSDGAVMNKLLLEANPKMTLFTGSSRVAEKLAADLKGRVKLEDAGFDWKILGPDVQEVDYVAWVCDQDAYACSGQKCSAQSVLFMHKNWSSSGLLEKMKKLSERRKLEDLTIGPVLTVTTEAMIEHMNNLLKIRGSKVLFGGEPLANHSIPKIYGAMKPTAVFVPLEEILKSGNFELVTKEIFGPFQVVTEYSEDQLELVLEACERMNAHLTAAVVSNDPLFLQDVLGRSVNGTTYAGIRARTTGAPQNHWFGPAGDPRGAGIGTPEAIKLVWSCHREVIYDVGPVPESWALPSAT

SEQ ID NO: 187810 - protein, 545 aa, Zea Mays
MSRLLSRQHLAAVRRSAPFAWLHTPSFATVSPQEVSGSSPAEVQNFVQGSWTASANWNWIVDPLNGDKFIKVAEVQGTEIKPFVESLSKCPKHGLHNPLKAPERYLMYGDISAKAAHMLGQPAVLDFFAKLIQRVSPKSYQQALAEVQVSQKFLENFCGDQVRFLARSFAVPGNHLGQRSNGYRWPYGPVAIITPFNFPLEIPLLQLMGALYMGNKPVLKVDSKVSIVMEQMIRLLHDCGLPAEDMDFINSDGAVMNKLLLEANPKMTLFTGSSRVAEKLAADLKGRVKLEDAGFDWKILGPDVQEVDYVAWVCDQDAYACSGQKCSAQSVLFMHKNWSSSGLLEKMKKLSERRKLEDLTIGPVLTVTTEAMIEHMNNLLKIRGSKVLFGGEPLANHSIPKIYGAMKPTAVFVPLEEILKSGNFELVTKEIFGPFQVVTEYSEDQLELVLEACERMNAHLTAAVVSNDPLFLQDVLGRSVNGTTYAGIRARTTGAPQNHWFGPAGDPRGAGIGTPEAIKLVWSCHREVIYDVGPVPESWALPSAT

SEQ ID NO: 187811 - protein, 565 aa, Zea Mays
MSRLLSRQHLAAVRRSAPFACVSRWLHTPSFATVSPQEVSGSSPAEVQNFVQGSWTASANWNWIVDPLNGDKFIKVAEVQGTEIKPFVESLSKCPKHGLHNPLKAPERYLMYGDISAKAAHMLGQPAVLDFFAKLIQRVSPKSYQQALAEVQVSQKFLENFCGDQVRFLARSFAVPGNHLGQRSNGYRWPYGPVAIITPFNFPLEIPLLQLMGALYMGNKPVLKVDSKVSIVMEQMIRLLHDCGLPAEDMDFINSDGAVMNKLLLEANPKMTLFTGSSRVAEKLAADLKGRVKLEDAGFDWKILGPDVQEVDYVAWVCDQDAYACSGQKCSAQSVLFMHKNWSSSGLLEKMKKLSERRKLEDLTIGPVLTVSQGRSQPFFGGQLTPVTTEAMIEHMNNLLKIRGSKVLFGGEPLANHSIPKIYGAMKPTAVFVPLEEILKSGNFELVTKEIFGPFQVVTEYSEDQLELVLEACERMNAHLTAAVVSNDPLFLQDVLGRSVNGTTYAGIRARTTGAPQNHWFGPAGDPRGAGIGTPEAIKLVWSCHREVIYDVGPVPESWALPSAT

SEQ ID NO: 187812 - protein, 297 aa, Zea Mays
MAAAMCVDDEAASAAAESAGVDKLDLGAAAGGKRSVYLMDCAPVWGCASTRGRSAEMEDACAAAPRFADVPVRLLASRRDLDGLGLDAGALRLPAHLFGVFDGHGGAEVANYCRERLQVLLRQELRLLGEDLGQISCDVDMKEHWDELFTGCFQRLDDEVSGQASRLVGAVQESRPVAAENVGSTAVVAVVCSSHVVVANCGDSRAVLCRGKEPVELSIDHKVSLCFCLERGMMAIVRFTRGCFSLTGRMSARGLRPWEARSSNGTAIGSPVYLLCQDRLVCILVPQLDLGRMTLFK

SEQ ID NO: 187813 - protein, 250 aa, Zea Mays
MLLVQLKPLKPFCATMVLLYFMSVTGAHSSVHCICSLGLLILFLHEVVQMAHGGTNFGFYNGANTGQDESDYKADLTSYDYDAPIKEHGDVHNAKYKALRRVIHECTGTPLHPLPANIKKASYGIMKLQKVVSLFDIIDNINDPLKVSVSEHPLYMEQIGQMFGFLLYMSEYQGKLPSSILSIPKVHDRAQVFVSCSAGVRTLRYCGVIERWSNKTLEIPNLRCSSKTSLYILVENMGRVNYGPYIFDRK

SEQ ID NO: 187814 - protein, 423 aa, Zea Mays
MAHIQITEEIQLARKISPFKEFYTGWLTHWGERIATTDATSTAKALKTILCHNGSAVLYMAHGGTNFGFYNGANTGQDESDYKADLTSYDYDAPIKEHGDVHNAKYKALRRVIHECTGTPLHPLPANIKKASYGIMKLQKVVSLFDIIDNINDPLKVSVSEHPLYMEQIGQMFGFLLYMSEYQGKLPSSILSIPKVHDRAQVFVSCSAGVRTLRYCGVIERWSNKTLEIPNLRCSSKTSLYILVENMGRVNYGPYIFDRKGILSPIQIDGITLRHWKMYPLALNSLDILPKLQLITQIPYAGASKMSIHGDSEKILQDSSCCSNESTSAEPAFYEGHFRIDNETEIKDTFISFRGWNKGVAFVNNFNIGRFWPACGPQCTLYVPAPILRPGDNIVVIFELHAPNHELTIDFTTDPDFTCGPEQ

SEQ ID NO: 187815 - protein, 428 aa, Zea Mays
MLLVQLKPLKPFCATMVLLYFMSVTGAHSSVHCICSLGLLILFLHEVVQMAHGGTNFGFYNGANTGQDESDYKADLTSYDYDAPIKEHGDVHNAKYKVFYFYILIYHYNYQAALRRVIHECTGTPLHPLPANIKKASYGIMKLQKVVSLFDIIDNINDPLKVSVSEHPLYMEQIGQMFGFLLYMSEYQGKLPSSILSIPKVHDRAQVFVSCSAGVRTLRYCGVIERWSNKTLEIPNLRCSSKTSLYILVENMGRVNYGPYIFDRKGILSPIQIDGITLRHWKMYPLALNSLDILPKLQLITQIPYAGASKMSIHGDSEKILQDSSCCSNESTSAEPAFYEGHFRIDNETEIKDTFISFRGWNKGVAFVNNFNIGRFWPACGPQCTLYVPAPILRPGDNIVVIFELHAPNHELTIDFTTDPDFTCGPEQ

SEQ ID NO: 187816 - protein, 364 aa, Zea Mays
MAHGGTNFGFYNGANTGQDESDYKADLTSYDYDAPIKEHGDVHNAKYKALRRVIHECTGTPLHPLPANIKKASYGIMKLQKVVSLFDIIDNINDPLKVSVSEHPLYMEQIGQMFGFLLYMSEYQGKLPSSILSIPKVHDRAQVFVSCSAGVRTLRYCGVIERWSNKTLEIPNLRCSSKTSLYILVENMGRVNYGPYIFDRKGILSPIQIDGITLRHWKMYPLALNSLDILPKLQLITQIPYAGASKMSIHGDSEKILQDSSCCSNESTSAEPAFYEGHFRIDNETEIKDTFISFRGWNKGVAFVNNFNIGRFWPACGPQCTLYVPAPILRPGDNIVVIFELHAPNHELTIDFTTDPDFTCGPEQ

SEQ ID NO: 187817 - protein, 371 aa, Zea Mays
MSDGKDSLDLSALGAAIPNSAELSAEDKANLVASIKNTLEGLASRHTDVLENLEPKVRKRVEKLREIQGEHDELEAKFFEERAALEAKYQKLYEPLYSKRYEIVNGVVEIEGITKESAAETPEEQKSGDETSAEQKEEKGVPAFWLNAMKNHEILAEEIQERDEEALKYLKDIKWYRISEPKGFKLEFHFGTNMFFKNSVLTKTYHMIDEDEPILEKAIGTEIEWYPGKCLTQKVLKKKPRKGSKNTKPITKTEDCESFFNFFSPPQVPDDDEEIDEDTAEQLQNQMEQDYDIGSTIETKLSHMLSRGSLERLLKMRTLKLWMARTTTMKTTMMKTTRMKMTMIMIQRPRELLEGKGSRVNDLQSASNSEV

SEQ ID NO: 187818 - protein, 370 aa, Zea Mays
MSDGKDSLDLSALGAAIPNSAELSAEDKANLVASIKNTLEGLASRHTDVLENLEPKVRKRVEKLREIQGEHDELEAKFFEERAALEAKYQKLYEPLYSKRYEIVNGVVEIEGITKESAAETPEEQKSGDETSAEQKEEKGVPAFWLNAMKNHEILAEEERDEEALKYLKDIKWYRISEPKGFKLEFHFGTNMFFKNSVLTKTYHMIDEDEPILEKAIGTEIEWYPGKCLTQKVLKKKPRKGSKNTKPITKTEDCESFFNFFSPPQVPDDDEEIDEDTAEQLQNQMEQDYDIGSTIETKLSHMLSRGSLERLLKMRTLKLWMARTTTMKTTMMKTTRMKMTMIMIQRRPRELLEGKGSRVNDLQSASNSEV

SEQ ID NO: 187819 - protein, 354 aa, Zea Mays
MSDELSAEDKANLVASIKNTLEGLASRHTDVLENLEPKVRKRVEKLREIQGEHDELEAKFFEERAALEAKYQKLYEPLYSKRYEIVNGVVEIEGITKESAAETPEEQKSGDETSAEQKEEKGVPAFWLNAMKNHEILAEEIQERDEEALKYLKDIKWYRISEPKGFKLEFHFGTNMFFKNSVLTKTYHMIDEDEPILEKAIGTEIEWYPGKCLTQKVLKKKPRKGSKNTKPITKTEDCESFFNFFSPPQVPDDDEEIDEDTAEQLQNQMEQDYDIGSTIETKLSHMLSRGSLERLLKMRTLKLWMARTTTMKTTMMKTTRMKMTMIMIQRRPRELLEGKGSRVNDLQSASNSEV

SEQ ID NO: 187820 - protein, 216 aa, Zea Mays
MQTLWPLGQVDPKSVRFPCCIVWTPLPVVSWLAPYIGHVGIAREDGTVLDFAGSNLVSVDDLAYGSVARCLQLDRAKCCFPANPASHVCLRSHEHSDAGTAISWDDALRSGSRRFEHKCYNLFTCNSHSFVADCLNRLAYGGSVGWNVLNLAALVWLRGRWLDPMAAVRSFLPFAVVSCVGVLMAGWSFLLGMTAFTLLLLGWFVLGVYCMKGLVV

SEQ ID NO: 187821 - protein, 379 aa, Zea Mays
MEKVGKDGVITIVDGKTLDNELEAVQGMKLSRGYISPYFVTDQKTQKCEMENPLILIHDKKISNMDSLLPALEISIKNRKPLLIVAEDVEGDALSMLVLNKHRAGLKVCAVKAPGFGENRRHNLDDMAVMTGGEVISEERGLDLGKVQLQMLGTAKKVTVSLDDTIILDGGGDKQQIDERCQQLRESIDTSTAVFDKEKAQERLSKLSGGVAVLKIGGASEAEVGEKKDRVTDALNAARAAVEEGIVPGGGVALLYATKELDKISTANEDEKIGVQIIKNSLKAPLMTIAANAGIDGAIVIGKLIEQEDLSLGYDAAKGEYVDMIKAGIIDPVKVIRTALQDAASVSLLMATTEAAVSELPATKSRIASRMPQMSGMDF

SEQ ID NO: 187822 - protein, 625 aa, Zea Mays
MKKQSPTNRKISVVSNQNLKKRINLSNQTVPEEWISRLSRSFQNPNPCASKTLLPSPDPTAKSKFDATMYRAAAVISRSSSALRRQLARGVAGELPRLLARGYAATAKEVSFGVGARAAMLQGVNDLADAVKVTMGPKGRTVIIEGSHKGPKVTKDGVTVAKSVEFEDSAKNVGANLVKQVADATNKAAGDGTTCATVLTQAILTEGCKAVAAGVNVMDLRNGINKAINAITAHLKSKAWKINSPEEINQVATISANGEKEIGDLISKAMEKVGKDGVITIVDGKTLDNELEAVQGMKLSRGYISPYFVTDQKTQKCEMENPLILIHDKKISNMDSLLPALEISIKNRKPLLIVAEDVEGDALSMLVLNKHRAGLKVCAVKAPGFGENRRHNLDDMAVMTGGEVTVSLDDTIILDGGGDKQQIDERCQQLRESIDTSTAVFDKEKAQERLSKLSGGVAVLKIGGASEAEVGEKKDRVTDALNAARAAVEEGIVPGGGVALLYATKELDKISTANEDEKIGVQIIKNSLKAPLMTIAANAGIDGAIVIGKLIEQEDLSLGYDAAKGEYVDMIKAGIIDPVKVIRTALQDAASVSLLMATTEAAVSELPATKSRIASRMPQMSGMDF

SEQ ID NO: 187823 - protein, 51 aa, Zea Mays
MDPDAILAQKPPPADRRRDEPVPRSRTSCVPDLLVRLLSVSMVTLLGFRDI

SEQ ID NO: 187824 - protein, 437 aa, Zea Mays
MDSADAATALGAWIRGYFTPATFFLVVNLVIGTIALTSRATKQRRRRENYYHDDGNGHQETLHPQMEQPGYGHYYHPDPTLYAAPPPPAPLARTSSVLDRLRSLGLYRFRSGDFPPEVKKSGSEVRKSQVSRAAPRIVQAVTEDDVSVEEAEGGGFRRRPSPPQQEYHYRQEYVTPPPPAPAPLQRTSSVLDRLRSLGLYGFLAPDEPAAAASVPASDGFATPADEKRHAHTHYDIGRSEPAREQQDKKEKTQGGNSTRAKSSSGARKTPAQRQAEAGAECVDARAEAFIDSFRQQQQVHHYQEEEYVPPPAPAPPLSRTSSVLDRLRSFGLYRFRSGDLGPDLPSATAATETDKEKQQAAHYGRSRSEPAREQGKKQDTRMNKSSSSGVVAEADAHQCVNARADDFINKFRQQLQLQRLNSLLNYKEMLNRGGDKQ

SEQ ID NO: 187825 - protein, 395 aa, Zea Mays
MPYCEVGRYADGDKWEGVRLFYRRYGSGATKVLLVIGLAGTHDSWGPQIKGLTGSLEPSDDEALRPDEEAGVGAAEAAPAEADDGIEVCCFDNRGVGRSSVLPNKSYYSTAIMATDALALIDHLGWKKAHVFGHSMGAMIACKLAAMAPHRLCSLALLNVTGGGFQCFPKVDAQMLSLAFRFLRAKTPEERALVDLETHYTKEYLEETVGSCTRRMVLYQEYVKGISSTGMQSNCGFEGQVNACWTHKMTTKELDTIRYDIIAQLCHAKRLAERLLPVARMVVPHGAHLVSHERPDEVNNALMDLIKATKSEIKPEEWSAQPENTSETGALISARPITVMVRTDAGVDATAAVYNLLGKLQLSFLYLIGMILMGFELMRNIVRVMKPVRVAAIES

SEQ ID NO: 187826 - protein, 390 aa, Zea Mays
MPYCEVGRYADGDKWEGVRLFYRRYGSGATKIKGLTGSLEPSDDEALRPDEEAGVGAAEAAPAEADDGIEVCCFDNRGVGRSSVLPNKSYYSTAIMATDALALIDHLGWKKAHVFGHSMGAMIACKLAAMAPHRLCSLALLNVTGGGFQCFPKVDAQMLSLAFRFLRAKTPEERALVDLETHYTKEYLEETVGSCTRRMVLYQEYVKGISSTGMQSNCGFEGQVNACWTHKMTTKELDTIRSAGFLVSVIHGRYDIIAQLCHAKRLAERLLPVARMVVPHGAHLVSHERPDEVNNALMDLIKATKSEIKPEEWSAQPENTSETGALISARPITVMVRTDAGVDATAAVYNLLGKLQLSFLYLIGMILMGFELMRNIVRVMKPVRVAAIES

SEQ ID NO: 187827 - protein, 80 aa, Zea Mays
MNFVTTRANQSSRKGTNARAVELAPCHPPETVRPALFNLVSNDSTPSFLTFGKHSATTRRAAARLFACQNQAPRTFPVSR

SEQ ID NO: 187828 - protein, 295 aa, Zea Mays
MTGVQKELGEAYQVLSDPGKKEAYDNYGKEGIPQDNMVDPAAVFGMLFGSDYFEDYVGQLALASIASVEVEENSNSQEARAKVQEKIKELQREREQKLTQSLKDRLQSYVDGRNDEFVSYASAEARRLSEAAFGEAMLHTIGYIYVRQAARELGKSRIYMGVPFIAEWVRDKGHHIKSQVNAASGAISLIQLQEGMKKMEGSEDSEEQLMKSFEEKKDAMLSSLWKINVVDIESTLSRVCQAVLRDSMVSKDVLKLRAKALKKLGTIFQGAESMYRRENSLRVETSTDQQAASSH

SEQ ID NO: 187829 - protein, 336 aa, Zea Mays
MVKDSAYYDVLGLSVDASPAEIKKAYYIKLVHPDKNPGNPDAALKFQELGEAYQVLSDPGKKEAYDNYGKEGIPQDNMVDPAAVFGMLFGSDYFEDYVGQLALASIASVEVEENSNSQEARAKVQEKIKELQREREQKLTQSLKDRLQSYVDGRNDEFVSYASAEARRLSEAAFGEAMLHTIGYIYVRQAARELGKSRIYMGVPFIAEWVRDKGHHIKSQVNAASGAISLIQLQEGMKKMEGSEDSEEQLMKSFEEKKDAMLSSLWKINVVDIESTLSRVCQAVLRDSMVSKDVLKLRAKALKKLGTIFQGAESMYRRENSLRVETSTDQQAASSH

SEQ ID NO: 187830 - protein, 170 aa, Zea Mays
MSATADNLVPRPRGAEPRLHRREPGTPTPRRCHQQRQPRGRAACRGAATRPATGRGAKQQASVDADRAKRPVPIPPCLTVRDSKSALVSVLHCFSGSSPRTGPDGIRRRGGGGGGGGGPRRWTAEGEPGADCGRGHAGGGEEGRVERQFLQGRQRRRSPARRQPRRLLAV

SEQ ID NO: 187831 - protein, 194 aa, Zea Mays
MESDAEEAAAAAAVDPGAGRLKGSPELTVDADMREVAKRAAWSVSSFKDGNGVAALRDDNLDAYWQSDGAEPHLVNIRFQKKLVALYVDFKLDESYTPSKISIRAGDGFHNLKEIKTVELAKPVGWVHISLSGADPRETFIHTFMLQIAVLSNHLNGRDTHVRQIKIYGPRPSPVPHQPFHFISREFITYSTIR

SEQ ID NO: 187832 - protein, 166 aa, Zea Mays
MREVAKRAAWSVSSFKDGNGVAALRDDNLDAYWQSDGAEPHLVNIRFQKKVQLQLVALYVDFKLDESYTPSKISIRAGDGFHNLKEIKTVELAKPVGWVHISLSGADPRETFIHTFMLQIAVLSNHLNGRDTHVRQIKIYGPRPSPVPHQPFHFISREFITYSTIR

SEQ ID NO: 187833 - protein, 691 aa, Zea Mays
MLRASTDSSRLSISSAPSSSSQGSGQDDIESLGDVYVWGEVWTDMIPAEGSANYLCSKADILIPKPLESDVVLDVQQIACGYRHIALTTRQGEVFAWGEELGGRLGHGTDADISRPKLVEALAVSNVEYVACGEFHTCAITASGDLYTWGDGYYNAGLLGHGAGTSHWLPKRVSGPLEGVQVLSVSCGSWHSALTTSSGKVFTFGDGTFGALGHGNRHTVAYPKEVETLSGFRTIKVACGLWHSAAIVETTNQAGVNVISRKLFTWGAGDKNPLGHGDKDARLVPTCVQSLIDYNFHQVACGHSMTIALSTSGHVFTMGSSSNGQLGNPKSDGKHPTPVQDRLAGELVEEISCGSCHVAVLTSRSEVYTWGMGANGRLGHGGVEDKKKPTLVEALKDRHVKSIACGSNFTTCICIHKWVSGADQSVCSGCRQPFGFTRKRHNCYNCGLVHCHACSSKKVLKAALAPTPGKPHRVCDSCFMKLKAAETSSNSSHSKRNAIARRSVDSKDRSERPEIRSSRLATGSTAEPLKQAELKAVRNEIKPDPMSTMRAPQVPSMLPFNNLAFGATFGGPASLKPMTMAPMPMAMPMSPAPLTKKPTPAAATPLCGKSDTDNLKMAKQVLNEDISKLQSQVNKLKQKCDAQEEQLQKAERRAEHSASTAAEESSRRNGVLEFIRFLDNEYQLSRLLYSS

SEQ ID NO: 187834 - protein, 121 aa, Zea Mays
MADPELEAIRQRRMRELQHGAANQQNAGQQKAQEDAKQEAEERRQMMLAQILSSEARERLSRIALVKPDKARGVEDVLLRAAQTGGISEKVSEERLISLLEQINSHTSKQTKVTWVEVYRS

SEQ ID NO: 187835 - protein, 93 aa, Zea Mays
MSSLSATVGSLAVAVGQREGADSSAFALALVFAAVVMYDASGIRWHTGRQAALLNQIVCEFPAEHPIISTFRPLREPLGHSPLQFVFIVFLLL

SEQ ID NO: 187836 - protein, 65 aa, Zea Mays
MVNYELKGCCQSRCHLSLEVPGSIQMLLWHVLFFWTEAASVKYFVREKRQRNPAGVGNGLGSFWG

SEQ ID NO: 187837 - protein, 311 aa, Zea Mays
MPRHEAHKALEIYRRAGQQAGNLSDFYENCRGLELARNFQFPTLREPPQTFLATMEEYVKEAPRMVPVREPLELPERLLLTYKPEESEDIPEPASVEEENAPVEEPVLVPPVTEVVSPPKTEVADTGDLLGLDDPNPAVSAIEESNALALAIVPTDGASTTGNTAFQDKGFDPTGWELALVTAPSNTTSSASGGGFDKLILDSLYDDGAYRQRQQQQVYGSAVPNPFMTNDPFVMSNQVAPPPSVQMAAMSQQHQQIPTMMQPNPFGPPMQPQVGMGPATNNPFLDAGFGAFPVANNSHQQHNPFGSAQLL

SEQ ID NO: 187838 - protein, 440 aa, Zea Mays
MTPVQLFSAAWDCSAWVRTYGLFLEERLECFRVLKYDVEAERLSKQGQGPEKGHSRTRELDSQDLLEQLPALQQLLYRLVGCRPEGAANNNYLVQYALALVLKESFKIYCAINDGIINLVDKFFEMPRHEAHKALEIYRRAGQQAGNLSDFYENCRGLELARNFQFPTLREPPQTFLATMEEYVKEAPRMVPVREPLELPERLLLTYKPEESEDIPEPASVEEENAPVEEPVLVPPVTEVVSPPKTEVADTGDLLGLDDPNPAVSAIEESNALALAIVPTDGASTTGNTAFQDKGFDPTGWELALVTAPSNTTSSASVGQLGGGFDKLILDSLYDDGAYRQRQQQQVYGSAVPNPFMTNDPFVMSNQVAPPPSVQMAAMSQQHQQIPTMMQPNPFGPPMQPQVGMGPATNNPFLDAGFGAFPVANNSHQQHNPFGSAQLL

SEQ ID NO: 187839 - protein, 399 aa, Zea Mays
MMLKLSVCPNKGHSRTRELDSQDLLEQLPALQQLLYRLVGCRPEGAANNNYLVQYALALVLKESFKIYCAINDGIINLVDKFFEMPRHEAHKALEIYRRAGQQAGNLSDFYENCRGLELARNFQFPTLREPPQTFLATMEEYVKEAPRMVPVREPLELPERLLLTYKPEESEDIPEPASVEEENAPVEEPVLVPPVTEVVSPPKTEVADTGDLLGLDDPNPAVSAIEESNALALAIVPTDGASTTGNTAFQDKGFDPTGWELALVTAPSNTTSSASVGQLGGGFDKLILDSLYDDGAYRQRQQQQVYGSAVPNPFMTNDPFVMSNQVAPPPSVQMAAMSQQHQQIPTMMQPNPFGPPMQPQVGMGPATNNPFLDAGFGAFPVANNSHQQHNPFGSAQLL

SEQ ID NO: 187840 - protein, 302 aa, Zea Mays
MRQLLFALDGLHSTGIVHRDIKPQNVIFSEGSRTFKIIDLGAAADLRVGINYIPKEFLLDPRYAAPEQYIMSTQTPSAPSVPVATTLSPVLWQLNLPDRFDIYSLGLIFLQMAFPSLRTDSNLIQFNRQLKRCDYDLQAWRNLVEPRASAELRRGFDIMDLDGGIGWELLTSMVRYKARQRTSAKAALAHPYFNREGLLGLSVMQNVRLQLFRATQKDYSEAARWVIGLMARSGTEDVGGFTEAQLQELREIKPKKSSTQRNALASVLRLQRKIMRTIKESMDELNSQRKSIWWSRWIPREE

SEQ ID NO: 187841 - protein, 173 aa, Zea Mays
MVNGFAALGNARAVGTAVPGYTSISEEPAFLRLERGERPTTSKLGLRGGDDGCQMPASGGEGGRRDGVHAGDRPSHRRAPRPGGRRRRRLLPQAERGRGRGGAQGQGDHRGGRRLPRIRRTATQEHHRDGRQGRNCGRGFQSFRACFVVLVFAQSKIVHFQMDYIALSASSCC

SEQ ID NO: 187842 - protein, 864 aa, Zea Mays
MALSELPLHHSFRLSSRPSIHSLLPLRLLSSSSSSSSAAAASASSPSSTGGNRAAPSTGAPWLQRWAPSDPSRPAPAPAPIPSPTTSIDRIVHRLRNLGLASDEDDPSASASASAATAAAPPDGTERLGDLLHRGWARPDHQFAAAGFDDAVLPWERDDETTGPVRDEEDGTKRRRVKAPTLAELTIEDGELRRLRRLGMTLRDRITVPKAGVTTAVTEKIHDAWRKSELVRLKFHEDLAHDMKTAHELVERRTGGLIIWRSGSVMVVYRGSNYKRPLKSQALNGASSPVKGEDGALFIPDASNPVESNIQGTGLATQYANVSLLNSQNTEDMTEEELEFNQMLDELGPRFVDWWGTGILPVDADLLPQTIPGYKTPYRVLPTGMRSTLTNAELTNLRKLARNLPCHFALGRNRNHQGLSAAIVKLWEKSLVVKIAVKRGIQNTNNKIMAEEIKNLTGGTLLLRNKFYIVIYRGKDFLPTSVAAVLAEREELTKDIYNMEEQRRRVLITQPSDDGLDGHALAGTLAEFQEAQARWGREVTAKEQEEMKEASSRSEKQKLYRKLEHKLSIAQAKIHRAERLLSKIEASLVLADPCDDQEMITDEEKSVFRRIGLRLKAYLPLGVRGVFDGVIENMHLHWKHREVVKLISKQKTLSFVEETARLLAYESGGILVAIERVPKGYALIFYRGKNYRRPINIRPRNLLTKAKALKRAVAMQRHEALSQHIDQLESNIKQMKLDLLRTMRNKMRIAQIQKMNMTTQSPLLAMMRIKTILTNQLMKMNMMITTMKMTRLTASGLELFLVMCRSELVILWTLYFCLWDISWYEKTKLLLVFTSPFLLVNLKGSRFSFQLSKLFQPVPSREGQ

SEQ ID NO: 187843 - protein, 412 aa, Zea Mays
MALSELPLHHSFRLSSRPSIHSLLPLRLLSSSSSSSSAAAASASSPSSTGGNRAAPSTGAPWLQRWAPSDPSRPAPAPAPIPSPTTSIDRIVHRLRNLGLASDEDDPSASASASAATAAAPPDGTERLGDLLHRGWARPDHQFAAAGFDDAVLPWERDDETTGPVRDEEDGTKRRRVKAPTLAELTIEDGELRRLRRLGMTLRDRITVPKAGVTTAVTEKIHDAWRKSELVRLKFHEDLAHDMKTAHELVERRTGGLIIWRSGSVMVVYRGSNYKRPLKSQALNGASSPVKGEDGALFIPDASNPVESNIQGTGLATQYANVSLLNSQNTEDMTEEELEFNQMLDELGPRFVDWWGTGILPVDADLLPQTIPGYKTPYRVLPTGMRSTLTNAELTNLRKLARNLPCHFALAC

SEQ ID NO: 187844 - protein, 153 aa, Zea Mays
MIKPDTRDSLISFLQILVAHHPSKRCRRGSAELLIDFDDHWHTNLSLSLEDSTTLLKGAGEKVCGNGVPRGYWIFCRGSKKETRGFSCGLWVLLHSLTVRIGDGESQTTFTSICDFIHNFFICEECRTHFYEMCSRFGKTTLAIYCHRNQLHV

SEQ ID NO: 187845 - protein, 92 aa, Zea Mays
MSLKRHALCIREETESPRHIACDQFSDTSLQVWASVHSIYVGYISVNKKNKKAGHVGIYICKQKNKFGLRSTVYKLFSQMETRVLRCMLVAF

SEQ ID NO: 187846 - protein, 609 aa, Zea Mays
MDNLITLVNKLQRACTALGDHGEESALPTLWDSLPAIAVVGGQSSGKSSVLESVVGKDFLPRGSGIVTRRPLVLQLHRIDGDREYAEFMHLPRKRFTDFAAVRKEIADETDRETGRSKQISTVPIHLSIFSPHGKMQTLEGYIVTVALSHLNCPLPIVNLTLIDLPGLTKVAVDGQPESIVHDIENMVRSYIEKKCTVVDSGERTFGVLTKIDLMDKGTDAVDILEGRSYRLQTPWVGVVNRSQQDINKNVDMIAARRREREYFASTPEYKHMASRMGSEYLGKMLSKHLEQVIKSRIPGIQSLITKTIAELETELNRLGKPIANDAGGKLYTIMEICRMFDGIYKEHLDGVRPGGEKVYHVFDNQFPVAIKRLQFDKQLSMENVRKLITEADGYQPHLIAPEQGYRRLIESCLISIRGPAEAAVDAVHAILKDLVRKAINETHELKQFPTLRVEVGNAAFESLDRMRDESKKNTLKLVDMECSYLTVDFFRKLPQDVEKGGNPSHSIFDRYNDSYLRRIGQTVLSYVNMVCSTLRNSIPKSIVYCQVREAKRSLLDHFFTELGAREMKQLSKLLDEDPAVMERRTNLAKRLELYRSAQSEIDAVAWSK

SEQ ID NO: 187847 - protein, 624 aa, Zea Mays
MDNLITLVNKLQRACTALGDHGEESALPTLWDSLPAIAVVGGQVPFFPSRARFFALVLIGSGAVAPASWVWISRVAGGTARSSGKSSVLESVVGKDFLPRGSGIVTRRPLVLQLHRIDGDREYAEFMHLPRKRFTDFAAVRKEIADETDRETGRSKQISTVPIHLSIFSPHVVNLTLIDLPGLTKVAVDGQPESIVHDIENMVRSYIEKKCTVVDSGERTFGVLTKIDLMDKGTDAVDILEGRSYRLQTPWVGVVNRSQQDINKNVDMIAARRREREYFASTPEYKHMASRMGSEYLGKMLSKHLEQVIKSRIPGIQSLITKTIAELETELNRLGKPIANDAGGKLYTIMEICRMFDGIYKEHLDGVRPGGEKVYHVFDNQFPVAIKRLQFDKQLSMENVRKLITEADGYQPHLIAPEQGYRRLIESCLISIRGPAEAAVDAVHAILKDLVRKAINETHELKQFPTLRVEVGNAAFESLDRMRDESKKNTLKLVDMECSYLTVDFFRKLPQDVEKGGNPSHSIFDRYNDSYLRRIGQTVLSYVNMVCSTLRNSIPKSIVYCQVREAKRSLLDHFFTELGAREMKQLSKLLDEDPAVMERRTNLAKRLELYRSAQSEIDAVAWSK

SEQ ID NO: 187848 - protein, 324 aa, Zea Mays
MDNLITLVNKLQRACTALGDHGEESALPTLWDSLPAIAVVGGQSSGKSSVLESVVGKDFLPRGSGIVTRRPLVLQLHRIDGDREYAEFMHLPRKRFTDFAAVRKEIADETDRETGRSKQISTVPIHLSIFSPHVVNLTLIDLPGLTKVAVDGQPESIVHDIENMVRSYIEKKCTVVDSGERTFGVLTKIDLMDKGTDAVDILEGRSYRLQTPWVGVVNRSQQDINKNVDMIAARRREREYFASTPEYKHMASRMGSEYLGKMLSKHLEQVIKSRIPGIQSLITKTIAELETELNRLGKPIANDAGAPWRRESLPCLRQSISCSY

SEQ ID NO: 187849 - protein, 78 aa, Zea Mays
MRTQPRLAKKQKRLVRQRLRDARTTGPQIKRTLEEPCGEKAAQRAVGDCEHATKRRNFTNQPGRTRNAASTDTDSGNE

SEQ ID NO: 187850 - protein, 120 aa, Zea Mays
MPCFLLRRQSTGCPTICTNHPMSNKKKEGTKEDAGYDSFGSSSPPPPPPPLNPPSFFMASFNPVRPCTRARAPRLPSLSPTLLPLPPPPRLGQATQAGVGGQSESLSMPSIPLRPRFFCC

SEQ ID NO: 187851 - protein, 75 aa, Zea Mays
MRPTTPHLPQAPRRPHPRELATPSSPSSVCISMTLMDVYAKTSRLELVLQVLGEMPSRNVVSRTMLAASLGQELT

SEQ ID NO: 187852 - protein, 157 aa, Zea Mays
MSPFYAVAVDAVHVAGEALDIPADVWDVARGGGAILDSGTSLTVLATPAYRAVVAALSERLAGLPRVSMDPFEYCYNWTAAALEIPGLEVRFAGSARLQPPAKSYVVDAAPGVKCIGVQEGAWPGVSVIGNILQQDHLWEFDLRDRWLRFKHTRCAL

SEQ ID NO: 187853 - protein, 630 aa, Zea Mays
MRGSSGARMTAQDAAEAAVGAVGCGYDLTGDLRLGRAKPGGRLVDLDGAGKGPGTSQSASPSPRELAFPGGAAVAGVPAGVVAGKGERARFRSDVLPFAQMAEEVNRSLSLPASKIPSGAFNAMFDYRGCWHRDAAATRSLCFDARLVELYSVEAVRASLALRDHVRRDLPPVWDPAALAEFIDKYGTHVIVGVKMGGKDVVCVKQLKGSSLTQSDVQARLKELADDRFSEDSTASSNSSTAGGGRLSQGLNVGPGSAAWQSFRSPVVSHKDNVVGSSQDMVCIHVRRGGVDSGQGHGKWLSTITGFPDVISMSFVPITSLLTGVRGSGFLNHAVNLYLRYKPAIEELQQFLEFQVPRLWAPEFGQLPLSLQRRKNILPSLQFTLMGPKLHVNTAKVDSCLRPVTGIRLFLEGKKSDQLGVHLQHLSATPGAITVLGEAASSADDAAAVNERAYIEPVRSPLLSHICTAPVQYNGALIDDCAAIVTSAWLEVRDACCLKKVLFLRLGFSGVADMKIRRSEWGGALVAPRRSGSLSARLSAALSGGLAPAPPAVEEKVEVNSAIFPKGPPVPLPVQKMARHIDTTEVSRGPDDLPGYWVVTGAKLCMEGGKVALKVKYSLLIAVQEDPEGH

SEQ ID NO: 187854 - protein, 465 aa, Zea Mays
MGWLVVPQEVIEIDDDDPDGVILIGDKAQVEKNKQTAVCPMDCSKHAKSGWVQDIPGPSTYASKYTSSWVDLKVFQDEAVYNYSDGYPFDGFEEDYAYDEDEFEDDGYDTPLIESEFQFSLSAKFDNFNVLHGLEASLPWKHKTAIEIANKTKPSKAVDDKIEEKYKAFKRFDTVDDHSDHYYSKPESRKVQAVKKPSKDWVKRIQHEWKVLEKDLPETIFVRAYEDRMDLLRAVIMGPAGTPYHDGLFFFDIYFPPQYPNIPPMVNYRAGGLRLNPNLYACGKVCLSLLNTWTGSGCEKWNPANSTMLQVLVSIQALVLNAKPYFNEPGYAMHANTAHGEKKSLTYNEDTFLHSCRTMLYSLRNPPKNFEDFVAGHFRKYGRNILVACRAYLEGAQVGCLSGDGVQDVDEGDKSCSVRFKQSLKRLHEELLAEFTAKGADCGKFLSEKARSGASTSAADTTLRL

SEQ ID NO: 187855 - protein, 359 aa, Zea Mays
MATRASKNCLCAGSSSFDDPDVVEVSPATAAAAGWASGHHKRKRSQVVPQEVIEIDDDDPDGVILIGDKAQVEKNKQTAVCPMDCSKHAKSGWVQDIPGPSTYASKYTSSWVDLKVFQDEAVYNYSDGYPFDGFEEDYAYDEDEFEDDGYDTPLIESEFQFSLSAKFDNFNVLHGLEASLPWKHKTAIEIANKTKPSKAVDDKIEEKYKAFKRFDTVDDHSDHYYSKPESRKVQAVKKPSKDWVKRIQHEWKVLEKDLPETIFVRAYEDRMDLLRAVIMGPAGTPYHDGLFFFDIYFPPQYPNIPPMVNYRAGGLRLNPNLYACGKVCLSLLNTWTGSGCEKWNPANSTMLQPTGRRNP

SEQ ID NO: 187856 - protein, 178 aa, Zea Mays
MELIVCKLIKGDIRALEDLTYAKRKDFISQHKLPIDELPIISFHTEASTAPTALASLTRVAQAELLPWLPLPRFFLSASEFVESMLASLKVPVVAPVSAAMAVTALHLRLRYGERSDGLVTRRDAEVPGSVVVRPERRLDHAWMVYSTLKMGSAEADASEMCEALLAMLVEIGRKKFC

SEQ ID NO: 187857 - protein, 159 aa, Zea Mays
MLVRRLAFSVRDLWNLFSSEVHAKLTRILHRFWTTLQGSCEDIGWLQRTRASLRSVDGTGRFKEILHEIRNGVHCLPDTLIYLFIPGLFSNHSPLYFTNTKRFFSKMGLACHIAKIHSEASVEKNAWELKQYIEELYWGSEPIWWHPGRLRYPSRRPDR

SEQ ID NO: 187858 - protein, 148 aa, Zea Mays
MSATKTNGEDEGRSEAGCCYVKVSMDGAPYLRKVDLKTFSSYEDLSLALEKMFTCFITGQSGSCKTSRRERLTDGSRADALQDQEYVLTYEDKDADWMLVGDLPWDLFTTICGKLRIMRGSDAAGMAPRSPEQIVGTRIRNVARHAES

SEQ ID NO: 187859 - protein, 151 aa, Zea Mays
MASLAAVSVKPVAIKGLAGSSISGRKLAVARPSARSIRRPRAAAVVAKYGDKSVYFDLDDIGNTTGQWDLYGSDAPSPYNPLQASSSRRSRLRSPREVCCSSSCCWAAAHFWPTSARRRHRTSCRSRRDLRSRRSRARAARSKLSFSICMV

SEQ ID NO: 187860 - protein, 113 aa, Zea Mays
MRWHTVQTVQKKSSTRRFPIGFSAFAFNSTLLWDPQRWNRPPMDSVIIHTGGRGGLQESRFIEKLVKSERQIEGLPDNCNRVMVWNFNLEPPQLNYPAGWALYKNLEADMPVI

SEQ ID NO: 187861 - protein, 138 aa, Zea Mays
MCLGNLDHCIVWLQRYLKIDKSTRVVLIAVTCWAIWKTRNKMSFEKILIKSPNVIICHAGALILCWAGLSKKICRIFRRVLNFLSGLQVEGRSRAPMIKLMMRSNPGFQLRQRRLSVLCATAFWCYLSGFQPLCDCSM

SEQ ID NO: 187862 - protein, 196 aa, Zea Mays
MDSEHWISRLAAAKRFYAAQLGHSDRAGMDELEMDEEVRPEFPCPYCYEDHDVGSLCAHLEEEHPFEPQAAACPVCSEMVTKDMVNHITTQHGYLFKNRRRLRRFIIPGSQALSLLSRDLREAHLQVLLGGGGQRSSDNSSSSSATNISADPLLSSFGLGFPTSDAEQASKSTVSIPDDATTVKEAPAQYRFVAHK

SEQ ID NO: 187863 - protein, 77 aa, Zea Mays
MDSEHWISRLAAAKRFYAAQLGHSDRAGMDELEMDEEVRPEFPCPYCYEDHDVGSLCAHLEEEHPFEPQAALVGVDF

SEQ ID NO: 187864 - protein, 217 aa, Zea Mays
MGLDYYKILGVDKGATDDDLKKAYRKLAMKWHPDKNPNNKKEAENKFKQISEAYEVLSDPQKRAVYDQYGEEGLKGQVPPPGAGGAGPGGATFFSTGGDGPTVFRFNPRNAEDIFAEFFGGSSPFGGMGGGGMGGSGMGGGMPGMRSGGTRFSSSIFGDDIFGSAFGGGPDGHGMHAGGRAVKAPAIERKLPCSLEELYKGTTKKMKISREISDASG

SEQ ID NO: 187865 - protein, 1061 aa, Zea Mays
MKERGYTNRRSRHRLTPGTVKFAAFYVLSLEGSRGLTILEVAEKIQKSGLRDLTTSKTPEASVSAALSRDTKLFERTAPSTYCVKTPYRKDPDDSEAVLSAAREKIRVFQNTLSECEEVEKDVDEAERDEDSECDDATDDADGDDVNIEGKDAKSPLVGAQYDTQITVVGDVKKESNSVMNISVPPSIQIKSSASVPLHTLDSKASSSTDPQVGDDDKDTEIDESNQGESWVQGLAEGDYCDLSVDERLNAFVALIGVATEGNSIRAILEERLEAASALKKQMWAEAQLDKRRSRDDFTSKVQYDSCVGIKVDTDQKNNAAESTLVPVDNPIRNNNGNSSLTNNDLLVDKQNQLITGDVFQQWNGVSQELSTNPESLSVQQYASSEKTRSQLKSFIGHKAEQLYVYRSLPLGQDRRRNRYWQFSASSSSYDPGSGRVFFESRDGYWRVIDSSEAFEALVSSLDTRGIRESHLHSMLQSIEPTFREAVERKKCVSLEHTTGWTDNGSNESPNCNNEFGSPCSTLSGVASDNLMAYSDTFKIEIGHNEAEKSSISKRASVFLKWMWRECYCHQSTYTMKYGKKRCPELIQSCDHCYQIYLAEEQHCSSCHKSFKPIHNFLEHLSQCEDNQRTNPSWKTQIVGLSVPVGLRLLRLLLATIEASVPAEALLPFWTDLYRKSWGVKLYSASSAEEVLQMLSVLESAIKRDYLSSNFETTTELLNSNTQDATQNSVGGSGSATILPWVPDTTAAVALRLLDLDTSISYKLHSKLVSNKEQEAGDFMKLPLRYPSINKNKQEIEQFIPIGFDQQDGTLLTNSNGRRGRGRGGRGGRGSRGGSRGGSSRGGGGRVPRGIGSSSRIQFRDDNSVPYGRAPRKNVRGGRTRGRGRGRGLRTVRPRQPSEFSATSIPKLNLLGSFSMLSKANHTGNMHSPESLGAEEWVLERREYVKDDDDNLVSRYDESEEENGEPMNEEYDEQISGYPRDNSEFSPIQMMGDVSHDEDAEGDEGEEDGEDYETEDPAGDEDDDVEMDWDDDIRDNDDGNGAANADEDEGGTSSYSSEYSE

SEQ ID NO: 187866 - protein, 882 aa, Zea Mays
MNISVPPSIQIKSSASVPLHTLDSKASSSTDPQVGDDDKDTEIDESNQGESWVQGLAEGDYCDLSVDERLNAFVALIGVATEGNSIRAILEERLEAASALKKQMWAEAQLDKRRSRDDFTSKVQYDSCVGIKVDTDQKNNAAESTLVPVDNPIRNNNGNSSLTNNDLLVDKQNQLITGDVFQQWNGVSQELSTNPESLSVQQYASSEKTRSQLKSFIGHKAEQLYVYRSLPLGQDRRRNRYWQFSASSSSYDPGSGRVFFESRDGYWRVIDSSEAFEALVSSLDTRGIRESHLHSMLQSIEPTFREAVERKKCVSLEHTTGWTDNGSNESPNCNNEFGSPCSTLSGVASDNLMAYSDTFKIEIGHNEAEKSSISKRASVFLKWMWRECYCHQSTYTMKYGKKRCPELIQSCDHCYQIYLAEEQHCSSCHKSFKPIHNFLEHLSQCEDNQRTNPSWKTQIVGLSVPVGLRLLRLLLATIEASVPAEALLPFWTDLYRKSWGVKLYSASSAEEVLQMLSVLESAIKRDYLSSNFETTTELLNSNTQDATQNSVGGSGSATILPWVPDTTAAVALRLLDLDTSISYKLHSKLVSNKEQEAGDFMKLPLRYPSINKNKQEIEQFIPIGFDQQDGTLLTNSNGRRGRGRGGRGGRGSRGGSRGGSSRGGGGRVPRGIGSSSRIQFRDDNSVPYGRAPRKNVRGGRTRGRGRGRGLRTVRPRQPSEFSATSIPKLNLLGSFSMLSKANHTGNMHSPESLGAEEWVLERREYVKDDDDNLVSRYDESEEENGEPMNEEYDEQISGYPRDNSEFSPIQMMGDVSHDEDAEGDEGEEDGEDYETEDPAGDEDDDVEMDWDDDIRDNDDGNGAANADEDEGGTSSYSSEYSE

SEQ ID NO: 187867 - protein, 1426 aa, Zea Mays
MGYHDDDTYRVDRKRKHNEEAKTVREVEAHEKRIRKELEKQDLLNRKREEQMQRETERLGRERRKEEERLMRERQREEEKFQREQRRAHKRMEKFMQKQSIRAEKLRQKEELRREKEAAKQKAANERATARRIARESMELMEDERLELLELASRSKGLLSMVSLDSDTLQQLDSFRGMLGKFPPETVRLKVPFSIKPWADSEDIIGNLLMVWKFFVTFGDVLGLPSFTLDEFVQALHDYDSRLLGELHIALLKSIIKDIEDVARTPSVALGVNQSSSANPGGGHPQIVEGAYAWGINILNWQHHLNFLTWPEILRQFGLCAGFGPQLKKSNAEIVHHRDNNEVHNGVDVISILRNGSAAVKAAALMKERGYTNRRSRHRLTPGTVKFAAFYVLSLEGSRGLTILEVAEKIQKSGLRDLTTSKTPEASVSAALSRDTKLFERTAPSTYCVKTPYRKDPDDSEAVLSAAREKIRVFQNTLSECEEVEKDVDEAERDEDSECDDATDDADGDDVNIEGKDAKSPLVGAQYDTQITVVGDVKKESNSVMNISVPPSIQIKSSASVPLHTLDSKASSSTDPQVGDDDKDTEIDESNQGESWVQGLAEGDYCDLSVDERLNAFVALIGVATEGNSIRAILEERLEAASALKKQMWAEAQLDKRRSRDDFTSKVQYDSCVGIKVDTDQKNNAAESTLVPVDNPIRNNNGNSSLTNNDLLVDKQNQLITGDVFQQWNGVSQELSTNPESLSVQQYASSEKTRSQLKSFIGHKAEQLYVYRSLPLGQDRRRNRYWQFSASSSSYDPGSGRVFFESRDGYWRVIDSSEAFEALVSSLDTRGIRESHLHSMLQSIEPTFREAVERKKCVSLEHTTGWTDNGSNESPNCNNEFGSPCSTLSGVASDNLMAYSDTFKIEIGHNEAEKSSISKRASVFLKWMWRECYCHQSTYTMKYGKKRCPELIQSCDHCYQIYLAEEQHCSSCHKSFKPIHNFLEHLSQCEDNQRTNPSWKTQIVGLSVPVGLRLLRLLLATIEASVPAEALLPFWTDLYRKSWGVKLYSASSAEEVLQMLSVLESAIKRDYLSSNFETTTELLNSNTQDATQNSVGGSGSATILPWVPDTTAAVALRLLDLDTSISYKLHSKLVSNKEQEAGDFMKLPLRYPSINKNKQEIEQFIPIGFDQQDGTLLTNSNGRRGRGRGGRGGRGSRGGSRGGSSRGGGGRVPRGIGSSSRIQFRDDNSVPYGRAPRKNVRGGRTRGRGRGRGLRTVRPRQPSEFSATSIPKLNLLGSFSMLSKANHTGNMHSPESLGAEEWVLERREYVKDDDDNLVSRYDESEEENGEPMNEEYDEQISGYPRDNSEFSPIQMMGDVSHDEDAEGDEGEEDGEDYETEDPAGDEDDDVEMDWDDDIRDNDDGNGAANADEDEGGTSSYSSEYSE

SEQ ID NO: 187868 - protein, 696 aa, Zea Mays
MRECFTLVRPVNNEKDLQRLDQLPLSNFRPEFRSGLDAFTKFVLDRTRPKQLGATTMTGPILAGLTQSFLDAINNGAVPTISSSWQSVEEAECQRAFDSAVGTYNSSFDHKKHIEEDSLREAHEDAMRKAISAFNVSAVGAGRQLEHIDAERNALRLKCNSSDDKLALLRKQLEASESHRAEYVRRYEEVLNDKQKISKDYSIRITELQAKSSKLEQRCLSLSSSLETAKRESNDWKSKYDHGILQQKADESKLKSQIASLESRVSISEGRLSATREQADSAQEEASEWKRKYEVAVSEAKTALQRAAVAQERTNKKVQEREDALRVELANQLSEKEEEIARLHAKRSQMEIHATSLISRLEATEAKSKSHESDSLALREEIRLLTDNLESIRSEALSREKEVGILEQEKNHLEEKYLSQCKKFDETDIRCKEAEREAKRATELADVARVEASAAQKDKGEAQRLAMERFALIERMERQVEALERDKAKLVEEIERLHQSEKDAVSKVALLERNVGEREKEIDEMLKQNNQQRSSTVQVLESLLATEREARAEANKRAEELSLMLQATQGKLDMLQQETTLDSKLKTSARRLRGDATESVHDMDIDGDNGRRRKRSKSTTSPFKNNHTEDGGSVFIGEDTYNGSQQGTESEDYTKFTVLKLKQELTKHGFGAQLLQLKNPNKKDIVALYEKHVIGK

SEQ ID NO: 187869 - protein, 899 aa, Zea Mays
MLQMLGFRGGSPSTGDASPAISGDGGAAARPLRLVYCDDKGKFVMDPEAVAALQLVKGPVGVVSVCGRARQGKSFILNQLLGRSGGFQVASTHRPCTKGLWMWSAPLKRTGLDGTEYSLVLLDTEGIDAYDQTGTYSIQIFSLAVLLSSMFIYNQDFYLDLAEDNRKITPRDYLELALRPVQGGGRDISAKNAIRDSIRALFPDRECFTLVRPVNNEKDLQRLDQLPLSNFRPEFRSGLDAFTKFVLDRTRPKQLGATTMTGPILAGLTQSFLDAINNGAVPTISSSWQSVEEAECQRAFDSAVGTYNSSFDHKKHIEEDSLREAHEDAMRKAISAFNVSAVGAGRQLEHIDAERNALRLKCNSSDDKLALLRKQLEASESHRAEYVRRYEEVLNDKQKISKDYSIRITELQAKSSKLEQRCLSLSSSLETAKRESNDWKSKYDHGILQQKADESKLKSQIASLESRVSISEGRLSATREQADSAQEEASEWKRKYEVAVSEAKTALQRAAVAQERTNKKVQEREDALRVELANQLSEKEEEIARLHAKRSQMEIHATSLISRLEATEAKSKSHESDSLALREEIRLLTDNLESIRSEALSREKEVGILEQEKNHLEEKYLSQCKKFDETDIRCKEAEREAKRATELADVARVEASAAQKDKGEAQRLAMERFALIERMERQVEALERDKAKLVEEIERLHQSEKDAVSKVALLERNVGEREKEIDEMLKQNNQQRSSTVQVLESLLATEREARAEANKRAEELSLMLQATQGKLDMLQQETTLDSKLKTSARRLRGDATESVHDMDIDGDNGRRRKRSKSTTSPFKNNHTEDGGSVFIGEDTYNGSQQGTESEDYTKFTVLKLKQELTKHGFGAQLLQLKNPNKKDIVALYEKHVIGK

SEQ ID NO: 187870 - protein, 343 aa, Zea Mays
MQASTSMLEVKGEGILSWCADDNFILEDDLAPDFEVPFLSMDLNALANHLSKIRLSRRLFIEDDLFPEAMADASEDNEIAIELDTSVEIDAKGSSVGHNLNFEPRKDTSHHESASNICADDQIKTERQPQCFARENTASTKVSTHSVNSDSEDKSYKQVMDTDPGTSHSKGLMFEVGAAEEELDMLLDSFGGTHLSSSNLDEPFEPVSTLQEISRSNEKVGPSLSSGPPLLAPLDDALDDLLSETSHTAAQNEGFATQCITSQPTADSGQNTDFRYTKKIDVTPSIHDSVDDLLEDTSPCLNEPKQTTTAQASNSTPLDSVPIRSGPSNASASEDFDSWFDSL

SEQ ID NO: 187871 - protein, 303 aa, Zea Mays
MDLNALANHLSKIRLSRRLFIEDDLFPEAMADASEDNEIAIELDTSVEIDAKGSSVGHNLNFEPRKDTSHHESASNICADDQIKTERQPQCFARENTASTKVSTHSVNSDSEDKSYKQVMDTDPGTSHSKGLMFEVGAAEEELDMLLDSFGGTHLSSSNLDEPFEPVSTLQEISRSNEKVGPSLSSGPPLLAPLDDALDDLLSETSHTAAQNEGFATQCITSQPTADSGQNTDFRYTKKIDVTPSIHDSVDDLLEDTSPCLNEPKQTTTAQASNSTPLDSVPIRSGPSNASASEDFDSWFDSL

SEQ ID NO: 187872 - protein, 119 aa, Zea Mays
MSLLHLTLACRAGAADGDSTYNYTSLCWWAPAASRVWRRRGHATQRLSCGTWPAPRPRWLSLVTRLRRSPGVAVVSAPGFAAAARRRPPRTRVQGQGRAPFTCSILGPLISVLAAAPTE

SEQ ID NO: 187873 - protein, 280 aa, Zea Mays
MMEAKQAAPDRLSSLPAELQDEILIRLDLRDAVRTSALSRTWRDLWKSLSVISLSFPFGTHPSVVDSVLLRYIGPRVSLFRICVDDACADRIDDWLIALSRYRVESIDMCGTLRSLGNFNLYSSIFSLGDLVSLLLKNCRIPPLPVGFPGFPALQKLVLAYVIFPSNGFKQLEAIIRRSPLLHTLHMFDVFIPGEYPDSVIEAPNLRVLSIYSPYDYRWRFGELSCLEYANIHVFHCPQHEHDFGVFLARFAHVQKFGLFSPVHYFYFVLFIMCFVINQG

SEQ ID NO: 187874 - protein, 314 aa, Zea Mays
MMEAKQAAPDRLSSLPAELQDEILIRLDLRDAVRTSALSRTWRDLWKSLSVISLSFPFGTHPSVVDSVLLRYIGPRVSLFRICVDDACADRIDDWLIALSRYRVESIDMCGTLRSLGNFNLYSSIFSLGDLVSLLLKNCRIPPLPVGFPGFPALQKLVLAYVIFPSNGFKQLEAIIRRSPLLHTLHMFDVFIPGEYPDSVIEAPNLRVLSIYSPYDYRWRFGELSCLEYANIHVFHCPQHEHDFGVFLARFAHVQKFGLFSPAVDVKMPYTLPFTFYNLKKLQLCVDFNEIHSILSMFTMLRSCHNLQNLKIEL

SEQ ID NO: 187875 - protein, 409 aa, Zea Mays
MEAKQAAAAVDRLSSLPAELQDEILVRLDLRDAVRTSALSRTWRDLWKSLSVLSLSFPVGTQPSVVDSILLPYIGPRVSLFDFCVNEASVGRIDDWLVALSRCRVESIHISNRLGSCDYFNLHSSIFSLGDLVSLRLEGCNIPPLPVGFAGFPALQELDLAFVNFPSNEDKQLEAIIRRSPLLHTLFMCNVCIPDGYPDSVIEAPNLRVLSFVSEYDYGCRFGELPCLEYADIDALFCPQHEHDYGFFLARFAHVQRLTIFCPAADVNMPYTLPFTFYNLKNLELCLNFGEMDSILFMFTLLRSCRNLQGIEIESQDIDQSFEADWEFLNALWTHDMCSDLQTVHMMCISWLPNEISFMKLMLSKATVLRTLDVDRHPADFDDPIIDMLTCKRASAQARVLFGGLEQQW

SEQ ID NO: 187876 - protein, 51 aa, Zea Mays
MMRLVSACVCRRLSLDRLCFFQFTRMLTKTVLYSLSFFFLSPWVKTKRIKL

SEQ ID NO: 187877 - protein, 110 aa, Zea Mays
MIHGPCGDYNKNAPCMKDGRCTKKFPKKIQEETTIDGNGFVLYRRRNTGRYVTKSGIRLDNKYVVPSNLLLLKKYMGHINVEWCNKTIFIKYLFKYVTKGPDRSKVFLQR

SEQ ID NO: 187878 - protein, 63 aa, Zea Mays
MQAMGNENHTPSNRSSEIIQQSASTAMFTPKNICNVVVSKNATLAHQNRKRALEQKRLLTRGN

SEQ ID NO: 187879 - protein, 186 aa, Zea Mays
MEFFSEYGDANRYKIQEIIGKGSYGVVCSAIDQHTGEKVAIKKIQNIFEHLSDAARILREIKLLRLLRHPDIVEIKHVMLPPSRRDYRDIYVVFELMDTDLHQVIKANDDLTKEHHQFFLYQMLRALKYIHTANVYHRDLKPKNILANANCKLKICDFGLARVAFNDSHTTVFWTVCYFYSATMVD

SEQ ID NO: 187880 - protein, 127 aa, Zea Mays
MSISMRLAIPAPAVTAAAPTRLRVRAAAAGNRGSLSVARAAVRAETGALRGCASLPKKPLGAAQPCRSRGAAAVCHSSAHLSARTIQWISAGASAVLLVAKGTAIHKSFLVPFFALQAPCSIISWIK

SEQ ID NO: 187881 - protein, 176 aa, Zea Mays
MSISMRLAIPAPAVTAAAPTRLRVRAAAAGNRGSLSVARAAVRAETGALRGCASLPKKPLGAAQPCRSRGAAAVCHSSAHLSARTIQWISAGASAVLLVAKGTAIHKSFLVPFFALQAPCSIISWIKGDYGQWTAFLALLVRLFFFIPGELELPLSTMLLVSVAPYQFMDLRYGRF

SEQ ID NO: 187882 - protein, 139 aa, Zea Mays
MRLAAKEAAGSGPAVPEQRGRRRVSLVGAPQRAHHPVDLRRSQRDIRRYIFLLRNLRVLLVAKGTAIHKSFLVPFFALQAPCSIISWIKGDYGQWTAFLALLVRLFFFIPGRVANMVHIRVLFRFILSANNQMCTSFLR

SEQ ID NO: 187883 - protein, 98 aa, Zea Mays
MHRTVRDGKLPVAATTQSTGYFQVLGLLAYRSVCRQNKEKKRFRSSSLPFPKDDALTIHERRLRIDRASSPAPASLPVRFKQGTIRIGQEMDIKSSEN

SEQ ID NO: 187884 - protein, 389 aa, Zea Mays
MRHSKLCGFSDDALEFQRKILERSGLSEETYVPEAMHALPPQPTMANARAEAETVMFGALDSLFRSTGVRPKDVGVLVVNCSLFNPTPSLSAMIVNKYKLRGNVRSFNLGGMGCSAGVIAVDLARDMLQVHRGTYAVVVSTENITQNWYFGNRKSMLIPNCLFRVGGAAVLLSNRGGDRRRAKYVLRHVVRTHKGADDRAFNCVYQEQDGEGKTGVSLSKDLMAIAGGALKTNITTLGPLVLPVSEQLLFFATLVAKKLLVSAKTKPYIPDFKLAFEHFCIHAGGRAVIDELEKNLQLSPAHVEASRMTLHRFGNTSSSSIWYELAYMEAKGRVRRGHRVWQIAFGSGFKCNSAVWHALRNVKPSPDSPWEDCIDRYPVELVDGFPAHQ

SEQ ID NO: 187885 - protein, 569 aa, Zea Mays
MASEMSKNVKALDEQEVTSQHSRAQTSAAAEEQQQQQAVDPLARQSSIMSLTLEELQNSLCEPGRNFGSMNMDEFMANIWNTEEFQAATAGCNKEGAYREPVPVATTTGTTVHKQKLEASRSTHQLGDDGARNEIHDYTSREEVRRASRKAPSKQRHCTRSCNASASTHHRPPARSLHSPPPARTNNSSPMSAAASSATACFLSPLPPPRRPRHFLRHLARAAVTKPEPASASSLALPSPWLWARRLCELVPAEAGGRLLSSAAGSLIVALASASLVLGDTGAASAFVVSTPRKLQADELATVRLFQENTPSVVYITNLAVRQDAFTLDVLEVPQGSGSGFVWDKSGHIVTNFHVIRGASDLRVTLADQSVYEAQVVGFDQDKDVAVLGIKAPKNKLRPIPVGVSADLLVGQKVYAIGNPFGLDHTLTTGVISGLRREISSAATGRPIQDVIQTDAAINPGNSGGPLLDSSGNLIGVNTAIYSPSGASSGVGFSIPVDTVGGIVDQLIKFGRVTRPILGIKFAPDQSVEQLGLSGVLVLDAPPNGPAGKAVRVCKQPNEIPMAGLSWAI

SEQ ID NO: 187886 - protein, 370 aa, Zea Mays
MASEMSKNVKALDEQEVTSQHSRAQTSAAAEEQQQQQAVDPLARQSSIMSLTLEELQNSLCEPGRNFGSMNMDEFMANIWNTEEFQAATAGCNKEGAYREPVPVATTTGTTVHKQKLEASRSTHQLGDDGARNEIHDYTSREEVRRASRKAPSKQRHCTRSCNASASTHHRPPARSLHSPPPARTNNSSPMSAAASSATACFLSPLPPPRRPRHFLRHLARAAVTKPEPASASSLALPSPWLWARRLCELVPAEAGGRLLSSAAGSLIVALASASLVLGDTGAASAFVVSTPRKLQADELATVRLFQENTPSVVYITNLAVRQDAFTLDVLEVPQGSGSGFVWDKSGHIVTNFHVIRGASDLSFMQGDTC

SEQ ID NO: 187887 - protein, 1069 aa, Zea Mays
MTNDKCDKLQTLFSEDDWKLVQLVLTLFRNVLAIQEITLTQKASGEATHLLFLSDNFLELMFQENVMDIILVLTQHIDEPSGYLKEENLLLMEIYHYLFLGRDPGLIARASNKGLKDGSKSLCKGNPSSASANSLLKIRNVQRGPQKRIAWDNELLYVPKEGITEMLRSFMDQFLSGAYNILMQSVCGDIMDEHHSIEKSDITTFFKVARFVLAFQHEKASNDQKSAKGIQPSGVSPSNEPDDNLPFHGDICGPVAATLNEDMFNIVISRWRETYEALKETNDYKTLSAAGSLMKNMIDMIYLVLKVLPEDSRESQTARVLLYKLFYDQTEHGLTQFLLNLFRSFDSHKQPKSDLVDLLETIHIMLQLMEKLQARGALRVAKKTKKVRRKKSTNDKKENSEPKVDNAEPNDANPTDGTKCSPETLPDLRSEGPALESSPSEPGKVDTSGAHVLDTLVDTVVNIESTAHAEGDPSCTDSGVMKRNLIEEEGETSDSSVDHQPATSEVDFNVSRLISSLANNSVVQNICWLLKHYKSNSYRTNHYIICMLRRFCEDLELSPMLYQLSLLTTFYDILAEQKLSSSKEYTNIVNFLSKVVRKMLRTIKKQPLLFVDILFWKTRKECHCIDADALLNELKNDVGSKDSEIGSSKGWRDRINIADSLGDDEVDVVIPQAPYDADKDGDLSAGEHTDDFRKSSTKYKRSRLSLSDSEADEIERNHVSRDSVPKVPKRRGRSLFTEEQERLIRDLYEKYKDGPKCSHIIAESLDPSGKISSAQVSRKLTQLGLRNVTRRKKVAGEQNHGSKAKSSRPRRKKLHTASDDHDDTSQRKSSDEDTLQVLKSRSKSKKVPLVDSSLSGSQHQEAQHDPDSDDATIGSMIRSRKKKRLSTSDFEGNVRNHQESSDNTKAKDCSPIISQHEKALQDIYPDDETIGSIIRSVKKKRSVTSNFSANIEAQESLRNINLQDETVVSNIMDASVNHGSDPVNNSDNTVEDELLDDFETELVNNGGNTVEAELLDDFEVELDDHEHTDQRITDDEIMTESGKATNSDAKGRAGLKRRHRMVIDDEDDD

SEQ ID NO: 187888 - protein, 866 aa, Zea Mays
MTNDKCDKLQTLFSEDDWKLVQLVLTLFRNVLAIQEITLTQKASGEATHLLFLSDNFLELMFQENVMDIILVLTQHIDEPSGYLKEENLLLMEIYHYLFLGRDPGLIARASNKGLKDGSKSLCKGNPSSASANSLLKIRNVQRGPQKRIAWDNELLYVPKEGITEMLRSFMDQFLSGAYNILMQSVCGDIMDEHHSIEKSDITTFFKVARFVLAFQHEKASNDQKSAKGIQPSGVSPSNEPDDNLPFHGDICGPVAATLNEDMFNIVISRWRETYEALKETNDYKTLSAAGSLMKNMIDMIYLVLKVLPEDSRESQTARVLLYKLFYDQTEHGLTQFLLNLFRSFDSHKQPKSDLVDLLETIHIMLQLMEKLQARGALRVAKKTKKVRRKKSTNDKKENSEPKVDNAEPNDANPTDGTKCSPETLPDLRSEGPALESSPSEPGKVDTSGAHVLDTLVDTVVNIESTAHAEGDPSCTDSGVMKRNLIEEEGETSDSSVDHQPATSEVDFNVSRLISSLANNSVVQNICWLLKHYKSNSYRTNHYIICMLRRFCEDLELSPMLYQLSLLTTFYDILAEQKLSSSKEYTNIVNFLSKVVRKMLRTIKKQPLLFVDILFWKTRKECHCIDADALLNELKNDVGSKDSEIGSSKGWRDRINIADSLGDDEVDVVIPQAPYDADKDGDLSAGEHTDDFRKSSTKYKRSRLSLSDSEADEIERFLNHVSRDSVPKVPKRRGRSLFTEEQERLIRDLYEKYKDGPKCSHIIAESLDPSGKISSAQVSRKLTQLGLRNVTRRKKVAGESLSTGDRTIEQQDNSLDDLNPMLGEQNHGSKAKSSRPRRKKLHTASDDHDDTSQRKSSDEDTLQIKK

SEQ ID NO: 187889 - protein, 1141 aa, Zea Mays
MTNDKCDKLQTLFSEDDWKLVQLVLTLFRNVLAIQEITLTQKASGEATHLLFLSDNFLELMFQENVMDIILVLTQHIDEPSGYLKEENLLLMEIYHYLFLGRDPGLIARASNKGLKDRVNGDIVSSVDSLRLMMEEEERKKRMFRQLNSEHSSLSGTFTCFSVDGSKSLCKGNPSSASANSLLKIRNVQRGPQKRIAWDNELLYVPKEGITEMLRSFMDQFLSGAYNILMQSVCGDIMDEHHSIEKSDITTFFKVARFVLAFQHEKASNDQKSAKGIQPSGVSPSNEPDDNLPFHGDICGPVAATLNEDMFNIVISRWRETYEALKETNDYKTLSAAGSLMKNMIDMIYLVLKVLPEDSRESQTARVLLYKLFYDQTEHGLTQFLLNLFRSFDSHKQPKSDLVDLLETIHIMLQLMEKLQARGALRVAKKTKKVRRKKSTNDKKENSEPKVDNAEPNDANPTDGTKCSPETLPDLRSEGPALESSPSEPGKVDTSGAHVLDTLVDTVVNIESTAHAEGDPSCTDSGVMKRNLIEEEGETSDSSVDHQPATSEVDFNVSRLISSLANNSVVQNICWLLKHYKSNSYRTNHYIICMLRRFCEDLELSPMLYQLSLLTTFYDILAEQKLSSSKEYTNIVNFLSKVVRKMLRTIKKQPLLFVDILFWKTRKECHCIDADALLNELKNDVGSKDSEIGSSKGWRDRINIADSLGDDEVDVVIPQAPYDADKDGDLSAGEHTDDFRKSSTKYKRSRLSLSDSEADEIERNHVSRDSVPKVPKRRGRSLFTEEQERLIRDLYEKYKDGPKCSHIIAESLDPSGKISSAQVSRKLTQLGLRNVTRRKKVAGESLSTGDRTIEQQDNSLDDLNPMLGEQNHGSKAKSSRPRRKKLHTASDDHDDTSQRKSSDEDTLQVLKSRSKSKKVPLVDSSLSGSQHQEAQHDPDSDDATIGSMIRSRKKKRLSTSDFEGNVRNHQESSDNTKAKDCSPIISQHEKALQDIYPDDETIGSIIRSVKKKRSVTSNFSANIEAQESLRNINLQDETVVSNIMDASVNHGSDPVNNSDNTVEDELLDDFETELVNNGGNTVEAELLDDFEVELDDHEHTDQRITDDEIMTESGKATNSDAKGRAGLKRRHRMVIDDEDDD

SEQ ID NO: 187890 - protein, 1034 aa, Zea Mays
MTNDKCDKLQTLFSEDDWKLVQLVLTLFRNVLAIQEITLTQKASGEATHLLFLSDNFLELMFQENVMDIILVLTQHIDEPSGYLKEENLLLMEIYHYLFLGRDPGLIARASNKGLKDGSKSLCKGNPSSASANSLLKIRNVQRGPQKRIAWDNELLYVPKEGITEMLRSFMDQFLSGAYNILMQSVCGDIMDEHHSIEKSDITTFFKVARFVLAFQHEKASNDQKSAKGIQPSGVSPSNEPDDNLPFHGDICGPVAATLNEDMFNIVISRWRETYEALKETNDYKTLSAAGSLMKNMGSHFNLDSLSSYLKVYKKTRSVGHLALQIDMIYLVLKVLPEDSRESQTARVLLYKLFYDQTEHGLTQFLLNLFRSFDSHKQPKSDLVDLLETIHIMLQLMEKLQARGALRVAKKTKKVRRKKSTNDKKENSEPKVDNAEPNDANPTDGTKCSPETLPDLRSEGPALESSPSEPGKVDTSGAHVLDTLVDTVVNIESTAHAEGDPSCTDSGVMKRNLIEEEGETSDSSVDHQPATSEVDFNVSRLISSLANNSVVQNICWLLKHYKSNSYRTNHYIICMLRRFCEDLELSPMLYQLSLLTTFYDILAEQKLSSSKEYTNIVNFLSKVVRKMLRTIKKQPLLFVDILFWKTRKECHCIDADALLNELKNDVGSKDSEIGSSKGWRDRINIADSLGDDEVDVVIPQAPYDADKDGDLSAGEHTDDFRKSSTKYKRSRLSLSDSEADEIERFLNHVSRDSVPKVPKRRGRSLFTEEQERLIRDLYEKYKDGPKCSHIIAESLDPSGKISSAQVSRKLTQLGLRNVTRRKKVAGESLSTGDRTIEQQDNSLDDLNPMLGEQNHGSKAKSSRPRRKKLHTASDDHDDTSQRKSSDEDTLQVLKSRSKSKKVPLVDSSLSGSQHQEAQHDPDSDDATIGSMIRSRKKKRLSTSDFEGNVRNHQESSDNTKAKDCSPIISQHEKALQDIYPDDETIGSIIRSVKKKRSVTSNFSANIEAQESLRNINLQDETVVSNIMESNKLRC

SEQ ID NO: 187891 - protein, 1113 aa, Zea Mays
MTNDKCDKLQTLFSEDDWKLVQLVLTLFRNVLAIQEITLTQKASGEATHLLFLSDNFLELMFQENVMDIILVLTQHIDEPSGYLKEENLLLMEIYHYLFLGRDPGLIARASNKGLKDGSKSLCKGNPSSASANSLLKIRNVQRGPQKRIAWDNELLYVPKEGITEMLRSFMDQFLSGAYNILMQSVCGDIMDEHHSIEKSDITTFFKVARFVLAFQHEKASNDQLPQLYLGLFVMNIITMSIQKSAKGIQPSGVSPSNEPDDNLPFHGDICGPVAATLNEDMFNIVISRWRETYEALKETNDYKTLSAAGSLMKNMIDMIYLVLKVLPEDSRESQTARVLLYKLFYDQTEHGLTQFLLNLFRSFDSHKQPKSDLVDLLETIHIMLQLMEKLQARGALRVAKKTKKVRRKKSTNDKKENSEPKVDNAEPNDANPTDGTKCSPETLPDLRSEGPALESSPSEPGKVDTSGAHVLDTLVDTVVNIESTAHAEGDPSCTDSGVMKRNLIEEEGETSDSSVDHQPATSEVDFNVSRLISSLANNSVVQNICWLLKHYKSNSYRTNHYIICMLRRFCEDLELSPMLYQLSLLTTFYDILAEQKLSSSKEYTNIVNFLSKVVRKMLRTIKKQPLLFVDILFWKTRKECHCIDADALLNELKNDVGSKDSEIGSSKGWRDRINIADSLGDDEVDVVIPQAPYDADKDGDLSAGEHTDDFRKSSTKYKRSRLSLSDSEADEIERNHVSRDSVPKVPKRRGRSLFTEEQERLIRDLYEKYKDGPKCSHIIAESLDPSGKISSAQVSRKLTQLGLRNVTRRKKVAGESLSTGDRTIEQQDNSLDDLNPMLGEQNHGSKAKSSRPRRKKLHTASDDHDDTSQRKSSDEDTLQVLKSRSKSKKVPLVDSSLSGSQHQEAQHDPDSDDATIGSMIRSRKKKRLSTSDFEGNVRNHQESSDNTKAKDCSPIISQHEKALQDIYPDDETIGSIIRSVKKKRSVTSNFSANIEAQESLRNINLQDETVVSNIMDASVNHGSDPVNNSDNTVEDELLDDFETELVNNGGNTVEAELLDDFEVELDDHEHTDQRITDDEIMTESGKATNSDAKGRAGLKRRHRMVIDDEDDD

SEQ ID NO: 187892 - protein, 1096 aa, Zea Mays
MTNDKCDKLQTLFSEDDWKLVQLVLTLFRNVLAIQEITLTQKASGEATHLLFLSDNFLELMFQENVMDIILVLTQHIDEPSGYLKEENLLLMEIYHYLFLGRDPGLIARASNKGLKDGSKSLCKGNPSSASANSLLKIRNVQRGPQKRIAWDNELLYVPKEGITEMLRSFMDQFLSGAYNILMQSVCGDIMDEHHSIEKSDITTFFKVARFVLAFQHEKASNDQKSAKGIQPSGVSPSNEPDDNLPFHGDICGPVAATLNEDMFNIVISRWRETYEALKETNDYKTLSAAGSLMKNMIDMIYLVLKVLPEDSRESQTARVLLYKLFYDQTEHGLTQFLLNLFRSFDSHKQPKSDLVDLLETIHIMLQLMEKLQARGALRVAKKTKKVRRKKSTNDKKENSEPKVDNAEPNDANPTDGTKCSPETLPDLRSEGPALESSPSEPGKVDTSGAHVLDTLVDTVVNIESTAHAEGDPSCTDSGVMKRNLIEEEGETSDSSVDHQPATSEVDFNVSRLISSLANNSVVQNICWLLKHYKSNSYRTNHYIICMLRRFCEDLELSPMLYQLSLLTTFYDILAEQKLSSSKEYTNIVNFLSKVVRKMLRTIKKQPLLFVDILFWKTRKECHCIDADALLNELKNDVGSKDSEIGSSKGWRDRINIADSLGDDEVDVVIPQAPYDADKDGDLSAGEHTDDFRKSSTKYKRSRLSLSDSEADEIERFLNHVSRDSVPKVPKRRGRSLFTEEQERLIRDLYEKYKDGPKCSHIIAESLDPSGKISSAQVSRKLTQLGLRNVTRRKKVAGESLSTGDRTIEQQDNSLDDLNPMLGEQNHGSKAKSSRPRRKKLHTASDDHDDTSQRKSSDEDTLQVLKSRSKSKKVPLVDSSLSGSQHQEAQHDPDSDDATIGSMIRSRKKKRLSTSDFEGNVRNHQESSDNTKAKDCSPIISQHEKALQDIYPDDETIGSIIRSVKKKRSVTSNFSANIEAQESLRNINLQDETVVSNIMDASVNHGSDPVNNSDNTVEDELLDDFETELVNNGGNTVEAELLDDFEVELDDHEHTDQRITDDEIMTESGKATNSDAKGRAGLKRRHRMVIDDEDDD

SEQ ID NO: 187893 - protein, 1143 aa, Zea Mays
MTNDKCDKLQTLFSEDDWKLVQLVLTLFRNVLAIQEITLTQKASGEATHLLFLSDNFLELMFQENVMDIILVLTQHIDEPSGYLKEENLLLMEIYHYLFLGRDPGLIARASNKGLKDRVNGDIVSSVDSLRLMMEEEERKKRMFRQLNSEHSSLSGTFTCFSVDGSKSLCKGNPSSASANSLLKIRNVQRGPQKRIAWDNELLYVPKEGITEMLRSFMDQFLSGAYNILMQSVCGDIMDEHHSIEKSDITTFFKVARFVLAFQHEKASNDQKSAKGIQPSGVSPSNEPDDNLPFHGDICGPVAATLNEDMFNIVISRWRETYEALKETNDYKTLSAAGSLMKNMIDMIYLVLKVLPEDSRESQTARVLLYKLFYDQTEHGLTQFLLNLFRSFDSHKQPKSDLVDLLETIHIMLQLMEKLQARGALRVAKKTKKVRRKKSTNDKKENSEPKVDNAEPNDANPTDGTKCSPETLPDLRSEGPALESSPSEPGKVDTSGAHVLDTLVDTVVNIESTAHAEGDPSCTDSGVMKRNLIEEEGETSDSSVDHQPATSEVDFNVSRLISSLANNSVVQNICWLLKHYKSNSYRTNHYIICMLRRFCEDLELSPMLYQLSLLTTFYDILAEQKLSSSKEYTNIVNFLSKVVRKMLRTIKKQPLLFVDILFWKTRKECHCIDADALLNELKNDVGSKDSEIGSSKGWRDRINIADSLGDDEVDVVIPQAPYDADKDGDLSAGEHTDDFRKSSTKYKRSRLSLSDSEADEIERFLNHVSRDSVPKVPKRRGRSLFTEEQERLIRDLYEKYKDGPKCSHIIAESLDPSGKISSAQVSRKLTQLGLRNVTRRKKVAGESLSTGDRTIEQQDNSLDDLNPMLGEQNHGSKAKSSRPRRKKLHTASDDHDDTSQRKSSDEDTLQVLKSRSKSKKVPLVDSSLSGSQHQEAQHDPDSDDATIGSMIRSRKKKRLSTSDFEGNVRNHQESSDNTKAKDCSPIISQHEKALQDIYPDDETIGSIIRSVKKKRSVTSNFSANIEAQESLRNINLQDETVVSNIMDASVNHGSDPVNNSDNTVEDELLDDFETELVNNGGNTVEAELLDDFEVELDDHEHTDQRITDDEIMTESGKATNSDAKGRAGLKRRHRMVIDDEDDD

SEQ ID NO: 187894 - protein, 890 aa, Zea Mays
MTNDKCDKLQTLFSEDDWKLVQLVLTLFRNVLAIQEITLTQKASGEATHLLFLSDNFLELMFQENVMDIILVLTQHIDEPSGYLKEENLLLMEIYHYLFLGRDPGLIARASNKGLKDRVNGDIVSSVDSLRLMMEEEERKKRMFRQLNSEHSSLSGTFTCFSVDGSKSLCKGNPSSASANSLLKIRNVQRGPQKRIAWDNELLYVPKEGITEMLRSFMDQFLSGAYNILMQSVCGDIMDEHHSIEKSDITTFFKVARFVLAFQHEKASNDQKSAKGIQPSGVSPSNEPDDNLPFHGDICGPVAATLNEDMFNIVISRWRETYEALKETNDYKTLSAAGSLMKNMIDMIYLVLKVLPEDSRESQTARVLLYKLFYDQTEHGLTQFLLNLFRSFDSHKQPKSDLVDLLETIHIMLQLMEKLQARGALRVAKKTKKVRRKKSTNDKKENSEPKVDNAEPNDANPTDGTKCSPETLPDLRSEGPALESSPSEPGKVDTSGAHVLDTLVDTVVNIESTAHAEGDPSCTDSGVMKRNLIEEEGETSDSSVDHQPATSEVDFNVSRLISSLANNSVVQNICWLLKHYKSNSYRTNHYIICMLRRFCEDLELSPMLYQLSLLTTFYDILAEQKLSSSKEYTNIVNFLSKVVRKMLRTIKKQPLLFVDILFWKTRKECHCIDADALLNELKNDVGSKDSEIGSSKGWRDRINIADSLGDDEVDVVIPQAPYDADKDGDLSAGEHTDDFRKSSTKYKRSRLSLSDSEADEIERFLNHVSRDSVPKVPKRRGRSLFTEEQERLIRDLYEKYKDGPKCSHIIAESLDPSGKISSAQVSRKLTQLGLRNVTRRKKVAGPEGKNYTRQVMTMMTQVRENHLMKTHYKYLKADQKVRKFHWWIVH

SEQ ID NO: 187895 - protein, 1160 aa, Zea Mays
MTNDKCDKLQTLFSEDDWKLVQLVLTLFRNVLAIQEITLTQKASGEATHLLFLSDNFLELMFQENVMDIILVLTQHIDEPSGYLKEENLLLMEIYHYLFLGRDPGLIARASNKGLKDRVNGDIVSSVDSLRLMMEEEERKKRMFRQLNSEHSSLSGTFTCFSVDGSKSLCKGNPSSASANSLLKIRNVQRGPQKRIAWDNELLYVPKEGITEMLRSFMDQFLSGAYNILMQSVCGDIMDEHHSIEKSDITTFFKVARFVLAFQHEKASNDQLPQLYLGLFVMNIITMSIQKSAKGIQPSGVSPSNEPDDNLPFHGDICGPVAATLNEDMFNIVISRWRETYEALKETNDYKTLSAAGSLMKNMIDMIYLVLKVLPEDSRESQTARVLLYKLFYDQTEHGLTQFLLNLFRSFDSHKQPKSDLVDLLETIHIMLQLMEKLQARGALRVAKKTKKVRRKKSTNDKKENSEPKVDNAEPNDANPTDGTKCSPETLPDLRSEGPALESSPSEPGKVDTSGAHVLDTLVDTVVNIESTAHAEGDPSCTDSGVMKRNLIEEEGETSDSSVDHQPATSEVDFNVSRLISSLANNSVVQNICWLLKHYKSNSYRTNHYIICMLRRFCEDLELSPMLYQLSLLTTFYDILAEQKLSSSKEYTNIVNFLSKVVRKMLRTIKKQPLLFVDILFWKTRKECHCIDADALLNELKNDVGSKDSEIGSSKGWRDRINIADSLGDDEVDVVIPQAPYDADKDGDLSAGEHTDDFRKSSTKYKRSRLSLSDSEADEIERNHVSRDSVPKVPKRRGRSLFTEEQERLIRDLYEKYKDGPKCSHIIAESLDPSGKISSAQVSRKLTQLGLRNVTRRKKVAGESLSTGDRTIEQQDNSLDDLNPMLGEQNHGSKAKSSRPRRKKLHTASDDHDDTSQRKSSDEDTLQVLKSRSKSKKVPLVDSSLSGSQHQEAQHDPDSDDATIGSMIRSRKKKRLSTSDFEGNVRNHQESSDNTKAKDCSPIISQHEKALQDIYPDDETIGSIIRSVKKKRSVTSNFSANIEAQESLRNINLQDETVVSNIMDASVNHGSDPVNNSDNTVEDELLDDFETELVNNGGNTVEAELLDDFEVELDDHEHTDQRITDDEIMTESGKATNSDAKGRAGLKRRHRMVIDDEDDD

SEQ ID NO: 187896 - protein, 527 aa, Zea Mays
MWKYVREILGCDLINGGQDLSLLDEAPVSIGEDDTESSLLLNFLSQLKEEKAMQSAKLSAELGSLQTDITEVDKRHSARMRLSLDDTDVLPSSSALSGASVSALQGALLSGLLPASYKSSIYEERVMRNLVQLENAYYSMRSSLDTCETNVIKRPDNEALRARENFHQLHSDSDAKDEKTDRLGCFFDGLCKYARHNRFEVRGILKNADILNSPNVICSLSFDRDEEYFAAAGVSKKIKIFEFDALLNDRVDIHYPLIEMPSKSKLSCVCWNNYIKNYLASTDYDGTVQLWDASSGQGFTQFTEHRKRTWSVSFSDVDPTKLASGSDDCCVKVWSINQKNCVDTIRNVANVCCVQFSPYSSRMLAFGSADYKIYCYDLRNTRIPWCTILGHGKAVSYVRFLDPYTLVSASTDNTLKIWDLNQTNCSGLSTDSCSLTLNGHTNEKNFVGLSVHDGYITCGSETNEVFSYYKTFPMPITSHRFGSIDPITGQVTNEDNQQFVSSVCWRGKSNMVVAANSSGSIKVLELV

SEQ ID NO: 187897 - protein, 475 aa, Zea Mays
MQSAKLSAELGSLQTDITEVDKRHSARMRLSLDDTDVLPSSSALSGASVSALQGALLSGLLPASYKSSIYEERVMRNLVQLENAYYSMRSSLDTCETNVIKRPDNEALRARENFHQLHSDSDAKDEKTDRLGCFFDGLCKYARHNRFEVRGILKNADILNSPNVICSLSFDRDEEYFAAAGVSKKIKIFEFDALLNDRVDIHYPLIEMPSKSKLSCVCWNNYIKNYLASTDYDGTVQLWDASSGQGFTQFTEHRKRTWSVSFSDVDPTKLASGSDDCCVKVWSINQKNCVDTIRNVANVCCVQFSPYSSRMLAFGSADYKIYCYDLRNTRIPWCTILGHGKAVSYVRFLDPYTLVSASTDNTLKIWDLNQTNCSGLSTDSCSLTLNGHTNEKNFVGLSVHDGYITCGSETNEVFSYYKTFPMPITSHRFGSIDPITGQVTNEDNQQFVSSVCWRGKSNMVVAANSSGSIKVLELV

SEQ ID NO: 187898 - protein, 1100 aa, Zea Mays
MEGTAAEVGGAGADAAGDVQIKGAKENAQPTAAQQQQPSGSEALEMPATPLQRDIDWSEHFSFFTSLGGFGGSSDGARGLTSVGLSNSESRPDSVAQRGLDHDTEERVEELTLKNCINTGIQPEVSAGGSTSSRDRPTRIKGLWGNFTRIARRTSDLASRENTALSSGDIANLRAGDASSMEKLATSLASNIISRNNNASGNEAPMSHVGYVNNEFMMCSQQILLSPWSNQDNALKVSSFSNRILNRMRSKTVAPSSRVLRSPLQIKSKGKGVVCQGAREEIQVQANARPRDPLDKIPTIPSSIHDCMARVDHMLFSTGGNVTKSHSEGSSLRELIKPGWQTMTKFEKMHLFKQIIDLVDKCHAQGFTLQHLRPSYFMVLSSNQVKYIGSYTTQDLPTSIKQEVAREDLVNRKRTFGQRIDHQESNDHGNLTLKYQKVDEQGSVAIRQPANTFWTDKICDNQNEDVNRGVLRQENFSHTAREGFKLVEPYGSNISCAQHVSSSATQQPAFELRNLEESWYKSPEELSQFKGTFPSNIYSLGVLLFELFCCSETWEVHCAAMSNLRQRILPPNFLSESPKEAGFCLWLLHPDPCSRPKAKEILGCDLINGGQDLSLLDEAPVSIGEDDTESSLLLNFLSQLKEEKAMQSAKLSAELGSLQTDITEVDKRHSARMRLSLDDTDVLPSSSALSGASVSALQGALLSGLLPASYKSSIYEERVMRNLVQLENAYYSMRSSLDTCETNVIKRPDNEALRARENFHQLHSDSDAKDEKTDRLGCFFDGLCKYARHNRFEVRGILKNADILNSPNVICSLSFDRDEEYFAAAGVSKKIKIFEFDALLNDRVDIHYPLIEMPSKSKLSCVCWNNYIKNYLASTDYDGTVQLWDASSGQGFTQFTEHRKRTWSVSFSDVDPTKLASGSDDCCVKVWSINQKNCVDTIRNVANVCCVQFSPYSSRMLAFGSADYKIYCYDLRNTRIPWCTILGHGKAVSYVRFLDPYTLVSASTDNTLKIWDLNQTNCSGLSTDSCSLTLNGHTNEKVFSYYKTFPMPITSHRFGSIDPITGQVTNEDNQQFVSSVCWRGKSNMVVAANSSGSIKVLELV

SEQ ID NO: 187899 - protein, 167 aa, Zea Mays
MLATTCSRPPCPCPCARSRRLPAATFGGTSSAKRRAPRRAAAAVRCGLLPVDPWAPTMDSQSVASQLFAVSLFPYLGFLYFMTRSKTAPGLTLFGFYFLLVFVGATIHYGTSLSNVDWLHGGAESLLTLTNLFIVLGLRGALRKLEEEGTDEIVSEASQDSAEKSSV

SEQ ID NO: 187900 - protein, 605 aa, Zea Mays
MKYVLVTGGVVSGLGKGVTASSVGVVLKSCGLRVTSIKIDPYLNIDAGTMSPLEHGEVFVLDDGGEVDLDLGNYERFLDIKLTRDNNITTGKIYQSVIDKERRGDYLGKTVQVVPHITDEIQEWIERVAMNPVDGTEEPADVCVIELGGTIGDIESMPFIEALGQFSYRVGPGNFCLVHVSLVPVLNVVGEQKTKPTQHSVRGLRGLGLMPDILACRSTQPLEEHVKVKLAQFCHVPISNIINLRDVTNIWHIPLLLRDQKAHEAILKVLDIQCVGKVAREPQLSEWTERASRCDRLKSPVRIAMVGKYTGLSDSYLSVIKALLHASVALDRKLVVDWVPSCDLEDSAAEENLDAYEKAWELLKGADGVLVPGGFGDRGVQGKILAAKYARENNIPYLGICLGMQIAVIEFARSIMKLHGANSTEFDPTTKTPCVIFMPEGSKTHMGATMRLGSRRTFFQVTNCKSAKLYGNASYVDERHRHRYEVNPDMVPEFEKAGLSFVGRDESGKRMEIIELPTHRFFVGAQFHPEFKSRPGKPSPLFLGLVAASSGQLDHLLQPGLISSTGRHTCSKGGAQKLKAGHVMKPLNGLVNAHYSATGNGAIPI

SEQ ID NO: 187901 - protein, 675 aa, Zea Mays
MVAGRVKAAMGFQRSPATPKPGASSSSSSSRKAPPPLQLPGSAALPETPRRRSSGSPAPPGSGSKGGGGPFSRYFPRSSAQVQPARASGQPEPPPPPPPPPSCPGPAAAADLARLVEELRERESRLRTELLEHKILKETVAIVPFLETELAAKSSDLGRCRDALSRLEAENASLRAELHAARGSQQRVVQLEKELAEVKRHRRRDSGPDADRHDDDCSSSVSSHNSDSDRSNAPTNAVVPGLLIVPPPAPPPPPPPPPPPSYKSRSYFSASSRASPANSSSSSSTSSAPSTPTYSSDTAASRNRVPELSQLPPIPAPPPPPPPPPPPAMPARGRRSACSSPSTSSGSSGGGCGRGSGPPAPPPPPPPAARRSSRASSPAASGTAPAPAPCVRRVPEVVEFYHSLMRRDSRSRDAAAAAEAGASGGAAAARDMIGEIENRSSHLLAIKSDVERQGDFIRFLIKEVQGAAFVDIEDVVTFVKWLDVELSRLVDERAVLKHFDWPEGKADALREAAFGYRDLKKVESEASSFCDDPRQPCSSALKKMQAVFENRLEHGVYSLVRVRDGAMSRYRGYQIPWEWMQDTGIVSQIKLQSVKLAMKYLRRVSSEIQAIQVGPDEEELVLQGVRFAFRVHQFAGGFDVDTMRAFQELKETASAFQQWGGQNQHLHQQRLAGRS

SEQ ID NO: 187902 - protein, 674 aa, Zea Mays
MVAGRVKAAMGFQRSPATPKPGASSSSSSSRKAPPPLQLPGSAALPETPRRRSSGSPAPPGSGSKGGGGPFSRYFPRSSAQVQPARASGQPEPPPPPPPPPSCPGPAAAADLARLVEELRERESRLRTELLEHKILKETVAIVPFLETELAAKSSDLGRCRDALSRLEAENASLRAELHAARGSQQRVVQLEKELAEVKRHRRRDSGPDADRHDDDCSSSVSSHNSDSDRSNAPTNAVVPGLLIVPPPAPPPPPPPPPPPSYKSRSYFSASSRASPANSSSSSSTSSAPSTPTYSSDTAASRNRVPELSQLPPIPAPPPPPPPPPPPAMPARGRRSACSSPSTSSGSSGGGCGRGSGPPAPPPPPPPAARRSSRASSPAASGTAPAPAPCVRRVPEVVEFYHSLMRRDSRSRDAAAAAEAGASGGAAAARDMIGEIENRSSHLLAIKSDVERQGDFIRFLIKEVQGAAFVDIEDVVTFVKWLDVELSRLVDERAVLKHFDWPEGKADALREAAFGYRDLKKVESEASSFCDDPRQPCSSALKKMQAVFEKLEHGVYSLVRVRDGAMSRYRGYQIPWEWMQDTGIVSQIKLQSVKLAMKYLRRVSSEIQAIQVGPDEEELVLQGVRFAFRVHQFAGGFDVDTMRAFQELKETASAFQQWGGQNQHLHQQRLAGRS

SEQ ID NO: 187903 - protein, 466 aa, Zea Mays
MHKRNLQEQLPMLSAATASMPSVYSDCCLLLIILVLLAIHQAPAPVGALHHSPVERHPPPWRHPVVVPQGVVRLVHQRHVPRHGELEPAARAPRARHAVQVHLEVVPGLLAPGASQVRRLPRVDRELRAYVVVEHDRVLGNHVAGVADAEEPQPRDGVEPLLEAAAADARAGERERGHRAGGRARGRHVVAVGGDVERVERGERRAEAVARHGDAQLLAPVRVHQPPHLAQRLMPCAVLVVAGRRVAGGVHGQPAAVHHGVAVPEEASRRHHGELEVVGPLQRPHGAAPRDHDVAAAERGLPFVGGHRDVADPVGLPAPARPGHGPEDEGVRHGHRRRGVQEPGDPVRGGVRRQPHPVEEVRPGEAGQPRVRRRPLAVEGVVGRLRHLAVAEHGAPQVEVQRVQHSRPAAVAVELAPPPGRVAEAAVLGHVALLLLLMMMIQLAQRRYLCVYMEDTVMVACLVSCF

SEQ ID NO: 187904 - protein, 200 aa, Zea Mays
MISNPVNSTVPIAAEVFKKAGTYDEKKLFGVTTLDVVRAKTFYAGKAGVPVTGVNVPVVGGHAGITILPLFSQATPASNSLSQEDIEALTKRTQDGGTEVVEAKAGKGSATLSMAYAGAVFADACLKGLNGVPDIVECSFVQSTVTELPFFASKVRLGKNGVEEVLGLGELNEFEKKGLENLKGELKSSIDKGIKFAHGN

SEQ ID NO: 187905 - protein, 180 aa, Zea Mays
MFCCFFLQALPNQGTVDYPSFKLVIVGDGGTGKTTFVKRHLTGEFEKKYEPTIGVEVHPLDFTTNCGKIRFYCWDTAGQEKFGGLRDGYYIHGQCAIIMFDVTSRLTYKNVPTWHRDLCRVCENIPIVLCGNKVDVKNRQVKAKQVTFHRKKNLQYYEISAKSNYNFEKPFLYLARKLAG

SEQ ID NO: 187906 - protein, 71 aa, Zea Mays
MNSCRVCENIPIVLCGNKVDVKNRQVKAKQVTFHRKKNLQYYEISAKSNYNFEKPFLYLARKLAGDPNLHF

SEQ ID NO: 187907 - protein, 91 aa, Zea Mays
MGWLLANGELNNKRWRRILGSLTDVVNWSKSARVLGSRDLRRLKMHCFYSTEQRPLCCNEYICSNGIHTHRKGYLGGNLQCLRLGTSVACL

SEQ ID NO: 187908 - protein, 56 aa, Zea Mays
MGCNTDWKLLFFYRENWKLLLFETRKRKPFGPMLNVISLFCLKIIAKEHKHFGRHL

SEQ ID NO: 187909 - protein, 448 aa, Zea Mays
MQSDVVANAREEINKLRHTNEDLTKQVEGLQMNRFSEVEELVYLRWVNACLRFELRNYQTPSGKVSARDLNRTLSPKSQERAKQLMLEYAGSERGQGDTDLESVVSSMPSSPGSEDFDNMSIDSSSSRYSFLSKRSNLMQKFKRWGRSKDDSSSLASSISGSPRRKPKGPLEALMLKNAGDGTAITTYGKRDPNDVLDDENVASSFQLMSKTVEGFADEKYPAYKDRHKLATEREKAIKEKAGQARAQRFGGGHSSALISSPKGALPPKLAQIKERSPAANAESSEQSSDNQNNTLVVSQMKLANVEKRATRVPRPPPPRSTAASGATSIASGVQTPRAPGAPPPPPPPPGKVGGPPPPPPPPGALPRNLGGGDKVHRAPEIVEFYQSLMKREAKRETSLGSISSNVSDARSNMIGEIENRSTFLLAVSIFCWHHLEQKSCEIYEFHY

SEQ ID NO: 187910 - protein, 111 aa, Zea Mays
MARPAPRHAASPSIQAPPNAAACRLPPAAETLALVDRRGNASRQRPPRRRSSHDTGPRACAAAPARSRSTSRAPAAATRGPEAIFREDVGHAAAETYLVTGLAFTRLGYLG

SEQ ID NO: 187911 - protein, 135 aa, Zea Mays
MARPAPRHAASPSIQAPPNAAACRLPPAAETLALVDRRGNASRQRPPRRRSSHDTGPRACAAAPARSRSTSRAPAAATRGPEAIFREDVGHAAAETYLGWLSVDMRISHLIALRVYAVLLMPGFIEGQVIRSVVL

SEQ ID NO: 187912 - protein, 132 aa, Zea Mays
MARPAPRHAASPSIQAPPNAAACRLPPAAETLALVDRRGNASRQRPPRRRSSHDTGPRACAAAPARSRSTSRAPAAATRGPEAIFREDVGHAAAETYLGWLSVDMRISHLIALRVYAVLLMPGFIEGVRYGI

SEQ ID NO: 187913 - protein, 91 aa, Zea Mays
MHLYPNFRGRGAQPIIISKKTYLYFLFPTAVTFLCHNLFPNSTAAVGYVVEEKKIPVSHLDVGGLVVLCVLHVLFNWFGKTAVQIWRLAFE

SEQ ID NO: 187914 - protein, 66 aa, Zea Mays
MGRPASMLPCMPSRKRCNNTSCLRRTRSPSPLYCRPPEAGQSSRPVMQGCFRYWHGAPYPRMIVMR

SEQ ID NO: 187915 - protein, 86 aa, Zea Mays
MASLSMTTSAAARAQWTPRQNKLFEQALAVYDKDTPDRWHNIACAVGGGKSADDVRRYYELLEEDVGHIESGKAETAEDLGGQLNI

SEQ ID NO: 187916 - protein, 583 aa, Zea Mays
MTVRWDFLEEVMRAKRFPYKWVEMVMKTVVKGKVCVNVNGERSNFFRTFRGLRQGDPLSPLLFNIVADALSIMIDTGVKKNHITGVLSDILPGGISHIQYADDTIIMIDGSEKSILNLKTILYCFEWLSGLRINFHKSEVYVFGFEKDEERRANMLNCALGSFPMKYLGIPVSDRRLKSSDVGFILEKMGKRLDPWKGKHLSKGGRLILTNSCLSSLPTYTMGFYLLPKDIHKKMDRIRSNFFWQGAEKKNSFHMAKWDMVTRPKDQGGLGVADTSLMNECLLVKWIWKITQGSDDIWFKLIKAKYMPEGNFFISKNRGASQFWQGLHKVKHLFKWGAVNTVNNGEGTFFWKDTWLGEVPLEIKYPRFFDICKDKDVLVNECYDEEDWSMEFQRPLLAEDLNMWEELQADLQEQVLRPERDVVLWSLDSSKNFTVNSLYKFRTDGGVRNNVLKTIWKCGLPLKIKIFLWQLYNRKVQAATVLKERGWKGSSRCVLCQDKESIDHIFFRCVLSKFLWKCWNQIFNWDSVPFYVEDLFYKHEFMECMGTRKQSLFLLAAMVWAIWRNRNKMAMEVFPHLYYKNFI

SEQ ID NO: 187917 - protein, 115 aa, Zea Mays
MLLALNTIYLLSLCLCVRMGCCRKCCWHSWMLLHGSGQFSEIPTATGAASLGGARRRHASRRGDCAAHRIINQIKREQNTGRGENDTQRVKAPRRPRTRNPNFTAPIRSNRTRRE

SEQ ID NO: 187918 - protein, 381 aa, Zea Mays
MQQDQRNKTSAEVDFFTEYGDANRYKIQEVIGKGSYGVVCSAIDLHTRQRVAIKKIHGIFEHVSDAARILREIKLLRLLRHPDIVEIKHIMLPPSRKDFKDIFVVFELMESDLHQVIKANDDLTKEHYQFFLYQLLRALKYIHTANVYHRDLKPKNILANSNCKLKICDFGLARVAFNDTPTTVFWTDYVATRWYRAPELCGSFFTKYTPAIDIWSIGCIFAEVLTGKPLFPGKNVVHQLDLMTDLLGTPSTDTISRVRNEKARRYLSSMRKKDPVPFSQKFPSADPLALKLLEKLLAFDPKDRLTAEEALRDPYFKGLARAEREPSCQPIRKVEFDFEHKRMSKEEIRELIFREILEYHPQLLSSYINGTERTTFLYPRF

SEQ ID NO: 187919 - protein, 645 aa, Zea Mays
MRRGATKDDAAPDKVMGPLFPRLHVNDTLKGGPRAPPRNKMALYEQFSVPSHRYSAAVPPAPSPAPPWGAQRPASAVPSTSASQVGGGDRPIFPLFRVPSTEPVRSSDQTNANSNGQGANGTIAESGRQRQSTHLKSKDTNAAGPPAEGNNSVGKKLANDDDFTVPSVLYSGMPPHSSQEKLTLFPTTSPCKSVPAKYSSTDKRRLEGMDASDVKSKGPSGIKEKEPVQVRIDLEDKETTPSFQVLNDKTWSPDPKLSSHMDRLKKQHAEAESYQIRTRNENAVETQSPPKNGVSLLSKPYVDRREQNGDSDLLGHGLRETGVKRKRSHHDVEQNDDLSDSSVESLPGMEISPDDVVSAIGPKHFWKARRAIVNQQRVFAVQVFELHRLIKKLIAASPHVLIEGDPCLGKSLAVSKKRLAGDVETQLESAKNDDGVRPTQLEHSKEKTEANQPSPSQDEQAATNGDVAASMHTPSDNKQKSWCIPAPPSQWLIPVMSPSEGLVYKPYTGHCPPVGSLLAPPFFASYPTSSSSTAGGDFMSSACGARLMSAPVYFPSFSMPAVSGSAVEQVSHVAASQHKRNSCSEAVLASRDSEVQGSSASSPASSETAAQPRVIRVVPHTARTASESAARIFRSIQMERKQNDP

SEQ ID NO: 187920 - protein, 557 aa, Zea Mays
MGRATTRLRGPVHVRQPDQTNANSNGQGANGTIAESGRQRQSTHLKSKDTNAAGPPAEGNNSVGKKLANDDDFTVPSVLYSGMPPHSSQEKLTLFPTTSPCKSVPAKYSSTDKRRLEGMDASDVKSKGPSGIKEKEPVQVRIDLEDKETTPSFQVLNDKTWSPDPKLSSHMDRLKKQHAEAESYQIRTRNENAVETQSPPKNGVSLLSKPYVDRREQNGDSDLLGHGLRETGVKRKRSHHDVEQNDDLSDSSVESLPGMEISPDDVVSAIGPKHFWKARRAIVNQQRVFAVQVFELHRLIKVQKLIAASPHVLIEGDPCLGKSLAVSKKRLAGDVETQLESAKNDDGVRPTQLEHSKEKTEANQPSPSQDEQAATNGDVAASMHTPSDNKQKSWCIPAPPSQWLIPVMSPSEGLVYKPYTGHCPPVGSLLAPPFFASYPTSSSSTAGGDFMSSACGARLMSAPVYFPSFSMPAVSGSAVEQVSHVAASQHKRNSCSEAVLASRDSEVQGSSASSPASSETAAQPRVIRVVPHTARTASESAARIFRSIQMERKQNDP

SEQ ID NO: 187921 - protein, 394 aa, Zea Mays
MRRGATKDDAAPDKVMGPLFPRLHVNDTLKGGPRAPPRNKMALYEQFSVPSHRYSAAVPPAPSPAPPWGAQRPASAVPSTSASQVGGGDRPIFPLFRVPSTEPVRSSDQTNANSNGQGANGTIAESGRQRQSTHLKSKDTNAAGPPAEGNNSVGKKLANDDDFTVPSVLYSGMPPHSSQEKLTLFPTTSPCKSVPAKYSSTDKRRLEGMDASDVKSKGPSGIKEKEPVQVRIDLEDKETTPSFQVLNDKTWSPDPKLSSHMDRLKKQHAEAESYQIRTRNENAVETQSPPKNGVSLLSKPYVDRREQNGDSDLLGHGLRETGVKRKRSHHDVEQNDDLSDSSVESLPGMEISPDDVVSAIGPKHFWKARRAIVNQQRVFAVQVFELHRLIKCRS

SEQ ID NO: 187922 - protein, 387 aa, Zea Mays
MRRGATKDDAAPDKVMGPLFPRLHVNDTLKGGPRAPPRNKMALYEQFSVPSHRYSAAVPPAPSPAPPWGAQRPASAVPSTSASQVGGGDRPIFPLFRVPSTEPVRSSDQTNANSNGQGANGTIAESGRQRQSTHLKSKDTNAAGPPAEGNNSVGKKLANDDDFTVPSVLYSGMPPHSSQEKLTLFPTTSPCKSVPAKYSSTDKRRLEGMDASDVKSKGPSGIKEKEPVQVRIDLEDKETTPSFQVLNDKTWSPDPKLSSHMDRLKKQHAEAESYQIRTRNENAVETQSPPKNGVSLLSKPYVDRREQNGDSDLLGHGLRETGVKRKRSHHDVEQNDDLSDSSVESLPGMEISPDDVVSAIGPKHFWKARRAIVNRGYLLFKYSSCIG

SEQ ID NO: 187923 - protein, 200 aa, Zea Mays
MITSEHLVTLLAIVPKYSQKDWLSSYETLDTFVVPRSSKKLYEDNEYALYTVTLFAKVVDNFKVRAREKGFQIRDFEYSPEAQESRMQEMEKLLRDQEAMRTTLLQWCYASYSEVFSSWMHFCAVRVFVESILRYGLPPSFLSAVLAPSTKSEKKVRSILDELSGDAHSLYWKSEDDVGVAGLGGETEAHPYVSFTINFV

SEQ ID NO: 187924 - protein, 94 aa, Zea Mays
MKDLQAMDRAHRLGQRKVVNVHRLIMRGTLEEKVMSLQRFKVSVANAVINAENSSLKTMNTDQLLDLFTSTPASRKVRQFVCLFFAFVGNVLFF

SEQ ID NO: 187925 - protein, 1115 aa, Zea Mays
MSLSGVQRQVASMIIVSWFKDLRGRDPVSVGTLLAFLSSLKEWLVDLLTCSDPALPTKGSVLPYSELSRTYTKMRNEANNLLHLIDSCAAFKDYSSSLNLNTDVLTVDDAINFASKLLLPSESDIPSETENIFLNNIESAKQGLLSTSGYLKCVQNNLHVTVCSLVASAVVWMSCLPSKLNPVILPLMAAIKREQEEVLQDKAADALAELIFSCIGRKPGPNDKLTKNLCTLTCTDASETPQAAIINSMQVIEDQNLLSIGKRFSSHRSRGHTTSGGDERSKMEGFISRRGSELAFKHLCVKFGPSLFENLPKLWDCLTEFLRPVKTEDGIPEDDASIAQLGRSYEDKDPQSLINNIQVVRSISPHLAEPLRPQLLNLLPSILGCVRHPHVAVRLAAARCITSMAKSLTDDVMVLVIENVIPMLSDLSSVCARQGAGILLSLLVQGLAVELVPYAPFLVVPLLKCMSDPDGSVRQTVTHSFAALVPLLPLSRGASLPCGLSERLSSSAEDVQFLEQLLDNTQIDDFKLNIDLNVELRRYQQEGINWLAFLRRFKLHGILCDDMGLGKTLQASAIVASDIAEARARNDEKILTSLIICPSTLVAHWEYEIEKYIDSSILKPLQYVGSSQDRVTLRSQFDKVNVIITSYDIIRKDIDFLGNITWNYCVLDEGHIIKNSRSKITFAVKQLKAQHRLILSGTPIQNNVLELWSLFDFLMPGFLGTEKQFQAAYGKPLLAAKDSKCSAKDAEAGILAMEALHKQVMPFLLRRTKDEVLSDLPEKIIQDRYCDLSLLQLKLYDKFSSSNAKDEISTIVKANELEESAPQPKATRHVFQALQYLLKLCSHPLLVTGENPPNHLVDLLNEIGLGSGSELHELHHSPKLVALQEILQECGIGSEISSPDASTAVGQHRVLIFAQHKAFLDIIEKDLFQSHMRSVTYLRLDGSVDPEKRFEIVKAFNSDPTIDVLLLTTHVGGLGLNLTSADTLVFVEHDWNPMKDLQAMDRAHRLGQRKVVNVHRLIMRGTLEEKVMSLQRFKVSVANAVINAENSSLKTMNTDQLLDLFTSTPASRKASDEQSKRKSGGKGLKSILNGLDELWDQSQYADEYDLNQFLAKLNG

SEQ ID NO: 187926 - protein, 1721 aa, Zea Mays
MFDPIWEVRHGTIMALREILTHHGACAGVYFPDLSLPSSDLDGKTNFDSLKREHGIDLNEDVHLEHLEPALKKHKKEPKCAESMMDCDKELVDSDYLKTEGDLSNVPDVLTAEPNSTHVKVEPEFCVDDSADPSKGVSTCKSQKKLNSISHLSSHILAPESSKFMKLMKLAKYSYMKNWEFLQDCAIRFLCVLSLDRFGDYVSDQVVAPVRETCAQALGAVLKYMHPSLVCHTFKILLQMQHRQEWEVRHGSLLGIKYLVAVRQEMLKDLLDYIIHACKAGLEDPDDDVRAVAAEALIPAADSLVRLNDQILHPIVVLLWDILLDLDDLSPSTSSVMNLLAEIYSQPEMVPKMLGTAASGEKGEFDLNEATQIAEQEDELTSIENPYGLATLTPRLWPFMRHSITSVRRSAIRTLEKLLEVGNTRSSAGTTPSKLWPTSILGDALQVVFQNLLLESNDDILQSSERAWKLLLQCPEKDLEYAARLYFSNWVQLATTPFGSALDSTKMFLPVALPRGNRSRAAAKIRSARLEHEYTTMISFGSTGESISHEKHSDVPSIFSNIIVGSDPDKSVTHTRVLTSMALGLFASKLPVSSWQVVLSPLANHLMSLSGVQRQVASMIIVSWFKDLRGRDPVSVGTLLAFLSSLKEWLVDLLTCSDPALPTKGSVLPYSELSRTYTKMRNEANNLLHLIDSCAAFKDYSSSLNLNTDVLTVDDAINFASKLLLPSESDIPSETENIFLNNIESAKQGLLSTSGYLKCVQNNLHVTVCSLVASAVVWMSCLPSKLNPVILPLMAAIKREQEEVLQDKAADALAELIFSCIGRKPGPNDKLTKNLCTLTCTDASETPQAAIINSMQVIEDQNLLSIGKRFSSHRSRGHTTSGGDERSKMEGFISRRGSELAFKHLCVKFGPSLFENLPKLWDCLTEFLRPVKTEDGIPEDDASIAQLGRSYEDKDPQSLINNIQVVRSISPHLAEPLRPQLLNLLPSILGCVRHPHVAVRLAAARCITSMAKSLTDDVMVLVIENVIPMLSDLSSVCARQGAGILLSLLVQGLAVELVPYAPFLVVPLLKCMSDPDGSVRQTVTHSFAALVPLLPLSRGASLPCGLSERLSSSAEDVQFLEQLLDNTQIDDFKLNIDLNVELRRYQQEGINWLAFLRRFKLHGILCDDMGLGKTLQASAIVASDIAEARARNDEKILTSLIICPSTLVAHWEYEIEKYIDSSILKPLQYVGSSQDRVTLRSQFDKVNVIITSYDIIRKDIDFLGNITWNYCVLDEGHIIKNSRSKITFAVKQLKAQHRLILSGTPIQNNVLELWSLFDFLMPGFLGTEKQFQAAYGKPLLAAKDSKCSAKDAEAGILAMEALHKQVMPFLLRRTKDEVLSDLPEKIIQDRYCDLSLLQLKLYDKFSSSNAKDEISTIVKANELEESAPQPKATRHVFQALQYLLKLCSHPLLVTGENPPNHLVDLLNEIGLGSGSELHELHHSPKLVALQEILQECGIGSEISSPDASTAVGQHRVLIFAQHKAFLDIIEKDLFQSHMRSVTYLRLDGSVDPEKRFEIVKAFNSDPTIDVLLLTTHVGGLGLNLTSADTLVFVEHDWNPMKDLQAMDRAHRLGQRKVVNVHRLIMRGTLEEKVMSLQRFKVSVANAVINAENSSLKTMNTDQLLDLFTSTPASRKASDEQSKRKSGGKGLKSILNGLDELWDQSQYADEYDLNQFLAKLNG

SEQ ID NO: 187927 - protein, 1678 aa, Zea Mays
MAQNSSRLHRLLTLLDTGSTQATRFAAARQIGEIAKSHPQELNSLLKKVSQYIRSKNWDTRVAAAHAIGAIAENVKHTSLKDLYASVQAEKHASGFSDGSDDAGSALPRTDSAATSDLAFGSFDIGRVLEFGSPLLASGGQEYDIADSGKNPAERLARQKKNLRRRLGLDLCEQFMDVNDVIKDEDLLAQKNYWGSHVQNNGFHSFNSGHNIQQLVSTMVPRYPKHSNFRSRRLSARELNMLKRKAKSNAKDHTKAVSEDDEVTLKGSVPSNGASSEQGVFDTAVEEDNLEYNENGRWPFQQFVDQLIHDMFDPIWEVRHGTIMALREILTHHGACAGVYFPDLSLPSSDLDGKTNFDSLKREHGIDLNEDVHLEHLEPALKKHKKEPKCAESMMDCDKELVDSDYLKTEGDLSNVPDVLTAEPNSTHVKVEPEFCVDDSADPSKGVSTCKSQKKLNSISHLSSHILAPESSKFMKLMKLAKYSYMKNWEFLQDCAIRFLCVLSLDRFGDYVSDQVVAPVRETCAQALGAVLKYMHPSLVCHTFKILLQMQHRQEWEVRHGSLLGIKYLVAVRQEMLKDLLDYIIHACKAGLEDPDDDVRAVAAEALIPAADSLVRLNDQILHPIVVLLWDILLDLDDLSPSTSSVMNLLAEIYSQPEMVPKMLGTAASGEKGEFDLNEATQIAEQEDELTSIENPYGLATLTPRLWPFMRHSITSVRRSAIRTLEKLLEVGNTRSSAGTTPSKLWPTSILGDALQVVFQNLLLESNDDILQSSERAWKLLLQCPEKDLEYAARLYFSNWVQLATTPFGSALDSTKMFLPVALPRGNRSRAAAKIRSARLEHEYTTMISFGSTGESISHEKHSDVPSIFSNIIVGSDPDKSVTHTRVLTSMALGLFASKLPVSSWQVVLSPLANHLMSLSGVQRQVASMIIVSWFKDLRGRDPVSVGTLLAFLSSLKEWLVDLLTCSDPALPTKGSVLPYSELSRTYTKMRNEANNLLHLIDSCAAFKDYSSSLNLNTDVLTVDDAINFASKLLLPSESDIPSETENIFLNNIESAKQGLLSTSGYLKCVQNNLHVTVCSLVASAVVWMSCLPSKLNPVILPLMAAIKREQEEVLQDKAADALAELIFSCIGRKPGPNDKLTKNLCTLTCTDASETPQAAIINSMQVIEDQNLLSIGKRFSSHRSRGHTTSGGDERSKMEGFISRRGSELAFKHLCVKFGPSLFENLPKLWDCLTEFLRPVKTEDGIPEDDASIAQLGRSYEDKDPQSLINNIQVVRSISPHLAEPLRPQLLNLLPSILGCVRHPHVAVRLAAARCITSMAKSLTDDVMVLVIENVIPMLSDLSSVCARQGAGILLSLLVQGLAVELVPYAPFLVVPLLKCMSDPDGSVRQTVTHSFAALVPLLPLSRGASLPCGLSERLSSSAEDVQFLEQLLDNTQIDDFKLNIDLNVELRRYQQEGINWLAFLRRFKLHGILCDDMGLGKTLQASAIVASDIAEARARNDEKILTSLIICPSTLVAHWEYEIEKYIDSSILKPLQYVGSSQDRVTLRSQFDKVNVIITSYDIIRKDIDFLGNITWNYCVLDEGHIIKNSRSKITFAVKQLKAQHRLILSGTPIQNNVLELWSLFDFLMPGFLGTEKQFQAAYGKPLLAAKDSKCSAKDAEAGILAMEALHKQNKG

SEQ ID NO: 187928 - protein, 1796 aa, Zea Mays
MLKRKAKSNAKDHTKAVSEDDEVTLKGSVPSNGASSEQAGAQNGVFDTAVEEDNLEYNENGRWPFQQFVDQLIHDMFDPIWEVRHGTIMALREILTHHGACAGVYFPDLSLPSSDLDGKTNFDSLKREHGIDLNEDVHLEHLEPALKKHKKEPKCAESMMDCDKELVDSDYLKTEGDLSNVPDVLTAEPNSTHVKVEPEFCVDDSADPSKGVSTCKSQKKLNSISHLSSHILAPESSKFMKLMKLAKYSYMKNWEFLQDCAIRFLCVLSLDRFGDYVSDQVVAPVRETCAQALGAVLKYMHPSLVCHTFKILLQMQHRQEWEVRHGSLLGIKYLVAVRQEMLKDLLDYIIHACKAGLEDPDDDVRAVAAEALIPAADSLVRLNDQILHPIVVLLWDILLDLDDLSPSTSSVMNLLAEIYSQPEMVPKMLGTAASGEKGEFDLNEATQIAEQEDELTSIENPYGLATLTPRLWPFMRHSITSVRRSAIRTLEKLLEVGNTRSSAGTTPSKLWPTSILGDALQVVFQNLLLESNDDILQSSERAWKLLLQCPEKDLEYAARLYFSNWVQLATTPFGSALDSTKMFLPVALPRGNRSRAAAKIRSARLEHEYTTMISFGSTGESISHEKHSDVPSIFSNIIVGSDPDKSVTHTRVLTSMALGLFASKLPVSSWQVVLSPLANHLMSLSGVQRQVASMIIVSWFKDLRGRDPVSVGTLLAFLSSLKEWLVDLLTCSDPALPTKGSVLPYSELSRTYTKMRNEANNLLHLIDSCAAFKDYSSSLNLNTDVLTVDDAINFASKLLLPSESDIPSETENIFLNNIESAKQGLLSTSGYLKCVQNNLHVTVCSLVASAVVWMSCLPSKLNPVILPLMAAIKREQEEVLQDKAADALAELIFSCIGRKPGPNDKLTKNLCTLTCTDASETPQAAIINSMQVIEDQNLLSIGKRFSSHRSRGHTTSGGDERSKMEGFISRRGSELAFKHLCVKFGPSLFENLPKLWDCLTEFLRPVKTEDGIPEDDASIAQLGRSYEDKDPQSLINNIQVVRSISPHLAEPLRPQLLNLLPSILGCVRHPHVAVRLAAARCITSMAKSLTDDVMVLVIENVIPMLSDLSSVCARQGAGILLSLLVQGLAVELVPYAPFLVVPLLKCMSDPDGSVRQTVTHSFAALVPLLPLSRGASLPCGLSERLSSSAEDVQFLEQLLDNTQIDDFKLNIDLNVELRRYQQEGINWLAFLRRFKLHGILCDDMGLGKTLQASAIVASDIAEARARNDEKILTSLIICPSTLVAHWEYEIEKYIDSSILKPLQYVGSSQDRVTLRSQFDKVNVIITSYDIIRKDIDFLGNITWNYCVLDEGHIIKNSRSKITFAVKQLKAQHRLILSGTPIQNNVLELWSLFDFLMPGFLGTEKQFQAAYGKPLLAAKDSKCSAKDAEAGILAMEALHKQVMPFLLRRTKDEVLSDLPEKIIQDRYCDLSLLQLKLYDKFSSSNAKDEISTIVKANELEESAPQPKATRHVFQALQYLLKLCSHPLLVTGENPPNHLVDLLNEIGLGSGSELHELHHSPKLVALQEILQECGIGSEISSPDASTAVGQHRVLIFAQHKAFLDIIEKDLFQSHMRSVTYLRLDGSVDPEKRFEIVKAFNSDPTIDVLLLTTHVGGLGLNLTSADTLVFVEHDWNPMKDLQAMDRAHRLGQRKVVNVHRLIMRGTLEEKVMSLQRFKVSVANAVINAENSSLKTMNTDQLLDLFTSTPASRKASDEQSKRKSGGKGLKSILNGLDELWDQSQYADEYDLNQFLAKLNG

SEQ ID NO: 187929 - protein, 1856 aa, Zea Mays
MDVNDVIKDEDLLAQKNYWGSHVQNNGFHSFNSGHNIQQLVSTMVPRYPKHSNFRSRRLSARELNMLKRKAKSNAKDHTKAVSEDDEVTLKGSVPSNGASSEQGVFDTAVEEDNLEYNENGRWPFQQFVDQLIHDMFDPIWEVRHGTIMALREILTHHGACAGVYFPDLSLPSSDLDGKTNFDSLKREHGIDLNEDVHLEHLEPALKKHKKEPKCAESMMDCDKELVDSDYLKTEGDLSNVPDVLTAEPNSTHVKVEPEFCVDDSADPSKGVSTCKSQKKLNSISHLSSHILAPESSKFMKLMKLAKYSYMKNWEFLQDCAIRFLCVLSLDRFGDYVSDQVVAPVRETCAQALGAVLKYMHPSLVCHTFKILLQMQHRQEWEVRHGSLLGIKYLVAVRQEMLKDLLDYIIHACKAGLEDPDDDVRAVAAEALIPAADSLVRLNDQILHPIVVLLWDILLDLDDLSPSTSSVMNLLAEIYSQPEMVPKMLGTAASGEKGEFDLNEATQIAEQEDELTSIENPYGLATLTPRLWPFMRHSITSVRRSAIRTLEKLLEVGNTRSSAGTTPSKLWPTSILGDALQVVFQNLLLESNDDILQSSERAWKLLLQCPEKDLEYAARLYFSNWVQLATTPFGSALDSTKMFLPVALPRGNRSRAAAKIRSARLEHEYTTMISFGSTGESISHEKHSDVPSIFSNIIVGSDPDKSVTHTRVLTSMALGLFASKLPVSSWQVVLSPLANHLMSLSGVQRQVASMIIVSWFKDLRGRDPVSVGTLLAFLSSLKEWLVDLLTCSDPALPTKGSVLPYSELSRTYTKMRNEANNLLHLIDSCAAFKDYSSSLNLNTDVLTVDDAINFASKLLLPSESDIPSETENIFLNNIESAKQGLLSTSGYLKCVQNNLHVTVCSLVASAVVWMSCLPSKLNPVILPLMAAIKREQEEVLQDKAADALAELIFSCIGRKPGPNDKLTKNLCTLTCTDASETPQAAIINSMQVIEDQNLLSIGKRFSSHRSRGHTTSGGDERSKMEGFISRRGSELAFKHLCVKFGPSLFENLPKLWDCLTEFLRPVKTEDGIPEDDASIAQLGRSYEDKDPQSLINNIQVVRSISPHLAEPLRPQLLNLLPSILGCVRHPHVAVRLAAARCITSMAKSLTDDVMVLVIENVIPMLSDLSSVCARQGAGILLSLLVQGLAVELVPYAPFLVVPLLKCMSDPDGSVRQTVTHSFAALVPLLPLSRGASLPCGLSERLSSSAEDVQFLEQLLDNTQIDDFKLNIDLNVELRRYQQEGINWLAFLRRFKLHGILCDDMGLGKTLQASAIVASDIAEARARNDEKILTSLIICPSTLVAHWEYEIEKYIDSSILKPLQYVGSSQDRVTLRSQFDKVNVIITSYDIIRKDIDFLGNITWNYCVLDEGHIIKNSRSKITFAVKQLKAQHRLILSGTPIQNNVLELWSLFDFLMPGFLGTEKQFQAAYGKPLLAAKDSKCSAKDAEAGILAMEALHKQVMPFLLRRTKDEVLSDLPEKIIQDRYCDLSLLQLKLYDKFSSSNAKDEISTIVKANELEESAPQPKATRHVFQALQYLLKLCSHPLLVTGENPPNHLVDLLNEIGLGSGSELHELHHSPKLVALQEILQECGIGSEISSPDASTAVGQHRVLIFAQHKAFLDIIEKDLFQSHMRSVTYLRLDGSVDPEKRFEIVKAFNSDPTIDVLLLTTHVGGLGLNLTSADTLVFVEHDWNPMKDLQAMDRAHRLGQRKVVNVHRLIMRGTLEEKVMSLQRFKVSVANAVINAENSSLKTMNTDQLLDLFTSTPASRKASDEQSKRKSGGKGLKSILNGLDELWDQSQYADEYDLNQFLAKLNG

SEQ ID NO: 187930 - protein, 97 aa, Zea Mays
MLSTFLGRSSGSSRRPAVSSSRELSTEAEQTRSRTTDASPGAFQRSGAPRWSPQMPDSSDGRRSSSSRRHSSNPKNYESTIRGMQGLNFDGDDRVHY

SEQ ID NO: 187931 - protein, 78 aa, Zea Mays
MGLRGTNALKFVKMLRRSILNCFMSQNYTEYFKEELGFQMLSGLALRVITMFWLWTYWDRVLKIFLAFATGSCPSKLF

SEQ ID NO: 187932 - protein, 364 aa, Zea Mays
MDLLFSFIKPDHPHSTLLAGYFSKVVICLMLRKTAPLMNYVQEHPDIVVQLVDLIGITSIMEVLVRLIGADETIYLNFADTLHWLENTYVLEMIVDKFSSSDSPEVHANAAEILSAVTRCAPPALAAKICSPSFVGRLFHHALDESRPKSVLVHSLSVCISLLDPKRLASVSYQAFRSNLTHGTLVTASPETVDGILESLGDLLKLLDITSSQNVFPTTYGCLCPPLGKHRLKIVEFISVLLTIGSEIAEKKLISQSVIKHCIDLFFQYPYNNFLHHHVENIIVSCLEVKRNQLIDHILNDCGLVGKVLAAEKSSSLAVESNGPTLPSEGKEPPRIGNIGHITRIANKLIQFGNSNSMIQSHLQ

SEQ ID NO: 187933 - protein, 210 aa, Zea Mays
MSQAFRFGIYRNDDIEEAQGSHERDDEDVYFDDESAEVVISSLCLGDDQDSSSLFTNSNWFTFDGDRGINDRLAASVPPSSPDSEAISLNTENTDEALTGETTGGTESLRESASLANELAEVANDNDADATDGEKILCTEEDSQASEGPVDAKEDKTGGASKAANESVPDNALPESHHTDCRCADSSESGTEEDVEIDDEKKSETAMTNE

SEQ ID NO: 187934 - protein, 632 aa, Zea Mays
MDLLFSFIKPDHPHSTLLAGYFSKVVICLMLRKTAPLMNYVQEHPDIVVQLVDLIGITSIMEVLVRLIGADETIYLNFADTLHWLENTYVLEMIVDKFSSSDSPEVHANAAEILSAVTRCAPPALAAKICSPSFVGRLFHHALDESRPKSVLVHSLSVCISLLDPKRLASVSYQAFRSNLTHGTLVTASPETVDGILESLGDLLKLLDITSSQNVFPTTYGCLCPPLGKHRLKIVEFISVLLTIGSEIAEKKLISQSVIKHCIDLFFQYPYNNFLHHHVENIIVSCLEVKRNQLIDHILNDCGLVGKVLAAEKSSSLAVESNGPTLPSEGKEPPRIGNIGHITRIANKLIQFGNSNSMIQSHLQENSEWAVWQIDVLIKRNEVENVYHWACGRPTSLHDRGRDSDDDDFRDRDYDVAALTNNMSQAFRFGIYRNDDIEEAQGSHERDDEDVYFDDESAEVVISSLCLGDDQDSSSLFTNSNWFTFDGDRGINDRLAASVPPSSPDSEAISLNTENTDEALTGETTGGTESLRESASLANELAEVANDNDADATDGEKILCTEEDSQASEGPVDAKEDKTGGASKAANESVPDNALPESHHTDCRCADSSESGTEEDVEIDDEKKSETAMTNE

SEQ ID NO: 187935 - protein, 696 aa, Zea Mays
MFWRMTGLSAASPVDTILDKENFTLEELLDEDEIIQECKALNTRLINFLRDKAQVSQLLRYIVEEVPEDSEKKQSFKFPFIACEIFACEIDIILRTLVEDVELMDLLFSFIKPDHPHSTLLAGYFSKVVICLMLRKTAPLMNYVQEHPDIVVQLVDLIGITSIMEDSPEVHANAAEILSAVTRCAPPALAAKICSPSFVGRLFHHALDESRPKSVLVHSLSVCISLLDPKRLASVSYQAFRSNLTHGTLVTASPETVDGILESLGDLLKLLDITSSQNVFPTTYGCLCPPLGKHRLKIVEFISVLLTIGSEIAEKKLISQSVIKHCIDLFFQYPYNNFLHHHVENIIVSCLEVKRNQLIDHILNDCGLVGKVLAAEKSSSLAVESNGPTLPSEGKEPPRIGNIGHITRIANKLIQFGNSNSMIQSHLQENSEWAVWQIDVLIKRNEVENVYHWACGRPTSLHDRGRDSDDDDFRDRDYDVAALTNNMSQAFRFGIYRNDDIEEAQGSHERDDEDVYFDDESAEVVISSLCLGDDQDSSSLFTNSNWFTFDGDRGINDRLAASVPPSSPDSEAISLNTENTDEALTGETTGGTESLRESASLANELAEVANDNDADATDGEKILCTEEDSQASEGPVDAKEDKTGGASKAANESVPDNALPESHHTDCRCADSSESGTEEDVEIDDEKKSETAMTNE

SEQ ID NO: 187936 - protein, 735 aa, Zea Mays
MFWRMTGLSAASPVDTILDKENFTLEELLDEDEIIQECKALNTRLINFLRDKAQVSQLLRYIVEEVPEDSEKKQSFKFPFIACEIFACEIDIILRTLVEDVELMDLLFSFIKPDHPHSTLLAGYFSKVVICLMLRKTAPLMNYVQEHPDIVVQLVDLIGITSIMEVLVRLIGADETIYLNFADTLHWLENTYVLEMIVDKFSSSDSPEVHANAAEILSAVTRCAPPALAAKICSPSFVGRLFHHALDESRPKSVLVHSLSVCISLLDPKRLASVSYQAFRSNLTHGTLVTASPETVDGILESLGDLLKLLDITSSQNVFPTTYGCLCPPLGKHRLKIVEFISVLLTIGSEIAEKKLISQSVIKHCIDLFFQYPYNNFLHHHVENIIVSCLEVKRNQLIDHILNDCGLVGKVLAAEKSSSLAVESNGPTLPSEGKEPPRIGNIGHITRIANKLIQFGNSNSMIQSHLQENSEWAVWQIDVLIKRNEVENVYHWACGRPTSLHDRGRDSDDDDFRDRDYDVAALTNNMSQAFRFGIYRNDDIEEAQGSHERDDEDVYFDDESAEVVISSLCLGDDQDSSSLFTNSNWFTFDGDRGINDRLAASVPPSSPDSEAISLNTENTDEALTGETTGGTESLRESASLANELAEVANDNDADATDGEKILCTEEDSQASEGPVDAKEDKTGGASKAANESVPDNALPESHHTDCRCADSSESGTEEDVEIDDEKKSETAMTNE

SEQ ID NO: 187937 - protein, 421 aa, Zea Mays
MDLLFSFIKPDHPHSTLLAGYFSKVVICLMLRKTAPLMNYVQEHPDIVVQLVDLIGITSIMEVLVRLIGADETIYLNFADTLHWLENTYVLEMIVDKFSSSDSPEVHANAAEILSAVTRCAPPALAAKICSPSFVGRLFHHALDESRPKSVLVHSLSVCISLLDPKRLASVSYQAFRSNLTHGTLVTASPETVDGILESLGDLLKLLDITSSQNVFPTTYGCLCPPLGKHRLKIVEFISVLLTIGSEIAEKKLISQSVIKHCIDLFFQYPYNNFLHHHVENIIVSCLEVKRNQLIDHILNDCGLVGKVLAAEKSSSLAVESNGPTLPSEGKEPPRIGNIGHITRIANKLIQFGNSNSMIQSHLQENSEWAVWQIDVLIKRNEVENVYHWASVQHLYMIVGGIAMTTTSETETTMWQHSLII

SEQ ID NO: 187938 - protein, 631 aa, Zea Mays
MDLLFSFIKPDHPHSTLLAGYFSKVVICLMLRKTAPLMNYVQEHPDIVVQLVDLIGITSIMEVLVRLIGADETIYLNFADTLHWLENTYVLEMIVDKFSSSDSPEVHANAAEILSAVTRCAPPALAAKICSPSFVGRLFHHALDESRPKSVLVHSLSVCISLLDPKRLASVSYQAFRSNLTHGTLVTASPETVDGILESLGDLLKLLDITSSQNVFPTTYGCLCPPLGKHRLKIVEFISVLLTIGSEIAEKKLISQSVIKHCIDLFFQYPYNNFLHHHVENIIVSCLEVKRNQLIDHILNDCGLVGKVLAAEKSSSLAVESNGPTLPSEGKEPPRIGNIGHITRIANKLIQFGNSNSMIQSHLQENSEWAVWQIDVLIKRNEVENVYHWACGRPTSLHDRGRDSDDDDFRDRDYDVAALTNNMSQAFRFGIYRNDDIEEAQGSHERDDEDVYFDDESAEVVISSLCLGDDQDSSLFTNSNWFTFDGDRGINDRLAASVPPSSPDSEAISLNTENTDEALTGETTGGTESLRESASLANELAEVANDNDADATDGEKILCTEEDSQASEGPVDAKEDKTGGASKAANESVPDNALPESHHTDCRCADSSESGTEEDVEIDDEKKSETAMTNE

SEQ ID NO: 187939 - protein, 510 aa, Zea Mays
MFWRMTGLSAASPVDTILDKENFTLEELLDEDEIIQECKALNTRLINFLRDKAQVSQLLRYIVEEVPEDSEKKQSFKFPFIACEIFACEIDIILRTLVEDVELMDLLFSFIKPDHPHSTLLAGYFSKVVICLMLRKTAPLMNYVQEHPDIVVQLVDLIGITSIMEDSPEVHANAAEILSAVTRCAPPALAAKICSPSFVGRLFHHALDESRPKSVLVHSLSVCISLLDPKRLASVSYQAFRSNLTHGTLVTASPETVDGILESLGDLLKLLDITSSQNVFPTTYGCLCPPLGKHRLKIVEFISVLLTIGSEIAEKKLISQSVIKHCIDLFFQYPYNNFLHHHVENIIVSCLEVKRNQLIDHILNDCGLVGKVLAAEKSSSLAVESNGPTLPSEGKEPPRIGNIGHITRIANKLIQFGNSNSMIQSHLQENSEWAVWQIDVLIKRNEVENVYHWACGRPTSLHDRGRDSDDDDFRDRDYDVAALTNNMSQAFRFGIYRNDDIEEVNCASLY

SEQ ID NO: 187940 - protein, 303 aa, Zea Mays
MGFGAHRKWRESGLRSRLLPPVPVAAPLPPLVGGSKVADPRPARVVDLSPVGDRSRASSKKNRRRHKKADAASSISPMQRLFDTSREVFANSYPGFVPPPDAVARLSGLLNELKPRDVRVAPSMSVFKHADPTSPPPVTYLHFYGSSEFSFGIFCLPKSAIIPLHNHPGMTVFSKILFGSMHLKSYDWAKSLPAGSNDNALENSDGAGARLAKVNTDAVFDASSETVVLYPENGGNLHCFTALTPCAVLDVMGPPYNRAQGRDCAYYSESPYSCAGDAQYSWLKEVHSTFEMEGIKMEPNFIV

SEQ ID NO: 187941 - protein, 217 aa, Zea Mays
MTPATAVAVASEACVLSDSTVASSSSTAETAAARAEVPAAGSTDETGSGGGGAAERRSRFRRICVYCGSAKGKKASYQDAAIDLGNQLVERGIDLVYGGGSIGLMGLVSHAVHAGGRHVMGIIPKSLMPIEVTGEPVGEVRAVSGMHERKAEMARFADAFVALPGGYGTLEELLEIITWAQLGIHKKPVGLLNVDGFYDPLLSFIDLAVREGLRPGV

SEQ ID NO: 187942 - protein, 590 aa, Zea Mays
MSLNSLHRGRSASIPSSRPVASLLLIFKFLLGFHHFASCLLYVSPSAAKEARPPPLLNCTALSSPLHQRLPGIQVQSTHREDKPRAAGGCGVNRLPGPRFTSEMTDAGAGSGLQTPDQVPRGAGAGAVVVVALRAAAREISKTAAVWALTHVVQHGDSILLLVLIPPPSSGRKFWGFPFFAGSCASGHKAVLNQRSDVAELCSQMVRKLRDVYDPNNKIDVKVKILSGSPPGAVAKESKRVQAAWVVLDKELKHEEKRCMEELQCNIVAMKRSQPKVLRLNLVGSHSHEREESSRPPPPPAPSPPPPEPSTSPSPSRVPSSATPSSSPESEEAPFDTSTTDVGASCVSSSDSDTNSFSTNKGTTTTTTTAAAKDSVQRSDADSESEASSLEPWMATILLQTPADRLVGNRPRPRRTPTADSLLEKIAKLDLLTEISAIRSRSDLNFRGNVRDAVALDRSAPPGPPPLCSICQHKAPVFGKPPRWFSYAELEVATGGFSRANFLAEGGFGSVHRGVLPDGRAVAVKQHRLASSQGDVEFCSEVEVLSCAQHRNVVMLIGFCVENKRRLLVYEYICNGSLDTHLYGWRFRLG

SEQ ID NO: 187943 - protein, 588 aa, Zea Mays
MSLNSLHRGRSASIPSSRPVASLLLIFKFLLGFHHFASCLLYVSPSAAKEARPPPLLNCTALSSPLHQRLPGIQVQSTHREDKPRAAGGCGVNRLPGPRFTSEMTDAGAGSGLQTPDQVPRGAGAGAVVVVALRAAAREISKTAAVWALTHVVQHGDSILLLVLIPPPSSGRKFWGFPFFAGSCASGHKAVLNQRSDVAELCSQMVRKLRDVYDPNNKIDVKVKILSGSPPGAVAKESKRVQAAWVVLDKELKHEEKRCMEELQCNIVAMKRSQPKVLRLNLVGSHSHEREESSRPPPPPAPSPPPPEPSTSPSPSRVPSSATPSSSPESEEAPFDTSTTDVGASCVSSSDSDTNSFSTNKGTTTTTTTAAAKDSVQRSDADSESEASSLEPWMATILLQTPADRLVGNRPRPRRTPTADSLLEKIAKLDLLTEISAIRSRSDLNFRGNVRDAVALDRSAPPGPPPLCSICQHKAPVFGKPPRWFSYAELEVATGGFSRANFLAEGGFGSVHRGVLPDGRAVAVKQHRLASSQGDVEFCSEVEVLSCAQHRNVVMLIGFCVENKRRLLVYEYICNGSLDTHLYDTRLQ

SEQ ID NO: 187944 - protein, 311 aa, Zea Mays
MGDRHDWMYEGFKKGGCHTSEWFAKTQMFLDHAAALSQIDNIRMLVYEYVNNGNLEQWLHGAMRQHGVLTWEARMKVVLGIAKALAYLHEAIEPKVVHRDIKSSNILIDEEFNGKLSDFGLAKLLGAGKSHITTRVMGTFGYVAPEYANTGLLNEKSDVYSFGVLLLEAVTGRDPVDYGRPANEVHLVEWLKMMVGTRRAEEVVDPDMELKPAIRALKRALLVALRCVDPDAEKRPTMGQVVRMLEAEDVPSREDRRSRRGHSSHADNESKNPVSVQYAGLSLTLPARSWTQAVRNIWESLRGGALLDGWY

SEQ ID NO: 187945 - protein, 150 aa, Zea Mays
MGDRHDWMYEGFKKGGCHTSEWFAKTQMFLDHAAALSQIDNIRMLVYEYVNNGNLEQWLHGAMRQHGVLTWEARMKVVLGIAKALAYLHEAIEPKVVHRDIKSSNILIDEEFNGKLSDFGLAKLLGAGKSHITTRVMGTFGGSNHSSFYF

SEQ ID NO: 187946 - protein, 64 aa, Zea Mays
MAGSAADAEQEQKRAAAAAYDYEGDARWAEYWSNVLVPPNLASRPDVVDHLKRKFYQRYIERAL

SEQ ID NO: 187947 - protein, 368 aa, Zea Mays
MAFPAKASQQGRCHSSRIFIRGASNRRGQIICGQLDKAQERKLLNDALDRTGVRYETESWMDEETSSWMDRDLTDSDLRYRLLMQNLEELETSLVGKDLEMDILEQLGALGSFNASVARGVSALHGRPDGSLLDDPEPETTPLDAGQEDSQVVVVRSGKSQERKLRRMRASSDEKGSRTSVKVNPPRRPKKSRKASSSQFISEWKSHPGQRRIIVREQSALLSTIKECAGLEKIREKMVKEGQEVSYHRWAEAAGVDEAELVSRLQAGYCCRDRLLVTTEWLVRCIARTYTGMGTALDDLLQAGKMGVLDGAEKFDSRKGCRFSTYVKYWIRKGMLALLAENSGVTLLPVRRSTYIYMHVFFRSTHHA

SEQ ID NO: 187948 - protein, 508 aa, Zea Mays
MAFPAKASQQGRCHSSRIFIRGASNRRGQIICGQLDKAQERKLLNDALDRTGVRYETESWMDEETSSWMDRDLTDSDLRYRLLMQNLEELETSLVGKDLEMDILEQLGALGSFNASVARGVSALHGRPDGSLLDDPEPETTPLDAGQEDSQVVVVRSGKSQERKLRRMRASSDEKGSRTSVKVNPPRRPKKSRKASSSQFISEWKSHPGQRRIIVREQSALLSTIKECAGLEKIREKMVKEGQEVSYHRWAEAAGVDEAELVSRLQAGYCCRDRLLVTTEWLVRCIARTYTGMGTALDDLLQAGKMGVLDGAEKFDSRKGCRFSTYVKYWIRKGMLALLAENSGVTLLPARMESIMRKVKEARRGIRYRQGRNPSDSEVAAAVGVSVANVRLARKCSRRAVSLYSEVAIGQDVKFAEVIPDESASPDEAALFRGQLRERLLLVLGRLPAREGRVLRLRHGLEDGRCRSLEEIGGIYGVSKEWIRKIEKSAMARLRDDDAVRRDLHDFV

SEQ ID NO: 187949 - protein, 103 aa, Zea Mays
MYWQVLKLMYHAPVTSSYHQSTWAKIGRIVNPYIHRYAPFLQTPISAIQRWWFRILEGHYHNKKVFSCRATNAELQNSAKMFRVFFLLGTDACLRRFACNLCF

SEQ ID NO: 187950 - protein, 128 aa, Zea Mays
MVQSISSMTRMDRLSMLTRSLLRSELDVTAVSSRSYMSNLRWLAMAAIRLDFPVPGGPYRRSSMMDCFSFLSMASVSNVDGWWSSIGDQLPYSVMCIMRVLSWALMALAVAKMNGRRCWMSVFMRVAR

SEQ ID NO: 187951 - protein, 65 aa, Zea Mays
MELLTHKLQVRCLHMPLHLCYRGPGPPQLKSDHQDFAKWETRTNFNLLELGSGENIHVGLTYRYN

SEQ ID NO: 187952 - protein, 490 aa, Zea Mays
MTSTVTTPSRPLAAGSRPRRSGPAVLSLSKGGGGQRRQRRLAPSTSCAVLASPDKQSTANKLPLSSRKQEEEVEKATDYNEVAAALETIYKLSPAVEVEEKKRQGGNEDDGGGEAKKKRKRRVAGRSTVVVRSRRRRGGRRMDLGKRVEMKGAAAASREQQQGGEEQGEREFEEMLLREHSVSTDMGSLDWKRMKIPPVLTSSQSARLFKTMQPMKAIFEAQESLREELQRDPTDAEVAEATGMTVHQLRRRLDVGRAARNKLIKHNLRLVPYALNKYYPDMGGDERFDELCQAGANGLITAIDRFEPKRGFRISTYALFWIRHSIVRAMTLSSFTRFPFAMESERQEIGRAREELAFELGRPPTDEEVRARVGLSPQRYRDVLRMARPTYSLHARNRVTQEELIGEVTDAEAVGVDAGGKHDALLRLAIDDLESLVIRQRFGLDGRGRRTLSEVAGNLSISREMVRKYELKALMKLKHPTRVEYLRRYM

SEQ ID NO: 187953 - protein, 350 aa, Zea Mays
MDLGKRVEMKGAAAASREQQQGGEEQGEREFEEMLLREHSVSTDMGSLDWKRMKIPPVLTSSQSARLFKTMQPMKESLREELQRDPTDAEVAEATGMTVHQLRRRLDVGRAARNKLIKHNLRLVPYALNKYYPDMGGDERFDELCQAGANGLITAIDRFEPKRGFRISTYALFWIRHSIVRAMTLSSFTRFPFAMESERQEIGRAREELAFELGRPPTDEEVRARVGLSPQRYRDVLRMARPTYSLHARNRVTQEELIGEVTDAEAVGVDAGGKHDALLRLAIDDLLDSLKPKESLVIRQRFGLDGRGRRTLSEVAGNLSISREMVRKYELKALMKLKHPTRVEYLRRYM

SEQ ID NO: 187954 - protein, 91 aa, Zea Mays
MNIPFKGSIKVWSAAKSVVHQWPDLLKGVKFDPSNQELIWHLLAKHGKSGKKPPIRSLTSSFQQLKKMKASGTLIDRNFQVSMDDIAPMIR

SEQ ID NO: 187955 - protein, 147 aa, Zea Mays
MGNTSSRFPFAFSSGFSSQNVPNPPLDSFFLLGFHHRMGLISHMAQQTQIQYGPLAMNIPFKGSIKVWSAAKSVVHQWPDLLKGVKFDPSNQELIWHLLAKHGKSGKKPPIRSLTSSFQQLKKMKASGTLIDRNFQVSMDDIAPMIR

SEQ ID NO: 187956 - protein, 178 aa, Zea Mays
MTNPFPALSLDKDIFVFFLEIIYSTIFFYFARSMKDRSGTVVTSLLIERRPSWVRCSLSAKCRGFHHRMGLISHMAQQTQIQYGPLAMNIPFKGSIKVWSAAKSVVHQWPDLLKGVKFDPSNQELIWHLLAKHGKSGKKPPIRSLTSSFQQLKKMKASGTLIDRNFQVSMDDIAPMIR

SEQ ID NO: 187957 - protein, 173 aa, Zea Mays
MTNPFPALSLDKDIFVFFLEIIYSTIFFYFARSMKDRSGTVVTSLLIERRPSWVRCSLSAKCRGFHHRMGLISHMAQQTQIQYGPLAMNIPFKGSIKVWSAAKSVVHQWPDLLKGVKFDPSNQELIWHLLAKHGKSGKKPPIRSLTSSFQQLKKMKASGTLIDRNFQVLLSSF

SEQ ID NO: 187958 - protein, 95 aa, Zea Mays
MTNPFPALSLDKDIFVFFLEIIYSTIFFYFARSMKDRSGTVVTSLLIERRPSWVRCSLSAKCRGFHHRMGLISHMAQQTQVWLESLYILNLSLGI

SEQ ID NO: 187959 - protein, 89 aa, Zea Mays
MPTIQWGRRTRTVLDVGCGVASFGGYLLDRNAITMSFAPKDEHEAQIQFALERGIPAFIAVIGTQKLLFPDNVFDVVHCARCRVHWYAN

SEQ ID NO: 187960 - protein, 86 aa, Zea Mays
MAHIVCRDENRYLLGYHFFGLFSLIVNKYDIQCAIQIHILISSNELVKIHKRQISNLSYIFSNVRYKIRIQFGYRYFFTFFVVGSK

SEQ ID NO: 187961 - protein, 594 aa, Zea Mays
MGSHDGEDEELPPPPPVPPDVIPIKAEDAVGESPANHILKPKRLLMDRPGIGRKGQPTQLYSNHFKVAVKSTEDVFFHYYVNLKYEDDRPVDGKGIGRKVIDKLQQTYRAELSNKDFAYDGEKSLFTVGGLPQKKNEFTVVLEDVSTGKLVLVFDLLSCCLCLPRISNCHVFCLWKRVRRPYQTKTFKVEINFAAEVPMSAIGQVIRGEESENSLEALRVLDIILRQHSAEQGCLLVKQSFFYNNPSCFVDLGGGVMGCRGFHSSFRGTQSGLSLNVDVSTTMIVKPGPVIDFLLSNQNVNDPSRIDWQKAKRALKGLRIRTTPANSEFKIFGLSERICKEQTFPLRQRNGSNGDCDTIEITVYDYYAKKGIDLKYSGDFPCINTGKAKRPTYFPIELCSLVPLQRYTKALSTLQRSSLVEKSRQKPEERMTVLNDALQRSNYDSDPMLRACGVSVAPKFTQVEGRILQAPKLKAGNGDDIFSRNGRWNFTNRKFYETCSVNKWAVVNFSARCDVRNLIRDLMRNASAKGIQMEEPFDVFEESPSMRRAPVSRRVDDMFGQIKSKLPGAPRSLEEKVPGRVWYCHTVSSSIKSQ

SEQ ID NO: 187962 - protein, 880 aa, Zea Mays
MGSHDGEDEELPPPPPVPPDVIPIKAEDAVGESPANHILKPKRLLMDRPGIGRKGQPTQLYSNHFKVAVKSTEDVFFHYYVNLKYEDDRPVDGKGIGRKVIDKLQQTYRAELSNKDFAYDGEKSLFTVGGLPQKKNEFTVVLEDVSTGKTAANGSPGGNDSPGGGDRKRVRRPYQTKTFKVEINFAAEVPMSAIGQVIRGEESENSLEALRVLDIILRQHSAEQGCLLVKQSFFYNNPSCFVDLGGGVMGCRGFHSSFRGTQSGLSLNVDVSTTMIVKPGPVIDFLLSNQNVNDPSRIDWQKAKRALKGLRIRTTPANSEFKIFGLSERICKEQTFPLRQRNGSNGDCDTIEITVYDYYAKKGIDLKYSGDFPCINTGKAKRPTYFPIELCSLVPLQRYTKALSTLQRSSLVEKSRQKPEERMTVLNDALQRSNYDSDPMLRACGVSVAPKFTQVEGRILQAPKLKAGNGDDIFSRNGRWNFTNRKFYETCSVNKWAVVNFSARCDVRNLIRDLMRNASAKGIQMEEPFDVFEESPSMRRAPVSRRVDDMFGQIKSKLPGAPRFLLCLLPERKNCEIYGPWKRKCLAEFGIVTQCLAPLRVNDPYLLNLLMKINAKLGGLNSLLQVEASSSIPHVSQVPTIILGMDVSHGHPGQDRPSVAAVVSSRQWPLISRYRASVHTQSARLEMMSSLFKPRGTDDDGLIRESLIDFYTSSGKRKPEHIIIFRDGVSESQFTQVINIELDQIIEACKFLDEKWSPKFTVIVAQKNHHTKFFQTASPDNVLPGTVVDSKVCHPKNFDFYMCAHAGMIGTTRPTHYHVLHDEIGFSADEMQEFVHSLSYVYQRSTTAISVVAPVCYAHLAAAQVKIRPSKRRRMSSFTS

SEQ ID NO: 187963 - protein, 586 aa, Zea Mays
MGSHDGEDEELPPPPPVPPDVIPIKAEDAVGESPANHILKPKRLLMDRPGIGRKGQPTQLYSNHFKVAVKSTEDVFFHYYVNLKYEDDRPVDGKGIGRKVIDKLQQTYRAELSNKDFAYDGEKSLFTVGGLPQKKNEFTVVLEDVSTGKTAANGSPGGNDSPGGGDRKRVRRPYQTKTFKVEINFAAEVPMSAIGQVIRGEESENSLEALRVLDIILRQHSAEQGCLLVKQSFFYNNPSCFVDLGGGVMGCRGFHSSFRGTQSGLSLNVDVSTTMIVKPGPVIDFLLSNQNVNDPSRIDWQKAKRALKGLRIRTTPANSEFKIFGLSERICKEQTFPLRQRNGSNGDCDTIEITVYDYYAKKGIDLKYSGDFPCINTGKAKRPTYFPIELCSLVPLQRYTKALSTLQRSSLVEKSRQKPEERMTVLNDALQRSNYDSDPMLRACGVSVAPKFTQVEGRILQAPKLKAGNGDDIFSRNGRWNFTNRKFYETCSVNKWAVVNFSARCDVRNLIRDLMRNASAKGIQMEEPFDVFEESPSMRRAPVSRRVDDMFGQIKSKLPGAPRSLEEKVPGRVWYCHTVSSSIKSQ

SEQ ID NO: 187964 - protein, 325 aa, Zea Mays
MDGPTTIEKEGVSLSFRFRPTLHPHHIYNNYIRNIPSLVGFSLQSMALFAIASIRQPILACLINYRMALFAIASIRQLILACRINYRTLVQPSMVSEYDLGGEGDLFKAPQVIIQEEALLSLDPVAAACSMMNQTIKDAGIQNDALLSEVLYECEKELMEKSAIEETISELMDVKIPMLQAEQLPAMENEKRSIPECSLQKSVSSGCLNSADWMNGAVRPNFLDFQGLDFEAAFGLRRAYSEGDIQNLGANTPRPAANVCVTISDLKTEERKQKLSRYRKKKIKRNFGRKIKYACRKALADSQPRVRGRFAKIEECDLLLLNSST

SEQ ID NO: 187965 - protein, 229 aa, Zea Mays
MYADALASSQPPPPPFLSMGVMDHEAYAAVPSMVSEYDLGGEGDLFKAPQVIIQEEALLSLDPVAAACSMMNQTIKDAGIQNDALLSEVLYECEKELMEKSAIEETISELMDVKIPMLQAEQLPAMENEKRSIPECSLQKSVSSGCLNSADWMNGAVRPNFLDFQGLDFEAAFGLRRAYSEGDIQNLGANTPRPAANVCVTISDLKTEERKQKLSSMLVGRLWQTASQG

SEQ ID NO: 187966 - protein, 71 aa, Zea Mays
MPLTPLSPCAGFIGVLDLGGCVRGRQCSPLRIASSRGGLGDQHWANFSPVVHRRRETAPHRGRGTLCLHPR

SEQ ID NO: 187967 - protein, 84 aa, Zea Mays
MPEHAGEPPRWRVYRAGRLPRHALRWGACMRRPEEQVERPAARGDTSAGAEQQAAMPGRRSRARLRAWEAQARWSEDSSARQLS

SEQ ID NO: 187968 - protein, 52 aa, Zea Mays
MAGRPETRQHFEPGVRAAGGWYATAFVIRSDCRGSILLTCDHNIPLQEDVPD

SEQ ID NO: 187969 - protein, 105 aa, Zea Mays
MGIENTTAWQEYIDAATLRGWPFGMRVQLHEKPQRVIAQDEDERYPSGYVEAEQPDRAEGRRAYDIESQGVADEGERIIRIVDEMEAEDREAQEMEECGDSSDDE

SEQ ID NO: 187970 - protein, 70 aa, Zea Mays
MLCREIQEAPIISSWYQDRKEHQAFFSEPSSVLVHVSGHFNTVPLYYGTFLTGKYKGQILSAIGVDCNNQ

SEQ ID NO: 187971 - protein, 87 aa, Zea Mays
MRESWRVMTHEVPVLISSRGCILLLLGLLILLVLLQLLNRSSESLQNLHLRGDELLHVGIRWWWWWCLLSTLVPVVRSLTLVHHLIC

SEQ ID NO: 187972 - protein, 70 aa, Zea Mays
MGQEEPTSSRPYAFACDEKKKGKKKAPIPSSSSEEEEEEESDDDKDDQPSTSSSEDEETVRRVRKVMRMI

SEQ ID NO: 187973 - protein, 105 aa, Zea Mays
MVSSHLAFSASASAFAASSASSDAASGTADITTQNSFRSVSHMRVLICQRLKLAPSNGLMTSEPEAITQIGFLDCCSFIEISDMLPTYLKILNILIPNKTSIQLR

SEQ ID NO: 187974 - protein, 72 aa, Zea Mays
MSYLTAALKSGLSLDQSHDVWSIYQVLVLVHLEVIKLHHHEQDHIHYFSLHHMINNVPEFIFDFPFVPTLWQ

SEQ ID NO: 187975 - protein, 127 aa, Zea Mays
MGTRSKQVSLLRAFKTKFIILVNNQAIFNVGTRPNQVSLFKAFTTLLNFLSEKCGLIITLDVTFCGGVVEAFGGGIGFHLLFLPLSNPQILDIFFKGCSACHGCSRLKLLHHVITVILRRLGNAFPF

SEQ ID NO: 187976 - protein, 73 aa, Zea Mays
MSTLTSLFIGMRNRGPPASSWARRPRSRREIKGPVNRWANWWRSILTFSPLISSYTFHFIPFNSFRIPSQSSA

SEQ ID NO: 187977 - protein, 70 aa, Zea Mays
MRRAIPCTREEHCIRPSPWGFFLFLFFFIQHAIHQFSFRRIFFLLVCATAAVSPATRARRVRVASRVLSA

SEQ ID NO: 187978 - protein, 50 aa, Zea Mays
MSIGDVCPKESEEPPNAQDQPSSSMQASPPTQNEDEAQVDEVEDQAIEPP

SEQ ID NO: 187979 - protein, 208 aa, Zea Mays
MANTMAHMQAQLNNNQQHQHQPPPRDKHREFMSHKPPTFSSSLDPLQADDWLKSVEKMLNIAQCTNREKVLYASGRLTGPAADWWDAYCAAHTATDTITWAEFSTNFRSYHIPAGLMKIKKKEFLSLRQGGMSVSEYRDKFIQLSRYAPEEVADDEKKQELFLEGLIGPLQYQLMSHSFPSLQKLLDKAIALEHKRVQLGEMKRKAIT

SEQ ID NO: 187980 - protein, 144 aa, Zea Mays
MLYNGRRPGIKDGIGFQRRDNVKLSAPPKRLSNFVKGKAPMPQDNEGYILYPAGYPESKIRKIHSRKSHSGPNHAFMYKGETSSSRQPTHAKLPKKTPNASNDRNISFKTFDASYVLTNKSGKVVAKYVGGKHKGSKTCVWVPK

SEQ ID NO: 187981 - protein, 58 aa, Zea Mays
MCFQVYFKPSHRCIERELESSAKTKASTPLHYSSFAGTPSRSLSLGEKEQSKRTPTLV

SEQ ID NO: 187982 - protein, 51 aa, Zea Mays
MKCWVAVLPEQRHLVVPEPGLILAWIMRQLPCCGPSLHGGSPSLQTCLQSF

SEQ ID NO: 187983 - protein, 126 aa, Zea Mays
MAQYKTQKSNVHRNEQLESEWLPPFEYHQGWSRRGGLVELLDRLLGEVVFEPESLAHPPCLGHLHLPLDQCPLLEVARCLKLDLHFLEPDPHLELVEKLVWRMMVDLVLVEAPRALVGTHLQWKCS

SEQ ID NO: 187984 - protein, 754 aa, Zea Mays
MTGEKKMFTSYVKNKDSQDMIIFGDGNQGKVKGLGKIAITIEHSISNVFLIESLSYNLLSVSQLCHMGYNCLFTNIDVSVFRRSDGSLAFKGVLDGKLYLVYFTKENADLDACLIAKTNLGWLWHRRLAHVGMKNLHKLLKGEHVLGLTDVCFEKDGPCAACQAGKQVGTSHPSKNVMTTSRPLELLHMDLFGPVAYLSIGGSKYGLVIVDDFSRFTWVFFLQDKSETQGTLKRFLRRAQNEFELKVKKIRSDNGSEFKNLQVEEYLEEEGIKHEFSAPYTPQQNGVVERKNRTPIDMARTMLGEYKTLERFWSEAVNTACHAINRLYLHRLLKKTAYELLTGNKPNVSYFRVFGSKCYIIVKRGRHSKFAPKAVEGFLLGYDSNTKAYRVFNKSSGLVEVTSDVVFDETNGSPREQVDLDDVDENEVPTAVMRTMAIGDVRPQEQQEQDQPSSSTMVEPPTQDEEQVPQDEGMDQGGAHEEKDKEEEEVPQAPPTQVRATIQKNHPVDQILGDISKGVTTHSRIANFCEHYSFVSSIEPFRVEEALQDPDWVMAMQEELNNFKRNEVWSLVPRPKQNVVGTKWVFRNKQDEYGAVTRNKARLVAKGYAQVAGLDFEETFAPVARLESIRILLAYATHHSFKLFQMDVKSAFLNGPIKEEVYVEQPPGFEDDRYLDHVYTLSKALYGLKQAPRAWYECLRDFLISNAFKVGKADPTLFTKTCNGDLFVCQIYVDDIIFGSTNQKSCEEFSRVMQ

SEQ ID NO: 187985 - protein, 50 aa, Zea Mays
MLKGTSSQHVLQYLISPFRLSISLRVIDCTKIQLRIHILMKTFPKSGGKL

SEQ ID NO: 187986 - protein, 80 aa, Zea Mays
MAVSNVLSSSHSRLATRHLIKDHPTMLRRREKHLTISMCVSAVESLDTMLITVQKSRIGRFRRTRMSIRNLMPGHPTVEG

SEQ ID NO: 187987 - protein, 76 aa, Zea Mays
MFNCKKIEFIKEDPEKFELIQIWFENIENRKKKNKKRKWKKNSNATWAEQPHFGPSRQIAATRAAQTLPGADTRGP

SEQ ID NO: 187988 - protein, 81 aa, Zea Mays
MPGDTTNVADKVLLFLLHLFGLRLVSILLWRVLLLEFSISTLLNNVSLELLGWLVTGPCTLFHIYRSSQLSESHLLLHVAA

SEQ ID NO: 187989 - protein, 61 aa, Zea Mays
MFGLEPVVVLVVLSHLLASSIFSQVLQRLVIVLNSLLCVIWCVIFHYVYTCASCISIRYAS

SEQ ID NO: 187990 - protein, 67 aa, Zea Mays
MCCVCPSSCWYGWGEQEQRQQAGTGRAHSTGQASQISVGMKRACLLAFCFISTHYIYIYIYIYIYIY

SEQ ID NO: 187991 - protein, 131 aa, Zea Mays
MAPLQAAALALHTMCPNSRWSSQPILSDTTSPFFPHRRARRIPARGKQKALLRATGDGRGIRASIGLRSERTRDGDGDGGSRSDKPRPGRSPSCFYLAILPGQGSPMRRLAYFSTLLVNRSIWCGRDKICS

SEQ ID NO: 187992 - protein, 73 aa, Zea Mays
MHMNAMHMSSAFIPKGMKPHRTPPRATYDAKMYRYGRTIGHDKTSDANESCNVYGMLHLSINFTSFRYNTNLK

SEQ ID NO: 187993 - protein, 112 aa, Zea Mays
MQCVSPLPSYLLEYKTTPSTNITSMNAYECNAYVLCLHTSKGMKLHHTPSWATYDAKLYRYGRTIGHDKTSDASESCNVYGMLHLSIYFTSFTYNTTSNNTSFTFRYNTNLK

SEQ ID NO: 187994 - protein, 67 aa, Zea Mays
MGRGEIIVTYTSKTLIYIKDICTHTLPICASVSNLSSNCQESKAYALIPTVTPRDPQTPRNATKLHN

SEQ ID NO: 187995 - protein, 53 aa, Zea Mays
MAAAHHFFLLPRSPPPPRSKDREEEEQDGLKRKRGSRRCSTPPHLLQIFLRKP

SEQ ID NO: 187996 - protein, 55 aa, Zea Mays
MKQHAMNLKASHRCNQHYNFTPSNWDATIHQHQCLKTTLFYEGVICTKHNPYQLQ

SEQ ID NO: 187997 - protein, 85 aa, Zea Mays
MPIIDLVIIYVMEFQQSPGITRPAGGQDRRSMLMCGVMLPPARSYFQSYASAGVHTGGQWVRWNARDKVTVSVSTACEHAERTRC

SEQ ID NO: 187998 - protein, 68 aa, Zea Mays
MPWIWDRVSLNPAIPYMKRQSRTGSGEMARVARTLLAKDRLKGVVCSRVAWTCSCSGGSVGTVDICKG

SEQ ID NO: 187999 - protein, 66 aa, Zea Mays
MTCTSHHPSCILKLCRDLMVRPYRYIFSIVRCPRRGTMRLHILRGMKAKVILAFADICTHEEIYEV

SEQ ID NO: 188000 - protein, 112 aa, Zea Mays
MQCVSPLPSYLLEYKTTPSTNTTSMNAYEYNAYVLCLHTSKGMKPHRTPPRVTYDAKLYRYGRTIGHDETSDASESCNVYGMLHLSIYFTSFTYNTTSNNTSFTFRYNTNLK

SEQ ID NO: 188001 - protein, 77 aa, Zea Mays
MSISSQLELDSNLNSRNKKRRKQKRKKKKKKKKGKLCAWANFVPFGPVTKPYCAARLSTVKWRRQVGPFRQSDGAHL

SEQ ID NO: 188002 - protein, 72 aa, Zea Mays
MSVVLMLDISIAALGWSFPFDIWSVSCILFVILVLSVFIAIRSRLQAGSYYTFRFSFVMSRCDNFFSHNRDC

SEQ ID NO: 188003 - protein, 52 aa, Zea Mays
MDYMRPDGITTVRDQLMVAMQRSQLSAVVILQFSQFRTSTTASWRTEDASKA

SEQ ID NO: 188004 - protein, 50 aa, Zea Mays
MWLVAKSPPQQAYIERSLIDTDGRTFLLNVWSTFHIISQNLIPERGTHLE

SEQ ID NO: 188005 - protein, 148 aa, Zea Mays
MSIGDVCPKESEEPPRTQDQPSSSMQASPPTQNEEEAQVDEEEDQSNEPPQDDGNDQGGDANDQDKEDEEQRPPHPRVHQAIQRDHPVDTILGDIHKGVTTRSRVAHFCEHYSFVSSIEPHRVEEALQDSDWVVAMQEELNNFTRNEV

SEQ ID NO: 188006 - protein, 119 aa, Zea Mays
MTPFQGEEDDMTMPLSNTLQPPSHTTSTQVQPTSSPTQAFDGPITHSRAKKLHQEVHVLLYEFQLNTNENFMLPKSCMLILLRFTKEEGQNISRANQQEELCPGQSSATEPSRRNSDIF

SEQ ID NO: 188007 - protein, 90 aa, Zea Mays
MRGVGDLQDPDSGPTSHSGACAGDDRVGSKGEWPRCRAGQQNSAQRAISFSLFFIFFLNLNLDFKFVVYLYSILCIYALIRLLWNKFIHL

SEQ ID NO: 188008 - protein, 76 aa, Zea Mays
MAASHHFFLLHRSSPPPRSKDREEEEQDGLKRKRGSRRCSTPPPSIADFLGETLGKYGILVPPYNYVFLEVVDHVD

SEQ ID NO: 188009 - protein, 61 aa, Zea Mays
MLGYSATKINNQPTSMYIFLLFILSAKSYINVTLSMTSSKLRTHRGRVCFCAHALSLALDL

SEQ ID NO: 188010 - protein, 59 aa, Zea Mays
MALVILRLLSSISTSISGLNCDPFKMLINSIFFWFKYLVKTIYLLRFFHLTLALLNAGT

SEQ ID NO: 188011 - protein, 59 aa, Zea Mays
MALVILGLLSSISTSISGLNCDPFKILVNSIFFWFKYLVKTIYLLRCFHLTLALLNAGT

SEQ ID NO: 188012 - protein, 70 aa, Zea Mays
MERLHPSNYYNQLCTLGTIKTCNNYNSSYVVKLELWKCKICFCKVFRSISEVCVSNVITIMYMLCGRSLG

SEQ ID NO: 188013 - protein, 82 aa, Zea Mays
MIKLWNLNSICHMHCIAGDVGTFVLLFNWVGIYLYLVIANKILTNFKSNAQLQPSSLVSLTLHVSSHLWRVHAHYSPQLVEQ

SEQ ID NO: 188014 - protein, 133 aa, Zea Mays
MLVGLIEATSLIIWDETFMTHRNAFEAVDRSVCGLLSLNCSQASQVPFGDKTIVLGGDPRQILHVIEGGTWAQIINAAITNSTLWNSVTILHLTQTMRIYSTHLTESERAQLAYFSAWILDVGNGTIPTIEKQ

SEQ ID NO: 188015 - protein, 64 aa, Zea Mays
MRVNMMAERGLKGLRLGTDSRRMRGGRFGGVDSTFAEVEDDPWVPHSEAARAHAQRRSRTRSLG

SEQ ID NO: 188016 - protein, 54 aa, Zea Mays
MQVNHAMYMACCIYQYTSLPSHTIQPQIILHLPSDTIQTSNNTSFTFRYNTNLK

SEQ ID NO: 188017 - protein, 82 aa, Zea Mays
MTCTSHHPSCILKLCRDLMVRPYRYIFSIVRCPRRGMMRLHILRGMKAEVILAFADIYTHEVYMKCDITMLLLWFLPARCGD

SEQ ID NO: 188018 - protein, 103 aa, Zea Mays
MPMRTKATTRQTQAEGVISTWACGGAWPRRGADPKAVASSGEELHRAPRSPMLADTSHRYHGTWQSSWLIRRGSDNDGGESPRRPPFPLFYARDKHSRWGGFR

SEQ ID NO: 188019 - protein, 59 aa, Zea Mays
MFHLTLALLNAGACCSSRGVGSSSTSTFTLIIMLPRHSHDLIKNFLSKDVCFKLVVHTD

SEQ ID NO: 188020 - protein, 105 aa, Zea Mays
MRLKNCYSKTAITFWSDVRLRCSSRPRKDLQIIYDSYIDFSFFEATKTTENWHEQKLSNLPFCRKLNSGSKPNPTSNPTSNPSIPMIHNLQKPIITGRNKDLIHT

SEQ ID NO: 188021 - protein, 81 aa, Zea Mays
MENGPSAGMDSAFLFLFYISCFLSFFVFSFQVHIKIQNSEFMFKCYHMNAKYIVLYFYIKMFYSLVLVKGPKCAMHTFISF

SEQ ID NO: 188022 - protein, 60 aa, Zea Mays
MKLIYVIVYLCFELIIPYVVLCPFKVHSYVRTCLVCCLFVFSKCIECMLALFRQRAVRGS

SEQ ID NO: 188023 - protein, 59 aa, Zea Mays
MFHLTLALLNAGACCSSREVGSSSTSTFTLIITLLRRSHDLIRSFLSKDVCFKLVVRTG

SEQ ID NO: 188024 - protein, 85 aa, Zea Mays
MPQTESTLFPCFSPSVTSKKKQKKQTESTAVSLFFSFGYEKKTEKKTESTSFPCFSPSVTSKKKQKQKNNEGERIRLFHPGRLKT

SEQ ID NO: 188025 - protein, 54 aa, Zea Mays
MQVNHAMYMACCIYQYTSLPSHTIQPQIILHLPSDTIPTSNNISFTFRYNTNLK

SEQ ID NO: 188026 - protein, 64 aa, Zea Mays
MRQLLCFLSLFFCLFSGSILSLSFSFFSFLFFCFYFFYVTEGEKQGNSVDSVCGVIKREMVATR

SEQ ID NO: 188027 - protein, 88 aa, Zea Mays
MNAYECNAYVLCLHTSKGMKLHRTPPRATYDAKLYRYGRTIGHDPTSYASESCNVYGMLHLSIYFTSFTYNTTSNNTSFTFRYNTNLK

SEQ ID NO: 188028 - protein, 75 aa, Zea Mays
MCGLSLCVPSLKLSPPSATSSSGCPLSSASPLRSSSVTMVGSSITLPPAPSFSPTGCNCGCLARIPPPRTARLSA

SEQ ID NO: 188029 - protein, 51 aa, Zea Mays
MVCASIVSPCEMSFTISHVLNRRLCQSSVCPGFCSRSSLMCCWINGSIISS

SEQ ID NO: 188030 - protein, 86 aa, Zea Mays
MSPPVLVMPDLQKGFDIYCDACGQGLGCVLMQEGHVIAYASRQLRKHELNYPTHDLELAAVVHALKIWRHYIMGTKCQVYTDHKSL

SEQ ID NO: 188031 - protein, 86 aa, Zea Mays
MHSRCNKQNEMSMHMMPCSSFSVSNTRGVTPPSSRNNKTPLFHHLQQHGFENLEYGVYFRKSYPTKENTLKDMLACGIQGKADQES

SEQ ID NO: 188032 - protein, 52 aa, Zea Mays
MKAVRPLQSLPIPTWKWEDISMDFIVGLLRTTVWISLWDYSGQLKDSTLFGS

SEQ ID NO: 188033 - protein, 105 aa, Zea Mays
MQPNHITRCKSNMFSSFTTSNLILSISSSNVLVCLFMEVNHLFNMCNIPDMWGVLSIKRKQINRCPRNVTINNLKGAHLCIRMCCTIISKFNMRQAILPMSQFFV

SEQ ID NO: 188034 - protein, 74 aa, Zea Mays
MEGTTPVAGGAAGLVVLSRGVVLVVDGTEREGAELDVRLCPAKELVCVLDRRPCTSRSALQAYSNNVVISKYSL

SEQ ID NO: 188035 - protein, 230 aa, Zea Mays
MSAASPSTCVRTSRSCASVVSSSPAIVSANTKQSLRQQGWGLGAHSSAVIKFLSVFTKHTGVSCNQHVEPAKDWRSDCQEKQSLLVVELYGVLGRLHSKQGLAQSNNNARLNYSTKHIIKAARNKVQRWSKGRGAKENRKRRTSSSGCAPLGVLRDAPTQGNLRFVSPFFPFFLFFCFSFFSLRRNSQTDYMGKGIQKKVTTHTLSLSRAGRSGLGNQEARSFPFFFAFD

SEQ ID NO: 188036 - protein, 63 aa, Zea Mays
MRSKPRLFDSGPESPGGHNSTMAPPSSCGRLCWCCRRKKVKPWPFDPLLAFRIRLVGCVIVCR

SEQ ID NO: 188037 - protein, 169 aa, Zea Mays
MLAHGRRSQDQPPSAVRLSPCALSLTRAQLLARVSGAQPPSSLCSRRTPSLSQELEFLYFFPQPRAVLLLCSLVAMAMAAELPCRGFQLPRRARSVPSFPAVTPPWCFLARSLPQLPFVVVTSRRPCSDSISPTPAPSRCLLGFVSLRAAVGFSVQRSSSPASVVLDSM

SEQ ID NO: 188038 - protein, 50 aa, Zea Mays
MKRMREIDVLVLRRVVGMLGVLLHAPRGPFYSPKAARSRWEQTWKAIFAF

SEQ ID NO: 188039 - protein, 144 aa, Zea Mays
MLVDIELSSPTITNTISFPRTTTIGSITLPCVNNTCKYHFNVCIGMQCVGTLSSYLWGYKTTSSTNITSMNAYECNAYVLCLHTSKGMKPHRTPSRATYDAKLYRYGRTIGHDKTSYANESCNVYGMLHLSINFTSFRYNTNLK

SEQ ID NO: 188040 - protein, 74 aa, Zea Mays
MVVNQVFSSPPPVLKKENEIVHRFFCQKCGAEGHHARDCFKSLWCDICHKETHMTARCVLPKQNKPCMPIVGMA

SEQ ID NO: 188041 - protein, 75 aa, Zea Mays
MLSSSSLSLSLPIFATTCSASALEVPSAVAFSCITRPDRLITSDMGAVSVTSVSSPSRDTLAVDLTLAILVLGTL

SEQ ID NO: 188042 - protein, 62 aa, Zea Mays
MKQHVMKLKACHSCNKHYNFTPSNLDAAIHQHLCLKTTLFYEGVIWTKHNPYQLQPLILIKW

SEQ ID NO: 188043 - protein, 131 aa, Zea Mays
MNSRLSAWVPSQSYWRTEQEPNCREDLEAGKQELGHGKQRRLKVQYLWIFPSQIPFQKAPSQHPAVTSKTPACHVVTRQLLPKHQRATSSPDGHSHIITRLLPSAWPAQPVLIRSLSLKRRRRLQSLGSYL

SEQ ID NO: 188044 - protein, 62 aa, Zea Mays
MMTSVLKPGGGIVLPGWASLYPRDSILLSFWVHGLCGSIEIGVFLIIVTLALRWCWQLQGRS

SEQ ID NO: 188045 - protein, 75 aa, Zea Mays
MQIYLLICYLHNLMSSVEYAKRKKMNSRNPQTPSYKFIYLFFLPILGFTNPTPLNRNLVLEICKERDVESHRFWL

SEQ ID NO: 188046 - protein, 98 aa, Zea Mays
MTPEEILGKFVSGRMMIKEARYVDDALNGPIHEPQPIALKATRSKEALPSKVAQVEAAGLNDEEMALIIKRFKTALKERKGQPYKNKTKGKRSCFKCG

SEQ ID NO: 188047 - protein, 366 aa, Zea Mays
MTGEKKMFSSYVKNKDPQDSIIFSDGNQGKVKGLGKITISSEHSISNVFLVESLGYNLLSVSQLCNMGYNCLFTNVDVSVFRRSDGSLGFKGVLDDKLYLVDFAKEEAGLDACLIAKTSMGWLWHRRLAHVGMKNLHKLLKGEHVIGLTNVTFEKDRPCAACQAGKQVGGAHHSKNVMTTSRPLELLHMDLFGPVAYLSIGGSKYGLVIVDDFSRFTWVFFLQDKSKTQGTLKRFLRRAQNEFELKVKKIRSDNGSEFKNLQVEDYLEEEGIKHEFSARYTPQQNGVVERKNRTLIDMARTMLGEFKTPERFWSKAVNTACHAINRVYLHRLLKKTSNELLTGNKPNVSYFRVFGSKCYILVKKGK

SEQ ID NO: 188048 - protein, 55 aa, Zea Mays
MGELSYFLGFQVRQLKDGTFISQTKYTQDLIKRFGMKDAKPAKTPMGTDGHTDLN

SEQ ID NO: 188049 - protein, 152 aa, Zea Mays
MALFNDQAGAASDPKLVLPITGGSCSEPANKKQKKEAQRRVQHVGVQGPFIKSRWSHIPITFSQEDLQLKDFPHNDAMVISCVIKGFLVHNVLVDTCSAANIIFAKAFRQMQEPEDKIHDATHPLCGFGGRQIVALGKITMSVTFGFINNTR

SEQ ID NO: 188050 - protein, 420 aa, Zea Mays
MKIPSDQGPIAIHGSQEAARRAEGNWTDSKPIHNIDGAEACEQYKFRREKAASADQPKPMLLCEDIAEQKVLLGSQLSEEQEKTLIRFLFNNKDVFAWSANDLCGVNRDVIEHSLNVDPSFRPRKQRLRKMSDDKAEGACNEVKRLLSAGVITEVKYPEWLANTVMVKKANGKWRMCIDFTDLNKACPKDEFPLPRIDSLVDAAASSELMSLLDCYSGYHQIWMKKEDESKTSFITPSGTYCYLRMPEGLKNAGGSFSRMTAKVLQSQIGRNVLTYVDDIIVKSTKQKNHIVDLQETFASFRQAGLKLNPEKCVFGVKKGKFLGCLVSTKGIEANPSKIEAILQMEPPTTKKGAQRLTGRLASLNRFISRSAERNLSFFEVLKSAEVFQWGPSQQKTFEELKQYLIDLTTLTPPTPGAPL

SEQ ID NO: 188051 - protein, 88 aa, Zea Mays
MGIRRAILKTDSQVVSGHIDKSCKAKDPKLEKYLDMVRRVEASFEGFSVKNIPRGQNEHADLLAKSAAQGLPLPLDVFFETIKAPSVE

SEQ ID NO: 188052 - protein, 147 aa, Zea Mays
MIGIMKLIFNQPRGKWPDQLTKVVWSHNTTTSRSTGFTPFKLLFGDEAITPEEAKTGSIRVVASAESGSEDAYSVEKDALEGIRLQAVENINKYQAETIKWRDRKVRLKNIEPGHLVLRRVANPDTVGKLQLKWEGPFLVASSPRPG

SEQ ID NO: 188053 - protein, 71 aa, Zea Mays
MGKPLGTSNLPFCPFLIHGSKTHSNTRAAAIKDTFVSMFSQDPSSQNDKGIKSFFGESINNIPHQFPPAQI

SEQ ID NO: 188054 - protein, 144 aa, Zea Mays
MGCITLSCINNTYKYHFNVCIVMQCVSPLPSYLLEYKTTPSTNTTSMNAYECNAYVLCLHTSKGMKPHRTPPRATYDAKLYRYGQTIGHDKTSDASESCNVYGMLHLSIYFTSFAYNTTSDNTSFTFRYNTTSNNTSFTFRGVN

SEQ ID NO: 188055 - protein, 122 aa, Zea Mays
MQCVSPLPSYLLEYKTTPSANTTSMNAYECNAYVLCLHTSKGMKPHRTPPRATYDAKLYRYGRTIGHDKTSDASESCNVYGMLHLSIYFTSFTYNTTSDNTSFTFRYNTTSNNTSFTFRGVN

SEQ ID NO: 188056 - protein, 113 aa, Zea Mays
MGGGGVEHLLDPLFLFNPSCYSSSRSLLRGGRGRSMEEEEMVGGCHGRRGDGQPREKWGRVAAKRGGGGKRGDPLGFCGRKEPTPQMTSAFASNGPQPFPTSTHRRSTFGQHF

SEQ ID NO: 188057 - protein, 74 aa, Zea Mays
MTTLSPWNISGTLTSSNILNLAYLSLKIYNLVFLTANVPSYESSSPIHTWNANSRSLIDSNTLGSRASYITLRA

SEQ ID NO: 188058 - protein, 62 aa, Zea Mays
MCYATIPRSREEGLMEAAAVRSWGERVKGEPRGKGLWGHGRERGMRDDPNNIFYWICVSEGE

SEQ ID NO: 188059 - protein, 78 aa, Zea Mays
MVWIPQILPQQKDMEYLVYSDHRFRQLHVLSPAANSAKIADGPIYLGPSFPDTKSIIDICKYFKECIYECKAYNVPIG

SEQ ID NO: 188060 - protein, 53 aa, Zea Mays
MIEDSHHDDDDLSGKDWHLGRRGLRGGGARVWWLQEWREEEMGRGAAAKGERS

SEQ ID NO: 188061 - protein, 102 aa, Zea Mays
MCSSRSSNHGVGAALSHLLISPGHMLLGHLCAIPLETIVVTGIRHDPGQYLDKEPCTIVVRCPPFAVSSPLRSLLSLCCARMSVSYTASALSRQHRRIHRRL

SEQ ID NO: 188062 - protein, 65 aa, Zea Mays
MRCTRLCPLNPGVTPIHLYRGDEASSTTRPLQSSTSFRKPATVSEKGNIGIPRLKSHCSMIDPEP

SEQ ID NO: 188063 - protein, 52 aa, Zea Mays
MFHLTLALLNAGACCSSRGVGSSSTSTFILIIMLRRRSQDLIRNFLSKDVCF

SEQ ID NO: 188064 - protein, 52 aa, Zea Mays
MFHLTLALLNAGACCSSRGVGSSSTSTFILIIMLRRRSHDLIRNFLSKDVCF

SEQ ID NO: 188065 - protein, 79 aa, Zea Mays
MLVDIELSSPTITNTISFPRTTTIGSITLPCVNNTCKYHFNVCIGMQCVGTLSSYLWEYKTTSSANITSMNAYECNAYV

SEQ ID NO: 188066 - protein, 118 aa, Zea Mays
MAPEPRHHFPIPAPPCLHQRRVSHPRPNRWPPPTTHSPRAAEFKPSPRVPKPCATIPPSSTFPTRCGVRAIPEHEICSPHGQSSREPTCRTSSRLMAAVIVPPPPHGERPAPPLPPLW

SEQ ID NO: 188067 - protein, 58 aa, Zea Mays
MNYFQATTIGRVVLRPRERLRGLAGVDMYKYNGLRSLQGQARESTTGLYLATRNSSQI

SEQ ID NO: 188068 - protein, 64 aa, Zea Mays
MTWNISTRRRGEGRRVRLVRRRRRCGKSDACDLTICCSSPFPSMVDFSPVITPSSFSNLFNVHE

SEQ ID NO: 188069 - protein, 55 aa, Zea Mays
MEPFQVKFHNSSFEPRIKNICYSQCNIRLSPVLIELDTHCICHFTNGSITTMTPI

SEQ ID NO: 188070 - protein, 83 aa, Zea Mays
MNAYVLCLHTSKGMKPHRTPPRATYDAKLYRYGRTIGHDPTSYASESCNVYGMLHLSIYFTSFTYNTTSNNTSFTFRYNTNLK

SEQ ID NO: 188071 - protein, 59 aa, Zea Mays
MTENHTGGLHLGGGGEMGGAARVLGGEGCKGLRRKKMGEGGRPRERGGEGAAATTQGGK

SEQ ID NO: 188072 - protein, 121 aa, Zea Mays
MFDGEDYNMWSDKMRHHLTSLHTSIWDVVEIGVQVPSPGDEDYDSDEVAQIRHFNSQATTILLASLSREEYNKVQGLKSAKEIWDVLKTAHEGDEVTKITKRETIEGELGRFRLNQGEDSQ

SEQ ID NO: 188073 - protein, 328 aa, Zea Mays
MTGEKKMFSSYEKNQDPQRTITFGDGNQGLVKGLGKIAISPDHSISNVFLVDSLDYNLLSVSQLCKIGYNCLFTDTDVTVFRRSDDSIAFKGVLEGQLYLVDFHRAELDTCLIAKTNMGWLLHRRLAHVGMKNLHKLLKGEHILGLTDVHFEKDRVCSACQAGKQVGVHHPHKNVMTTDRPLELLHMDLFGPIAYISISGSKYCLVIVDDYSRFTWVFFLQEKSHTQETLKGFLRWAQNEFGLRIKKIRSDNGTEFKNSQIEGFLEEEGMKHEFSSPYTPQQNGVVERKNRTLLDMARTMLDEYKTSNQFWVEAVNTACYAINRLYLH

SEQ ID NO: 188074 - protein, 80 aa, Zea Mays
MTWLAHRTVSGGAPDCSVRHATAVFQRPYFGGWGYKYPNHPTFNGIQVFHLQHITRAIAFNSRHSKEIKSSPKSKDNSNQ

SEQ ID NO: 188075 - protein, 122 aa, Zea Mays
MKIKKKEFLSLKQGNMTISEYRDKFIQLSRYAPEEVADDKTKQEQFMEGLIGPLQYQLISHTFPSFQRLLDKATTVEHKCVQLGEMKRKAITQGQASSSIRLRYVPTQGTPAHPGRGQQSYQ

SEQ ID NO: 188076 - protein, 109 aa, Zea Mays
MNNLLKKIKEKRISKLTKRKKKRNEKNEKRPLGQLTWADSFLQSRSSPFFFSLTCGPHTSRLFSSPSLLPESRPHERAAARMDSSSTTLAHPCVSSTARLTWSAFGYRF

SEQ ID NO: 188077 - protein, 59 aa, Zea Mays
MLGWSAQARGCGVFIALNLLCSGRWEWLLSMGAQDCPVRQPRHPTIRVWAQTTIGDFVF

SEQ ID NO: 188078 - protein, 59 aa, Zea Mays
MWAQINPCEVIPKADEWTFDFYLDECLPLASRLDMSYTICSSQTSHLLSHELSHAWLTD

SEQ ID NO: 188079 - protein, 72 aa, Zea Mays
MVPMVLIPGTESDFGGGIGQRSAPCARASSGEDKSVACSSSDCYGGSQLTGIISADGTSNALAGKGDESDRL

SEQ ID NO: 188080 - protein, 75 aa, Zea Mays
MVSVGEEISPAGWRIAPALNPKERRGLSVLLATRLVDQHTRAREGLEWFGPPERNTLLHCVMYCLGACMNLRVSA

SEQ ID NO: 188081 - protein, 92 aa, Zea Mays
MDPKGKGIVINDKEKESFVNEPKDDKPTNSGSGHKRKDGKKKKTRHIKEIVYYDDSDESSSSQKDDDNDYEKKKTVNSNFSFNYSRIPHSSN

SEQ ID NO: 188082 - protein, 362 aa, Zea Mays
MLRSFTVLDPHLVNNIRENPRYTKMTPEEILGKFVSGRMMIKEARYVDDALNGPIQEPQTIALKATRSKEALPNKVAQVEAVGLNDEEMALIIKRFKTALKGRKEHPNKNKTKGKRSCFKCGKIGHFISNCPDNDSDQEKKSGKWEKKKNYKKAKDEAHLGKEWDSDCSSSDSDNEGLTATAFNKSSLFPNEHHTCLMAREKKVSTRNTSTYASSSEDESSDDDEIDYSCLFKGLDRTKVDKINELIDALNDKNRLLEKQEDLLYEEHDKFVSAQNSLALEVKRNEMLSCELSTCHETISTLKGVNDDLNAKLEVANKSNSCVEHVMICTRCKDFNVDDCNEHLVSISKLNDEVASLNAQLK

SEQ ID NO: 188083 - protein, 234 aa, Zea Mays
MCLSLEEGDGSLAFKGVLDDKLYLVDFAKEEAGLDACLIAKTSMGWLWHRRLAHVGMKNFHKLLKGEHVIGLTNVTFEKDRPYAACQAGKQVGSSHHAKNVMTTSRPLELLHMDLFGPVADLSIGGSKYGLVIVDDFSRFTWVFFLQDKSETQGTLKRFLRRAQNEFELKVKKIRSDNGSEFKNLQVEEYLEEEGIKHEFSAPYTPQQNGVVERKNRTLIDMVRTMLGEFKTPE

SEQ ID NO: 188084 - protein, 85 aa, Zea Mays
MKDAKPAKTPMGTDGHTDLYKGGKSVDQKAYRSMIGSLLYLCASRLDIMLSVCMCARFQSDPRDCHLVAVKRILRYLVATPCFGI

SEQ ID NO: 188085 - protein, 52 aa, Zea Mays
MSKCWKQDNQVETKDGFVQPKSTLSGCTGLSGGAPDSVRCARLAQANLLLSG

SEQ ID NO: 188086 - protein, 84 aa, Zea Mays
MSGGTTRRRGSTMGAREGEYELQEGDGNGYRGGVAGHRFQQKSTARKKSWRRHRSSSRCLSGGEKKIRGGRRDGDRKETAGRLR

SEQ ID NO: 188087 - protein, 88 aa, Zea Mays
MRSLLPLSLFPCVIFVNSLCPLLPSHSALWPPACTPALRATCNRTCTVLRVPHSAFPSPKTPPVGVEYEPGVPVGKHLWELCVTTETV

SEQ ID NO: 188088 - protein, 102 aa, Zea Mays
MPSLVRHSTTPLLDPVSNPSWRLSDFAGEVVVLLWTEPDPSMLLTPCVLAPHPSGWHVHVYHRVVEPVIPCLTPTSPARSRLQSKVVSSRNPKHRMKTKLVA

SEQ ID NO: 188089 - protein, 61 aa, Zea Mays
MRKTSQVDPKRGLLRTVMLMDRRSKYRDKGWSSSDRRLTNTNLVFLPGKPRCMQPLPCVFK

SEQ ID NO: 188090 - protein, 170 aa, Zea Mays
MALIIKRFKTTLRGRKEHPNKTKTKGKRSCFKCGKIGHFIANCPDNDSDQEQGNKREKKKAYKKAKGEARLGKEWDSDCSSSDSDNEGLAAAAFNKSALFPNEHHTCLMAREKKVSTHNTSTYASSSDEESSDDEIDYSCLFKGLDRTKVDKINELIDALNDKNRLLEKQ

SEQ ID NO: 188091 - protein, 246 aa, Zea Mays
MTGKNRMFSSYVKNKDPQDSIIFGDGNQGKVKGLGKIAISSEHSISNVFLVESLGYNLLSVSQLCNMGYNCLFTNVDVSIFRRSDGSLAFKGVLDNKLYLVDFAKEEAGLDACLIAKTSMGWLWHRRLAHVGMKNLHKLLKGEHVIGLTNVTFEKDRLCAACQAGKQVGSSHHAKNVMTTSMPLELLHMDLFGLVAYLSIGGSKYGLVTVDNFSRFTWVFFLQDKSETQGTLKRFLRRAKTSLSSK

SEQ ID NO: 188092 - protein, 77 aa, Zea Mays
MTNSTSVSGGIPDNSSGKTSRKSLTTRMLSPTNFPSTKNAACLVAVVTAIPTLDLSLLELVTSMVPLAQCINCLCLS

SEQ ID NO: 188093 - protein, 55 aa, Zea Mays
MSKSWLGIEAPVSGSSSFSSILLGVFLFGVCPASVVSSGIQESVSLKPLADLLLL

SEQ ID NO: 188094 - protein, 52 aa, Zea Mays
MSTPPPQSSGNCLSRQTMPGERHRPTTPRTRRRTPPPSTRNRRSPPREESAR

SEQ ID NO: 188095 - protein, 71 aa, Zea Mays
MNNGERKQQKIVFTESLRVQKQRLDRLIFKAFLIKIKNCKMDLESLGHLFQNRPKDWGLVGDRYPPGPRKG

SEQ ID NO: 188096 - protein, 95 aa, Zea Mays
MQSCKGDAAKILYRCQKCSSVAFQGVCGPRGVTPLLTLEKLRKVPAGIKRLHDWYMRASSVGIDAINVHIPDHPFIGSDQEAFLAFEDMWLMMNL

SEQ ID NO: 188097 - protein, 57 aa, Zea Mays
MKYYLRFVLYVKEVKYFDKCSMPYTLHDSLAYEVLVGTYGPTVPVQLSMYVARGGVG

SEQ ID NO: 188098 - protein, 99 aa, Zea Mays
MRLGVPFIAPRQLGAVESIPGRQFLPSVAWHTGQSGAHRTLSGADFFPSVAYSTVGAWEPLAHRTLSGAHRTVRCPLPTIGSTTCLAQIAQPTVGPADR

SEQ ID NO: 188099 - protein, 75 aa, Zea Mays
MYAYECNAYVLCLHTSKGMKPHRTPPRVTYDAKLYRYGRTIGHDKTSDANESCNVYSMLHLSINFTSFRYNTNLK

SEQ ID NO: 188100 - protein, 69 aa, Zea Mays
MYLNILSLNVFFLNIACSIFDYSPLTSNSIYTVMLMGTLLYSVKYTLPEYFCTFLVAGGVSSFALLKVR

SEQ ID NO: 188101 - protein, 83 aa, Zea Mays
MVCRLFGLPGVLGLSPLCTRLLPSFFCFFPSEEFLFVGSNIRFFLFFSFETLEFLSVGSNTRVSDCYFKYIDVHFPSYSIYLQ

SEQ ID NO: 188102 - protein, 74 aa, Zea Mays
MDAPNFEYPYYERLDEGAGGDKRKRVVSILNRQAIRSVKEDQKAMNKQKTLLAPKDSAPKKRKLVRISPIETKV

SEQ ID NO: 188103 - protein, 80 aa, Zea Mays
MNTTDIPVLHSRGYTSLPISRVTHLSRDHDFPLISTINLYQGEEAGSHTRPLQSSTSIRKSATNSGRSKCRPFSTVVTPS

SEQ ID NO: 188104 - protein, 62 aa, Zea Mays
MVRSSVKCLPNPCCGVAVDESCTQPLSSDPLINLSTMIFFLISRFSRCEESPQIRVSHVLHS

SEQ ID NO: 188105 - protein, 67 aa, Zea Mays
MFGEGKCPLTYLCPIHSLIHLPHYTVIPKDLLAFVIHVLVYLSGLDYYCLALCYCSALINEHDEIYQ

SEQ ID NO: 188106 - protein, 58 aa, Zea Mays
MRMWIQTSNKFHLPKINPVHQSQRLVRLPEYGSLIVSTPPKPKCDARTPLLPDVRAAS

SEQ ID NO: 188107 - protein, 175 aa, Zea Mays
MPSNLMSFGISSIFWTGSIYDTISLLEDGVSSFFAVSSSTSFPRTCSMPCCSPILLNQQKLQSLSCSSSAACSSPPLPCAQTAAKPTEPPPFFPCCTHHRPLSVGRLHGLGRLQRRRSSLITSTRYRSSNTSRSCELKTPTTSCRCSCRPWRRRLPRPAPPSWQPSPAAPWRRPF

SEQ ID NO: 188108 - protein, 281 aa, Zea Mays
MSTRLQTGFGPRQLTSPATPSSGYIFTESSRRHLTNSLPVKSPMFHILVFGSKCFILVKRGRKSKFAPKAVEGFLLGYDSNTRAYKVFNKSTGLVEVSCDIVFDETNGSQVEQVDLDELDDEEAPCVALRNMSIGDVCPKEFEEPTQAQDQPSSSNQASPPTQDENQAQDIEDEDQEDEPPQEEDNNQGGDEVDQDKEDDQEIQGQRPPHPRVHQAIQRDHPFNSILGDIHKGVTTRSRVAHFCEHYSFVYSIEPYRIEDALRYSDWVLEMQEELNNFMRN

SEQ ID NO: 188109 - protein, 53 aa, Zea Mays
MSSMGLIMSSLRCCTLRALVQSTSHPLNYNKQTLGKYISPHVMLIIKHQNLLS

SEQ ID NO: 188110 - protein, 111 aa, Zea Mays
MAKYWWCRPSRPDGRSIHDSLREITKMVYLGVVENLCTANYLGLGTRPSVVLTREVTKLHKSLGDCADCSTWVGGPSVGAKFDLGRDRVFWWIVLCTIRDLSSDSTNSHVA

SEQ ID NO: 188111 - protein, 118 aa, Zea Mays
MYYDRRDSRNAFRSNDVFDSHAYDSYAMTASSSHVMHGRNVFRRNVVHQMPRRNVVHNAPRKVVNEPSEIYCALNASFAICRKDKKIVARKLGARCKGDKTCIWVPKNICANLVGPNM

SEQ ID NO: 188112 - protein, 68 aa, Zea Mays
MLCWHKSPKRGRLKGKCAFGPFLSILVIKCQHMCLNMNICPWMNKVQITSKGMFLSLSTLVLCTNIFV

SEQ ID NO: 188113 - protein, 82 aa, Zea Mays
MARPPALARSPLLYPAGGPAVARQPPWFGVGLWRHQQSHLPSLLSSSTSGIRDSGQPFDVGCGCGLWSRGSEQRPSVRPCCL

SEQ ID NO: 188114 - protein, 90 aa, Zea Mays
MNNDDFLSMLTSLFDLATKKTMSNPHKYYEASASSMMIGYPMPHLVNYHLHSMGHFLHFQYMQTILTIIPGNLLSSPLVNSRLRSSIVGR

SEQ ID NO: 188115 - protein, 59 aa, Zea Mays
MPTVHLFIGKGRSPCKITFMSFTFANNSVVILRGLICLFIFKSVPIFCCRAEAILRTAS

SEQ ID NO: 188116 - protein, 68 aa, Zea Mays
METPLSENKQETGCPTVLTMAVAGFNVGVCTFTIKSGRNQVSETCSWEKKNVSMFFEYSLIHHHHVTP

SEQ ID NO: 188117 - protein, 73 aa, Zea Mays
MDLRHRRQFGVFQTSRSSNIFAALRMVPLRAQPQELMKSDCYVISSYKSSREEVMDTPFVKTGHIVFPISRQM

SEQ ID NO: 188118 - protein, 64 aa, Zea Mays
MCAKHQSKFLESRMFSSCLSLVNVFSSNGLVKISANCSLVLTYAISISPFVGDPSKSDTEWLCA

SEQ ID NO: 188119 - protein, 259 aa, Zea Mays
MPDEWRRSTLVPIFKNKGDVQSCTNYRGIKLMSHTMKLWERVIEHRLRKMTSVTQNQFGFMPGRSTMEAIFLLRQLMERFREQKKDLHMVFIDLEKAYDKVPRSVMWWALEKHKVATKYINLIKDMYTNVVTSVRTSDGDTDDFPINIGLHQGSALSPYLFALVIDEVTRDIQGDIPWCMLFADDVVLIEESRSGVSQKLELWRQTLEAKGFRLSRSKTEYMKCDFSATGYEDGDVSLDGQVVPKKDTFRYLGSMLQKD

SEQ ID NO: 188120 - protein, 56 aa, Zea Mays
MAIQEGIKSRTMIYVIGRDSTNERKTVEMVWICPTETSRGSKDVIVMRKEAGAYRS

SEQ ID NO: 188121 - protein, 57 aa, Zea Mays
MCIVVFHALIFKAKSLDIFYYFMFHVIVFFHVNLSLPLSLFLLLLPWLSWRHGEASC

SEQ ID NO: 188122 - protein, 53 aa, Zea Mays
MSSLLEKVREIKWTPACQDSFNLLKLKLMSPPVLVMLNLQKGFDIYCDASRQG

SEQ ID NO: 188123 - protein, 117 aa, Zea Mays
MVQLKTNTKIKKGSKRKEQRKPKCSLVWHTGLSGVPPDSVRCTRVNQLKLFGFGISRRNSAIIHRTVRCCTGLSGVAPNSVRWRTRLSGAPAEQRLSACNGRLCKMNNAIQNVRAEV

SEQ ID NO: 188124 - protein, 94 aa, Zea Mays
MERATTVSRVVRGSKELWGPVVYSADVCTTDGGGGRRRRVNRFGHVNGSKPSSATKAASATSFYNRGDQPEVSFERIRTTTRCGCLGYPKFSGR

SEQ ID NO: 188125 - protein, 83 aa, Zea Mays
MPQRSALCHRYYASEVSIYFVFGAEFVICPYLARWCDLFDLQLIGHSMDVHWLVFMSLLSVRLYTLPTIFGFPLILTDISFLS

SEQ ID NO: 188126 - protein, 96 aa, Zea Mays
MKNDVLCLLCLCHSLGFSSHFFVCFVCEINPSRVVVESFGHHIIAFRVMTELLLSTFTPLKWHPSDDKATSALERLMTMSVLLEVIAEWLMMTLAF

SEQ ID NO: 188127 - protein, 276 aa, Zea Mays
MLCLICWLKTLLMLLLLGHWRWCLSRKLVQPWMFRSLSVFARNALAEPINLILLLMSRKRKGDVCGEYVVWIGKLVLRFLPLRKCMCLNLPTLIPMGVLHLSLIPMGVLHLSLIPMGVLSVLLTKSWGEEDEIPLTRKNSRQYIASGESSGVPSPALSALIGLQELSLVNFDQTLEDMVPEDLLSEPADGDAMDVCADVFDAGLGSSRVASRASSTLERGLEGQETDFDRLALMEVTEGPSALEAAAAENLTLRDGVDAYPAPRVLPGMIRLEWEA

SEQ ID NO: 188128 - protein, 74 aa, Zea Mays
MCIRTKNISTTKDGVKTRPTNGKGEGTSKGQIGKLPLLNGDGRLEILDNRHGVITKVRSREKGGGNNKQKHNKG

SEQ ID NO: 188129 - protein, 55 aa, Zea Mays
MLSTTPRCLGAIKGTPRRMEDYTKHPLSIVDHSHSILAHLFGILSDLSSVLVRIS

SEQ ID NO: 188130 - protein, 62 aa, Zea Mays
MTLETGAPRPGRQIRSSDSTCGPLRKRQLLTGRSVLCVSSFSVLVSARPGPGPASWCQVVLA

SEQ ID NO: 188131 - protein, 100 aa, Zea Mays
MLKKFGLEDTKPIKTHMATNGHLDLDEGGTIVDQKLFRSIISSLLYITAYRPDIMFSVCMCTRFQASHREAHLKAGKRILRYLKHISNVGLWYSRVLNLN

SEQ ID NO: 188132 - protein, 120 aa, Zea Mays
MSLWDRRLPTMGWRSDSSLPLQRFDIEEKTIICMTGFKRFDATFVEFVAANSLEYDLVSAGIDLYTKENFENYVQYYEPARLEIARRFGETSGVRHHPAVINKIARLTILSKSGDKSNIR

SEQ ID NO: 188133 - protein, 94 aa, Zea Mays
MIIRLLRLLAMAISALSLPLDSTRVVDEEIDDEEERVLSFSSACIIVVLACTRDSPDANRSKDRTTITTAARDEVAIYLYGLGHRLKCDYWYSG

SEQ ID NO: 188134 - protein, 77 aa, Zea Mays
MTSKKAGGKIFSSLHRINGISPFSRFTTSIRRFLLHSFLKKVPSSAIASYTSFLTSPLRPAGMILCRSMWQECVFSF

SEQ ID NO: 188135 - protein, 99 aa, Zea Mays
MQCVGTLSSYLWGYKTTSSTNITSMNAYECNAYVLCLHTSKGMKPHRTPSRATYDAKLYRYGRTIGHDKTSYANESCNVYGMLHLSINFTSFRYNTNLK

SEQ ID NO: 188136 - protein, 52 aa, Zea Mays
MGPAKHPLPWSPPQSARLALELGQQPVAQHPTLHHNLVQDPVPVKKIKKIKK

SEQ ID NO: 188137 - protein, 61 aa, Zea Mays
MQCERMCCTRTLPTEAKLSIFLVEHVLHSVDTFRHTGLLFHSGHPFVGDRPYSDSTWCPKA

SEQ ID NO: 188138 - protein, 53 aa, Zea Mays
MLVLKVCPSAHHSSECTIWSLLRVSPLATFTIAGEHLDVTRPSLSTISLLMKL

SEQ ID NO: 188139 - protein, 72 aa, Zea Mays
MSALLCCMLAIWMVYASPLLDALELVEAHLLDGCITSALSSSPLDHVDLTIGSTLLGFLLIDLMVGFDFILL

SEQ ID NO: 188140 - protein, 118 aa, Zea Mays
MGYNCLFTNVDVSIFRRSDGSLAFKGVLDDKLYLVDFAKEEASLYACLIAKTNMGWLWHRRLAHVGMKNLHKLLKGEHVLGLTNVNFEKDRPCVACQAGKQVGSSHHIKNVMTTSRPL

SEQ ID NO: 188141 - protein, 118 aa, Zea Mays
MHFYINFTLKYSARDVSTKSSFIYISFDLKMDTRYFSESPGALLENLIGALFWAIHSWVNGPDQTTKRYAYILITFVHPRSTARRPSPFPRPMERWRGLPAKPISGPDAPNSNQTGAT

SEQ ID NO: 188142 - protein, 141 aa, Zea Mays
MAIILLGEENTTGFVVWAAHGLWSAGKRESCLRGRKGRVVRPKKRPTSVRPLHSITIPITIHYPSPVQPRAERQPSTTDGGLPACGADADADAVKVGSCADDDEDLVLCCSASSRFVLVGGVITPSVARHCRVFLGRSTAA

SEQ ID NO: 188143 - protein, 54 aa, Zea Mays
MIFLMHLFFFSSFLLFFKPESVILSPFGSSTLMISFSLSLITIPLPLRSISLGG

SEQ ID NO: 188144 - protein, 90 aa, Zea Mays
MSARQGSPSGGHFLLSLGFCPWWDAGRYYGTLLIYSPGVPWPREARESVAPDHRRQSRGARWVPLVQSWEQDFLAYTRSPPWFVKGGDDS

SEQ ID NO: 188145 - protein, 87 aa, Zea Mays
MEVGQTWTAKFGRNNDNKHRTQTTRASYAVKPNLLTDQEPLAMQAPGAERLRQVQRGERPEMGGPEGDPASRRRRPPPPPAYVPNTK

SEQ ID NO: 188146 - protein, 55 aa, Zea Mays
MGIALLQLHIFTLQLFEEMELQQNLALAEHPAANCKRWLLKIIFKLLAFAWQLAY

SEQ ID NO: 188147 - protein, 84 aa, Zea Mays
MSTIPTDPPLHEQVRATREHTTPFRRSVARRVRVTLAISPLPVRDCLFMYGIDGFKLTLSHIQGMWLVKIVLDHTGLHTHPILN

SEQ ID NO: 188148 - protein, 53 aa, Zea Mays
MISCIVFTPSILKYRGINVCSNSKYVLTKKNMGKVYGHRIYYQICFHNLYILM

SEQ ID NO: 188149 - protein, 196 aa, Zea Mays
MGETRDRSIGARARKNRAGAGHGHRRERPPRREGRRARGQPGEQEIWEPRPREMERRRRARLAGFGARQGSRHGRRQKGEQGRARAVVSSRDVRSVVGLGEEERRREGATRQRNPHPTSRRHGWELLQAGGSRGGAELKKHEEEEDHGAQQRSARRRDPKGAQAWRSARLRGATMERTLAGWDWDEPAGPEGDKGE

SEQ ID NO: 188150 - protein, 158 aa, Zea Mays
MPQPQPWTSADTQAAARAACTAWLGVAYSRKGERARVGGRHHHRANVRARKGGGGGTPIPASPGMALVSLAGKENKSRHRQQAAHVRVPRFRCTVTVLENRRGVRGREGGGRRLSWRLVHRRRTCSWGARGCADSAPAPALSPPRVHGLVLNYPHPLF

SEQ ID NO: 188151 - protein, 93 aa, Zea Mays
MSTPPRTLIERLETSERLLKWHRLNVAELLDARDDGEEPIRDGVEELFYHGSVVECRAKPGVTRRHTADFAGVVVQCLPVLHVQLVELPLERG

SEQ ID NO: 188152 - protein, 72 aa, Zea Mays
MLRLAKRVRKLSFSPLALSSLEDSYLVEDFDLTFFFLPSFAMRHLWPTLGKRSPFVMAMLAASSSSEESLEL

SEQ ID NO: 188153 - protein, 61 aa, Zea Mays
MNLMHISLDLSVRKVFKNARKGVACTEACLCSQVSQSQARRCQSRDKTLPETPKVVLSSLQ

SEQ ID NO: 188154 - protein, 51 aa, Zea Mays
MVSISDSPGHRNKGREVEGVRQSSGSTCRRSAAVLFRASIRSGERLRSQFD

SEQ ID NO: 188155 - protein, 86 aa, Zea Mays
MKLLVPKHRFYHRLGGRQSSWAGTGSRERERERREREREVLASLPRTACLRGPSQPDNPPPHHCYLRTDDMRGGVAHGDIYLGLFF

SEQ ID NO: 188156 - protein, 92 aa, Zea Mays
MMDNIDEVTGKRMKALGAIEKDKIMVARAYNKKVKAKSFQVGDLVWKTILPLRNKDRKFGKWSPSWEGPYKVKQVMSGNTYLLQTLQGKDFA

SEQ ID NO: 188157 - protein, 64 aa, Zea Mays
MRTNEKRELHERKRGGSRSECISDACLWVSPSIIFVRCRCRRRRWNLEGRPDNISMSSLGSWFA

SEQ ID NO: 188158 - protein, 126 aa, Zea Mays
MRRQCTLLQSVKKLCSTIPEVEGAKIGKVCGYLEHVCKMLEETSIVCEQDLETKNPTWDLYDNPSVDDEHPLEDDEIGDGYSTEDPELWEMVFDDLKWEEAKANVSFEEHYRVINYRFEEINDRNM

SEQ ID NO: 188159 - protein, 383 aa, Zea Mays
MYSLPAYAFIAQDFTTQAALYTHHQYIAGFIMTGAFAHGAIFFIRDYNPEQNEDNVLARMLDHKEAIISHLSWASLFLGFHTLGLYVHNDVMLAFGTPEKQILIEPIFAQWIQSAHGKTTYGFDILLSSTNGPAFNAGRNIWLPGWLNAVNENSNSLFLTIGPGDFLVHHAIALGLHTTTLILVKGALDARGSKLMPDKKDFGYSFPCDGPGRGGTCDISAWDAFYLAVFWMLNTIGWVTFYWHWKHITLWQGNVSQFNESSTYLMGWLRDYLWLNSSQLINGYNPFGMNSLSVWAWMFLFGHLVWATGFMFLISWRGYWQELIETLAWAHERTPLANLIRWRDKPVALSIVQARLVGLAHFSVGYIFTYAAFLIASTSGKFG

SEQ ID NO: 188160 - protein, 84 aa, Zea Mays
MRMRAWRTAVRSGGRRGAGPAHRPLRPHLGPVGRRAPSLSGCFCLAQWHQHSTGRGGGHPSDDHHCVRHTLTRTTGRPRRRFFV

SEQ ID NO: 188161 - protein, 75 aa, Zea Mays
MIYTDTKYAIRCKYLCNSVYCVKICYLLHVHKISMTKMYYERKLIGMYGNKKLYLMIYFLYKYMIAPIAMQLTSL

SEQ ID NO: 188162 - protein, 75 aa, Zea Mays
MQMLDLKLMKDIQIKTNRKEKKGKENKNKKKNSLGLGRAPPTFRPTPSPAHSPACALMFGHRHVGPLSWLPCPRL

SEQ ID NO: 188163 - protein, 96 aa, Zea Mays
MVKEDEEKLKRRRLSPEPKAIAPKKRKATVPKQKAADKEEETASTPSAADIEEILKVMTESLPIKLSPLGPHLTKLLQKKEEPLATKKFAGPKKRR

SEQ ID NO: 188164 - protein, 103 aa, Zea Mays
MQQDVLPPMCAVGPSTAGLSSSRSTRDTFENMAQDDDDDDDDDDDAGAGAGAAGQVEIGPSQLQDAPTTQPSQLTPRRRRPRDPYTPGTDALGAKGKGKTRRK

SEQ ID NO: 188165 - protein, 117 aa, Zea Mays
MSEQALDLHSYVTQENERRKRRRLALAEIYFKTIVATLAYMHTGRRPRELHCFSNDEHRHILRRYLLKELYDASEVTCYDELRLTKRNFHDLCAMLREKCGLCDSVHSKVEERVAMF

SEQ ID NO: 188166 - protein, 71 aa, Zea Mays
MDERFELPSYSHWPRAGRPSLAPLPVGGGHFAVRTDHYNLKFLLDQRLSTVPQHQWISKLFGFDFSMEYRP

SEQ ID NO: 188167 - protein, 52 aa, Zea Mays
MSYIRGTWIDLQHTCVLCFDHVPYAFCCLFMVLKLYKHSPDLKSPGVSDAHI

SEQ ID NO: 188168 - protein, 59 aa, Zea Mays
MASISDTGRAGAASAATAPGLASALGAGSTTLVPYLVVSWVEWGQDEAPADTPAPCFTT

SEQ ID NO: 188169 - protein, 377 aa, Zea Mays
MEGLHAQSAACHRQRAILSIRARNARPCAKSSLDAPRRLAQPVEQIRVDPVSISRQPGESRRECRPPPFDSDAPRTTPPKPSSKSALCKWWRSLAPALLAAALAITVAALRPATEHADAKGRPPLWFWPGGVFKVALFADLHYGEDAWTDWGPAQDAASDRVMAAVLDAENPAIDVQTSLLEEDPNKNYQEDKRRPHALCSARRSVLPAARNPPPAQSASAQTFPSAHAPNPLPLRQIHRHAPARRWKGPAQDAASDRVMAAVLDAENPGACLRTLSFCFPGPFPFSSERIKELKRNSLSASWSLRRRNPIHASSLRLGGVRAAIDVQTSLLEEDPNKNYQEDKRFCLCGHMETSNLRFPLYQIPWDPYDAKRSLFS

SEQ ID NO: 188170 - protein, 180 aa, Zea Mays
MEGLHAQSAACHRQRAILSIRARNARPCAKSSLDAPRRLAQPVEQIRVDPVSISRQPGESRRECRPPPFDSDAPRTTPPKPSSKSALCKWWRSLAPALLAAALAITVAALRPATEHADAKGRPPLWFWPGGVFKVALFADLHYGEDAWTDWGPAQDAASDRVMAAVLDAENPDLVVYEQP

SEQ ID NO: 188171 - protein, 200 aa, Zea Mays
MAAVLDAENPGACLRTLSFCFPGPFPFSSERIKELKRNSLSASWSLRRRNPIHASSLRLGGVRAAIDVQTSLLEEDPNKNYQEDKRSVIPLRFIGLEGDMMVEVILHVALLSAVALVRGACCLALTSLALSSPSPTTLAVLEVCLHYFCSYDVILVNSIEARPVFSRPPSEAFQVDSFIAKSYHEDVKISLHVKIRVKGL

SEQ ID NO: 188172 - protein, 321 aa, Zea Mays
MSPTSLRLRRSQDHTAQAVEQIRVVQVVAQPRARPARRRTGDHGGRAAAGDGARGRQGAAAAVVLARRSVQSGPVRGPALWRGRVDGLGPRAGRRVRPRHGRRPRRREPRLGGVRAAIDVQTSLLEEDPNKNYQEDKRRPHALCSARRSVLPAARNPPPAQSASAQTFPSAHAPNPLPLRQIHRHAPARRWKGPAQDAASDRVMAAVLDAENPGACLRTLSFCFPGPFPFSSERIKELKRNSLSASWSLRRRNPIHASSLRLGGVRAAIDVQTSLLEEDPNKNYQEDKRFCLCGHMETSNLRFPLYQIPWDPYDAKRSLFS

SEQ ID NO: 188173 - protein, 52 aa, Zea Mays
MAHAILGMGRQSAPSLIHTTTWCLYAELAEGCSAWRDRIKKKEKKVASGEIE

SEQ ID NO: 188174 - protein, 91 aa, Zea Mays
MHSADIVDYKIYTISGQLLTWILFVDCWLHKCSCKNEPKKNQGSNISLPWIHLYRKRREEKDKSNPGFHILFYRFPKGHCCFIKKGTFSSS

SEQ ID NO: 188175 - protein, 166 aa, Zea Mays
MDAGGGGVLAAVLCMLLVFAIFLLLLWRRRSDAATADNHRVPPQPLQEDQVLHGRAAARRMRRRPGAAGAGSSTASTSRNAVEDDAESDDEEVPEGRNVPRSSKKEKKRQEREMQRQAEEPARDSWRSKQDRYDEMRRKKDEEREAQERQLKKLGHEKQRRRLLLL

SEQ ID NO: 188176 - protein, 227 aa, Zea Mays
MRRELASPLATAAAATAGASSSAAASLRGWWDDVNESPQWQDGAFFSLAAAYALVSAVALIQLVRIQRRVPEFGWTTQKVFHLMNFLVNGVRALVFGFHVHVFLLRTKVYKLVLLDLPGLLFFSTYTLLVLFWAEIYHQARSLPTDKLRPAYIAVNAIIYVVQLCIWIYLGINDNAAVELASKIFIVAVSFVALLGFSVYGGRLFVLLRRFPIESKGRQKKLYEACT

SEQ ID NO: 188177 - protein, 300 aa, Zea Mays
MRRELASPLATAAAATAGASSSAAASLRGWWDDVNESPQWQDGAFFSLAAAYALVSAVALIQLVRIQRRVPEFGWTTQKVFHLMNFLVNGVRALVFGFHVHVFLLRTKVYKLVLLDLPGLLFFSTYTLLVLFWAEIYHQLQARSLPTDKLRPAYIAVNAIIYVVQLCIWIYLGINDNAAVELASKIFIVAVSFVALLGFSVYGGRLFVLLRRFPIESKGRQKKLYEVGTVTAICVTCFLIRCVVVALSAFDADVSLEVLDHPVLDFFYYMFAEILPSALVLFVLRKLPPKRVSAQYHPIN

SEQ ID NO: 188178 - protein, 463 aa, Zea Mays
MILRSLRCALLALICLQGPWGDSGSAFAQSQPPLHRTVRAEANDGGGLMPELPPSGLMPMPELSPSGSPTPFVPFLAPAPLAPFFNNSTPKLSGKCTLNFTAVDKLMTTTAVDCFTSFAPFLANVICCPQLQATLTILIGQSSKQTGSLALDPTVANYCLSDVQELLLSQGASDNLHSLCSVHLSNVTEGSCPVSTVDAFESAVDSSKLLEACRKIDSVNECCSQTCQNAINEAAQKISSKDAGLTSYTGSPKTDSCRNVVLRWLSSRLDPRSAKEMLRQISNCNVNGVCPLSFPDTSKVAKECGGTMTNSTACCKAMLTYVAHLQKQSFITNLQALNCASFLGAKLQKMNVSMNVYSSCQITLKDFSLQVGSQESGCLLPSMPSDASFDSTSGISFTCDLNDNIAAPWPSSMQAPSSSCNKSVNIPERPAATSAQSGVNHKNLKLRLLASLVSLLLVLLVQV

SEQ ID NO: 188179 - protein, 100 aa, Zea Mays
MKTRTPNFTTAVQPCRYYPMANKQIFRSTEPGYWLAPRVPRKLGILSLPVKREPGTEQEDGTVFMVAATKPFTQMVMVARSSQPSCAASLLKQNHNSHVA

SEQ ID NO: 188180 - protein, 78 aa, Zea Mays
MTLSTRKRRRARGRGLAPAPSPSQQKRSPARTLLPSAVDRSVSTPGSLRLSLALSLSLLLPLSPPGSRCPTAGPAPAS

SEQ ID NO: 188181 - protein, 515 aa, Zea Mays
MKAKASAAAAEDDAEPKKIRSSRSKHRRRRHSRSSSRSESPPRKRSKKNSKRIPDKKSKRSKGSRGGSLRRRHHSLSHSRSLSSSPSSVARRSSSSCSSSSASERSVSPPPRSRSRDVRRKKGRGRGRERDRKGRKLRRSASSSSISASSGSSRSKSRKRMTVGGTKDRATTTRDKMEKGYTDRRSCRSVMNVDEHVDGDEDRLAIAKVVDNDIDRHKKNLESESSPSKNANTTEEKVPASGGNSDAQDLELILRQKALENFRKFRAAATMGGKTDSGAAGKEASIDDSVHNAGMEVADATHSQSQETSLGARYSAGSPRSQNFGNGANRSWKQDNGAGMSCGGSPGLLEPAETGGPTQLKGRAEESTRLASQFLSPRDARNGRSVMQRLAPPPGSSASVNQMLGSSAGLNHVDGAPRVRSVVSIPARERLDGSTHTTPLSPSEDSSPVESGGKVGLPLNDTNKAEGTNGENRKTSEASASDGSVLSPTEDKSQVSYKVYIPKRTPALARRKLQR

SEQ ID NO: 188182 - protein, 294 aa, Zea Mays
MVATLGSGESRASLYIMDLSEAVDLAIGPWTTYRVHSLDRTMWTADCSSDGTHAAFGSDLGAGLIDLETRGSSWLCRSKSDILSLKFVHSGKVVLCGLRNGSIAPVDVRQKQHNQPTGVASSSNARRTVPMLPTRHGGKQRNQASKDKFSRVISMSSAVCSLVSLSSDENYFLGSSMDGSIKLFDLRLIQKGGIQSYEGHVNSHTLLPLAVDPSETLLMSGGEDCTVRIWSIKTGELIFARSMGDSPFTSSCWPESSHGLCSPWLFDVNHSWGAWLGSRAGLFYMHGTICNVTH

SEQ ID NO: 188183 - protein, 296 aa, Zea Mays
MQLLIGNEVLDISVHEAHHDQSHLFLRHGKGILQSQGRLLHKMQFMPSSLFSKSHRLLTALVDSQNKKTVKMQKWFETKDPEKAKMEKERIQGQNIRAHSILQRKREKVNRKYTQPARPRRQLSPGFLEDALDEDEEPDYGSRRMPGRRRFEDELEAEALAERRIINAKKSNMSRNVPRKPPYPPARLPRRQADEYSESEREESEYETDGEDIEHSPPRGREDELDEEEEYEEEVEEEAPLSDEEMEAPKRKRESGGGGGHMREELASEDDESPPRKQPTVQHRRKAVVFDDSDED

SEQ ID NO: 188184 - protein, 50 aa, Zea Mays
MGGGNAQKSKMARERNAEKNKGGKGSQLEANKKAMNIQKNCLYSSHCRRT

SEQ ID NO: 188185 - protein, 53 aa, Zea Mays
MGGGNAQKSKMARERNAEKNKGGKGSQLEANKKAMNIQATPSGFGRSSHGAIL

SEQ ID NO: 188186 - protein, 177 aa, Zea Mays
MANGGTEASPLRPRRRAGSRDPFLIVCRFFGVVTAAAALLCVAANVLSAVYSFRGGADIIGGVFRCYAVVFSVFVAVLETEWAPVIRLWKIFEYLPARGMLQIFVAIMTKAYPNVERSELILIQEIATYMLLVCGAVYIIAGILCLGVLKRSRQHKATSQEQAAKDLEVSTCWFLLL

SEQ ID NO: 188187 - protein, 104 aa, Zea Mays
MANGGTEASPLRPRRRAGSRDPFLIVCRFFGVVTAAAALLCVAANVLSAVYSFRGGADIIGGVFRCYAVVFSVFVAVLETEWAPVIRLWKIFEYLPARGMLQIL

SEQ ID NO: 188188 - protein, 201 aa, Zea Mays
MANGGTEASPLRPRRRAGSRDPFLIVCRFFGVVTAAAALLCVAANVLSAVYSFRGGADIIGGVFRCYAVVFSVFVAVLETEWAPVIRLWKIFEYLPARGMLQIFVAIMTKAYPNVERSELILIQEIATYMLLVCGAVYIIAHDGPVECFKYGVESLLQVLKWLRHLIVPLFLTRHACHSKKNLSLVFGKKRYTMSWCFKTF

SEQ ID NO: 188189 - protein, 162 aa, Zea Mays
MANGGTEASPLRPRRRAGSRDPFLIVCRFFGVVTAAAALLCVAANVLSAVYSFRGGADIIGGVFRCYAVVFSVFVAVLETEWAPVIRLWKIFEYLPARGMLQIFVAIMTKAYPNVERSELILIQEIATYMLLVCGAVYIIAELEKRREELESLLTAERSEMA

SEQ ID NO: 188190 - protein, 185 aa, Zea Mays
MAAAPPPDPTVLIEDLVEEFLLRIPPDDPASLARAALVSRHWHRVITGPVFRRRFQDGRLGVAKTSNSTLGCSTLHLWIRDHERWEERRPIELRMLLPDDALRDPQFPPEFFPDKPWLAGFAGTGAGVIFFKTRLGYFAVDLNSGRSKNIGGCLGWGCIIPYVSFCIPAPGAISTDEGPEAGLEG

SEQ ID NO: 188191 - protein, 159 aa, Zea Mays
MTPPASLVPPSSVGTGTASSPAPSSAVDSEDGRLGVAKTSNSTLGCSTLHLWIRDHERWEERRPIELRMLLPDDALRDPQFPPEFFPDKPWLAGFAGTGAGVIFFKTRLGYFAVDLNSGRSKNIGGCLGWGCIIPYVSFCIPAPGAISTDEGPEAGLEG

SEQ ID NO: 188192 - protein, 126 aa, Zea Mays
MLVVQLRLRPGASSSPSSPRHSTLPTPSWNTAMASTTASSTPRARRHTSSSRTPVVARFHPYSALPVRLPPAVSRSSAHRVSPRRCPSSAPGRGLAVRRQTQRRGQGCAAWGRRWVGLRRICDVWL

SEQ ID NO: 188193 - protein, 203 aa, Zea Mays
MIQKSATSRSRGFGFVTFDSEEAVGKVMRQSFHDLNGTKVEAKIAIPKDEQYYRNRGGHGARPFGGRDPAAPGYGGFMYQTYNARSGPYNGYMPQPAPTHPYFPAPYFAAGGYPYGSGYPGQGVMPNIPGMGPRRGPPAYGTYPQMYPVYNIIHRAGYGGPATSFQHEINGGGDYKKDQTNVDMQQVDNTASVATKLENMKLG

SEQ ID NO: 188194 - protein, 150 aa, Zea Mays
MIAAPLRRPIAIAAQAGPKLEDFLGAAAQSQAMALSLDNPAAAASSFYYYGGGGGPGHQHGFLQPCGDLYGGTSAASLVSADDEAAAATAMASWVAAARAESGVLSAAAAAGHHHALALSMSSGSLSSCVTAHPAAPEYGAAAALDGGRK

SEQ ID NO: 188195 - protein, 228 aa, Zea Mays
MREVADLILSFPDETPVVVLSAMGKTTNNLLLLTRIDACVPDSLSVEAGENAVSCGAPKASEIPKLAVIKDLHLRTVDELGLDKSIVSEKFLKYFWWCWNKLKEKTDDDIPMPAYFRFLALLAFKIFSAEQVDVAVLEVGLGGKFDATNVVKAPVVCGISSLGYDHMEILGDQILFLVINLVSINGLLVLMNVMLSRNKELLSAPNRLKWKCLTHCLIRGEAEGGLIR

SEQ ID NO: 188196 - protein, 117 aa, Zea Mays
MREVADLILSFPDETPVVVLSAMGKTTNNLLLLTRIDACVPDSLSVEAGENAVSCGAPKASEIPKLAVIKDLHLRTVDELGLDKSIVSGFHMHIHRVNPAIVWLPYWAVHLTTFDGC

SEQ ID NO: 188197 - protein, 151 aa, Zea Mays
MPAYFRFLALLAFKIFSAEQVDVAVLEVGLGGKFDATNVVKAPVVCGISSLGYDHMEILGDQILFLVINLVSINGLLVLMNVMLSRNKELLSAPNRLKWKCLTHCLIRGEAEGGLIRDDVSESQFNQVLNIELQQIIDGDCHRSQKTTVSI

SEQ ID NO: 188198 - protein, 247 aa, Zea Mays
MREVADLILSFPDETPVVVLSAMGKTTNNLLLAGENAVSCGAPKASEIPKLAVIKDLHLRTVDELGLDKSIVSEKFLKYFWWCWNKLKEKTDDDIPMPAYFRFLALLAFKIFSAEQVDVAVLEVGLGGKFDATNVVKAPVVCGISSLGYDHMEILGDQILFLVINLVSINGLLVLMNVMLSRNKELLSAPNRLKWKCLTHCLIRGEAEGGLIRDDVSESQFNQVLNIELQQIIDGDCHRSQKTTVSI

SEQ ID NO: 188199 - protein, 118 aa, Zea Mays
MREVADLILSFPDETPVVVLSAMGKTTNNLLLAGENAVSCGAPKASEIPKLAVIKDLHLRTVDELGLDKSIVSGILLFAPLCSWNASAVSHTTVPHAHSPSQSCDRVASILGCSPHHI

SEQ ID NO: 188200 - protein, 243 aa, Zea Mays
MREVADLILSFPDETPVVVLSAMGKTTNNLLLLTRIDACVPDSLSVEAGENAVSCGAPKASEIPKLAVIKDLHLRTVDELGLDKSIVSEKFLKYFWWCWNKLKEKTDDDIPMPAYFRFLALLAFKIFSAEQVKAPVVCGISSLGYDHMEILGDQILFLVINLVSINGLLVLMNVMLSRNKELLSAPNRLKWKCLTHCLIRGEAEGGLIRDDVSESQFNQVLNIELQQIIDGDCHRSQKTTVSI

SEQ ID NO: 188201 - protein, 83 aa, Zea Mays
MPAYFRFLALLAFKIFSAEQVDVAVLEVGLGGKFDATNVVKAPVVCGISSLGYDHMEILGDQILFLVINLVSINGLILLAKLG

SEQ ID NO: 188202 - protein, 96 aa, Zea Mays
MEILGDQILFLVINLVSINGLLVLMNVMLSRNKELLSAPNRLKWKCLTHCLIRGEAEGGLIRDDVSESQFNQVLNIELQQIIDGDCHRSQKTTVSI

SEQ ID NO: 188203 - protein, 69 aa, Zea Mays
MDITTPDLYESRRRGRYLRDSVAARPRLSRNNGVDVATHGTSSVCGVDELRRDPPWHRFGLQSRRPGPW

SEQ ID NO: 188204 - protein, 226 aa, Zea Mays
MAAKLDARPPGRHEPRDPELDQFMEAYCNMLVKYREELTRPIDEAMEFLKRVEAQLDCISGGGGSSSARLSLADGKSEGVGSSEDDMDPNGRENDPPEIDPRAEDKELKYQLLKKYSGYLSSLRQEFSKKKKKGKLPKEARQKLLHWWELHYKWPYPSETEKIALAESTGLDQKQINNWFINQRKRHWKPSEDMPFVMMEGFHPQNAAALYMDGPFMADGMYRLGS

SEQ ID NO: 188205 - protein, 52 aa, Zea Mays
MVKDDHLKQRVHRSISTKQYATLFTFIIGSKHKPAITKTNSSIPENKLNSMS

SEQ ID NO: 188206 - protein, 107 aa, Zea Mays
MSRLESAIKEKENLLALVDALQSQLQRQETSTIHVCEESSELSLLLRSTWKMTMFIKLAYTDRILVIENVVELDDEGVDNPHSFEASGVREVTTEREENRFDIPVGT

SEQ ID NO: 188207 - protein, 52 aa, Zea Mays
MTSYLRVACTEELHIALRLLSYVYVLIFLPWKSLGCAALCKMQRSLVFFSFS

SEQ ID NO: 188208 - protein, 51 aa, Zea Mays
MKNQGGIGVQPEKSWESWWNSENAHLRYSVLSSRILEVLLSLPFHASMSLV

SEQ ID NO: 188209 - protein, 176 aa, Zea Mays
MQLQLASVLFTFSLGTKAHYYGRTILHGGAKYRPTGHKFVVFHASFTENYQLYSRSHFVKGVELIFLLIVYNIFRRSYVSNIVHVMITYSTWFMAVAWLFTPFLFNPAGFAWQKIVDDWADWNRWMKNQGGIGVQPEKSWESWWNSENAHLRYSVLSSRILEVLLSLPFHASMSLV

SEQ ID NO: 188210 - protein, 221 aa, Zea Mays
MERVVSQAVYFTVMGANDIVNNYFILPIRRHQYDLSSYVDFLVSSAINFTRTLNDMGAQRIAFLGVPPLGCCPSQITLAGSPSRQCDPARNQASELYNSRVSKEIERLNAERSGSGSKFVYVDIYYNLLDLIQNPASFQGRERGLLRQHGAERRHLHRVPQRVPQRARLHILGRIPPHAEGIRHRGGQAHPAELQVPDDVKTDTCCCMARGLYLSPYKHTA

SEQ ID NO: 188211 - protein, 285 aa, Zea Mays
MQRLTGRDMWDVEECQSPRMGSVILGVDGGASNTVCVCIPAAMPFNDPLPVLSRTVAGCSNHNSVGEDRARETLERVMSQALLKARRRRSNVCAVCLAVAGVNHPVDQQRMLDWLRDIFPSHVKLFVENDAVAALASGTMGKLHGCVLIAGTGTIAYGFTSDGREARAAGAGPVLGDWGSGYGISAQALTAVVRAYDGRGPETVLTNNILDFLGLASPDELIGWTYEDQSWARIADLLPVVVESAESGDEVANKILHNSVGELASSVKAVVQRLDLGGEGDTRIL

SEQ ID NO: 188212 - protein, 64 aa, Zea Mays
MVGERGNLGLPEEELYGLAGGLGLLSLPFFLFLFFFFFLLHGVVLLILRLIRRRLPRPRRRLGV

SEQ ID NO: 188213 - protein, 1298 aa, Zea Mays
METPSEALKPAEAKPAKPRPVAPTGRFALGTASSIKKRADGSAPAEVGVPRSSLMKSTSSLNASSATRRSSTGTAGKQQDNGSSAAAKKSSPTLSDGARKTKLVSAPAAGSKPAVEKKTSLVERTGADLARKPAVKASPTSTLKKVQSKTESSNGSSGSTRRVSSNASVPSPRSVTSNAARKLGTQASSAASNRRKSSTADSRDSRFMMLPQVDLKASDEVRLDSRGHRVRSLKQLRLSHALEFVYLRDNLLSSLEGIEILKGVKVLDLSFNDFKLPGFEPLGNCVVLQQLYLAGNQITSLASLPELPNLEFLSIAQNRLKSVCMARQPRLQVLAASRNKISTLKGFPHFPSLEHLRVEENPLLEMPHLEAASILLIGPTLKKFNDRDLNPNEAEVAKQYPAHTAICIRDGWEFCSPELAADSTFSFLLEQWNNKLPQGYMVNKAYVDHPFEEDPCHCHFRFTNLGGEGELVLKYQWFLGGKTPTDFVAIPGASSEVYWPKREDVGRCLKVECTPIVNGAEFSPVFAVSLPVSPGTGCPKVINLAVSGEVVEGNILSGVPEIAWCGGTPGKGVASWLRRRWNGNAVVIDGAEGMEYQLTVNDINSSLVFMYTPVTDEGVKGEPQCTMTDFVKAATPSVSNVHVLGDIVEDNIIVGKGKYFGGREGLSKIRWFREKENGEFLLVLSDSMEYTLTKEDVGRHLKFVYIPVNLEGQEGESACAITDVVKKAPPKVFNLKIVGESMEGSKISASATVTGGTEGSSRVQWYKASSSEFKNEHELEALTPSRVSKTFRIPLGAVGYYIVAKFTPVAPDGEVGEPAYATSDGLVETLPPSLNFLTVTGEFSEGQILTASYGYIGGHEGNSLYSWHLHEAEDDEGTPLSEATGLLQYCVTKEAVGKFVSFKCTPVRDDDIVGEARSFIGKDRVTPGMPTLLSLEVTGDAIEGTTMFASKRYWGGEEGDTMFRWILTNSDGTEKEIEGATSSSYTLKCNDIGFYISVLCKPVRNDGVDGSLVSTEAIGPIIPGPPTCQSLELAGSMVEGGRLTFHAVYTGGLRGSCIQEWFRLHDDGHKDKLTADECLDLDLADIDCRIELMYTPVREDGVHGLPRSVTSDTILPGEPKGVNLILPECFEDNEISPIKTYFGGKEGTGKYTWFRNKEKLDNLEFDLVAESSEVVGETLKYKPSLNDVSSYLILYWVPTRRDGKVGDPLMAISDDPVMAAFPSVSDVHLEQKSSDVYCGLGIYYGGYEGLSLYRWYRESSDGTRLHIDGADSVTYEVTDADYSCRLLFGWDKWRRKTL

SEQ ID NO: 188214 - protein, 940 aa, Zea Mays
METPSEALKPAEAKPAKPRPVAPTGRFALGTASSIKKRADGSAPAEVGVPRSSLMKSTSSLNASSATRRSSTGTAGKQQDNGSSAAAKKSSPTLSDGARKTKLVSAPAAGSKPAVEKKTSLVERTGADLARKPAVKASPTSTLKKVQSKTESSNGSSGSTRRVSSNASVPSPRSVTSNAARKLGTQASSAASNRRKSSTADSRDSRFMMLPQVDLKASDEVRLDSRGHRVRSLKQLRLSHALEFVYLRDNLLSSLEGIEILKGVKVLDLSFNDFKLPGFEPLGNCVVLQQLYLAGNQITSLASLPELPNLEFLSIAQNRLKSVCMARQPRLQVLAASRNKISTLKGFPHFPSLEHLRVEENPLLEMPHLEAASILLIGPTLKKFNDRDLNPNEAEVAKQYPAHTAICIRDGWEFCSPELAADSTFSFLLEQWNNKLPQGYMVNKAYVDHPFEEDPCHCHFRFTNLGGEGELVLKYQWFLGGKTPTDFVAIPGASSEVYWPKREDVGRCLKVECTPIVNGAEFSPVFAVSLPVSPGTGCPKVINLAVSGEVVEGNILSGVPEIAWCGGTPGKGVASWLRRRWNGNAVVIDGAEGMEYQLTVNDINSSLVFMYTPVTDEGVKGEPQCTMTDFVKAATPSVSNVHVLGDIVEDNIIVGKGKYFGGREGLSKIRWFREKENGEFLLVLSDSMEYTLTKEDVGRHLKFVYIPVNLEGQEGESACAITDVVKKAPPKVFNLKIVGESMEGSKISASATVTGGTEGSSRVQWYKASSSEFKNEHELEALTPSRVSKTFRIPLGAVGYYIVAKFTPVAPDGEVGEPAYATSDGLVETLPPSLNFLTVTGEFSEGQILTASYGYIGGHEGNSLYSWHLHEAEDDEGTPLSEATGLLQYCVTKEAVGKFVSFKCTPVRDDDIVGEARSFIGKDRVTPGASVFVFLKKLRH

SEQ ID NO: 188215 - protein, 1646 aa, Zea Mays
METPSEALKPAEAKPAKPRPVAPTGRFALGTASSIKKRADGSAPAEVGVPRSSLMKSTSSLNASSATRRSSTGTAGKQQDNGSSAAAKKSSPTLSDGARKTKLVSAPAAGSKPAVEKKTSLVERTGADLARKPAVKASPTSTLKKVQSKTESSNGSSGSTRRVSSNASVPSPRSVTSNAARKLGTQASSAASNRRKSSTADSRDSRFMMLPQVDLKASDEVRLDSRGHRVRSLKQLRLSHALEFVYLRDNLLSSLEGIEILKGVKVLDLSFNDFKLPGFEPLGNCVVLQQLYLAGNQITSLASLPELPNLEFLSIAQNRLKSVCMARQPRLQVLAASRNKISTLKGFPHFPSLEHLRVEENPLLEMPHLEAASILLIGPTLKKFNDRDLNPNEAEVAKQYPAHTAICIRDGWEFCSPELAADSTFSFLLEQWNNKLPQGYMVNKAYVDHPFEEDPCHCHFRFTNLGGEGELVLKYQWFLGGKTPTDFVAIPGASSEVYWPKREDVGRCLKVECTPIVNGAEFSPVFAVSLPVSPGTGCPKVINLAVSGEVVEGNILSGVPEIAWCGGTPGKGVARRRWNGNAVVIDGAEGMEYQLTVNDINSSLVFMYTPVTDEGVKGEPQCTMTDFVKAATPSVSNVHVLGDIVEDNIIVGKGKYFGGREGLSKIRWFREKENGEFLLVLSDSMEYTLTKEDVGRHLKFVYIPVNLEGQEGESACAITDVVKKAPPKVFNLKIVGESMEGSKISASATVTGGTEGSSRVQWYKASSSEFKNEHELEALTPSRVSKTFRIPLGAVGYYIVAKFTPVAPDGEVGEPAYATSDGLVETLPPSLNFLTVTGEFSEGQILTASYGYIGGHEGNSLYSWHLHEAEDDEGTPLSEATGLLQYCVTKEAVGKFVSFKCTPVRDDDIVGEARSFIGKDRVTPGMPTLLSLEVTGDAIEGTTMFASKRYWGGEEGDTMFRWILTNSDGTEKEIEGATSSSYTLKCNDIGFYISVLCKPVRNDGVDGSLVSTEAIGPIIPGPPTCQSLELAGSMVEGGRLTFHAVYTGGLRGSCIQEWFRLHDDGHKDKLTADECLDLDLADIDCRIELMYTPVREDGVHGLPRSVTSDTILPGEPKGVNLILPECFEDNEISPIKTYFGGKEGTGKYTWFRNKEKLDNLEFDLVAESSEVVGETLKYKPSLNDVSSYLILYWVPTRRDGKVGDPLMAISDDPVMAAFPSVSDVHLEQKSSDVYCGLGIYYGGYEGLSLYRWYRESSDGTRLHIDGADSVTYEVTDADYSCRLLFGYTPVRSDGISGEEKLSEPSDVILPELLKIETLNFKGNQVERETLTAAEQIPYSEIQQHIWKNYKKEMKYQWFISNESGGDQSFEPLATQCSRSYKVRFEDIGRCLKCECFVTDVFGRSSELVSAVTAPILPGRPKIEKLEIEGRGFHTDLYAVQGTYSGGKEGKSKIQWLRSMVGSPDLISIPGETGRTYEANVDDVGYRLVAIYTPVREDGVEGQPVSVSTEQIAVEPELYREVKQKLDDGSVKFEVLCDKDRTPKKAQVMGHLERRVLEVNRKRIKVVKPGSKTSFPSTEVRGTYAPPFHVELYRNDQHRFKIVVDGDTEVDLMVQTRHMRDRIILTIRGLAQKFNSTSLNTLLRIES

SEQ ID NO: 188216 - protein, 1303 aa, Zea Mays
METPSEALKPAEAKPAKPRPVAPTGRFALGTASSIKKRADGSAPAEVGVPRSSLMKSTSSLNASSATRRSSTGTAGKQQDNGSSAAAKKSSPTLSDGARKTKLVSAPAAGSKPAVEKKTSLVERTGADLARKPAVKASPTSTLKKVQSKTESSNGSSGSTRRVSSNASVPSPRSVTSNAARKLGTQASSAASNRRKSSTADSRDSRFMMLPQVDLKASDEVRLDSRGHRVRSLKQLRLSHALEFVYLRDNLLSSLEGIEILKGVKVLDLSFNDFKLPGFEPLGNCVVLQQLYLAGNQITSLASLPELPNLEFLSIAQNRLKSVCMARQPRLQVLAASRNKISTLKGFPHFPSLEHLRVEENPLLEMPHLEAASILLIGPTLKKFNDRDLNPNEAEVAKQYPAHTAICIRDGWEFCSPELAADSTFSFLLEQWNNKLPQGYMVNKAYVDHPFEEDPCHCHFRFTNLGGEGELVLKYQWFLGGKTPTDFVAIPGASSEVYWPKREDVGRCLKVECTPIVNGAEFSPVFAVSLPVSPGTGCPKVINLAVSGEVVEGNILSGVPEIAWCGGTPGKGVASWLRRRWNGNAVVIDGAEGMEYQLTVNDINSSLVFMYTPVTDEGVKGEPQCTMTDFVKAATPSVSNVHVLGDIVEDNIIVGKGKYFGGREGLSKIRWFREKENGEFLLVLSDSMEYTLTKEDVGRHLKFVYIPVNLEGQEGESACAITDVVKKAPPKVFNLKIVGESMEGSKISASATVTGGTEGSSRVQWYKASSSEFKNEHELEALTPSRVSKTFRIPLGAVGYYIVAKFTPVAPDGEVGEPAYATSDGLVETLPPSLNFLTVTGEFSEGQILTASYGYIGGHEGNSLYSWHLHEAEDDEGTPLSEATGLLQYCVTKEAVGKFVSFKCTPVRDDDIVGEARSFIGKDRVTPGMPTLLSLEVTGDAIEGTTMFASKRYWGGEEGDTMFRWILTNSDGTEKEIEGATSSSYTLKCNDIGFYISVLCKPVRNDGVDGSLVSTEAIGPIIPGPPTCQSLELAGSMVEGGRLTFHAVYTGGLRGSCIQEWFRLHDDGHKDKLTADECLDLDLADIDCRIELMYTPVREDGVHGLPRSVTSDTILPGEPKGVNLILPECFEDNEISPIKTYFGGKEGTGKYTWFRNKEKLDNLEFDLVAESSEVVGETLKYKPSLNDVSSYLILYWVPTRRDGKVGDPLMAISDDPVMAAFPSVSDVHLEQKSSDVYCGLGIYYGGYEGLSLYRWYRESSDGTRLHIDGADSVTYEVTDADYSCRLLFGTTQNRDTQFQGESG

SEQ ID NO: 188217 - protein, 1234 aa, Zea Mays
METPSEALKPAEAKPAKPRPVAPTGRFALGTASSIKKRADGSAPAEVGVPRSSLMKSTSSLNASSATRRSSTGTAGKQQDNGSSAAAKKSSPTLSDGARKTKLVSAPAAGSKPAVEKKTSLVERTGADLARKPAVKASPTSTLKKVQSKTESSNGSSGSTRRVSSNASVPSPRSVTSNAARKLGTQASSAASNRRKSSTADSRDSRFMMLPQVDLKASDEVRLDSRGHRVRSLKQLRLSHALEFVYLRDNLLSSLEGIEILKGVKVLDLSFNDFKLPGFEPLGNCVVLQQLYLAGNQITSLASLPELPNLEFLSIAQNRLKSVCMARQPRLQVLAASRNKISTLKGFPHFPSLEHLRVEENPLLEMPHLEAASILLIGPTLKKFNDRDLNPNEAEVAKQYPAHTAICIRDGWEFCSPELAADSTFSFLLEQWNNKLPQGYMVNKAYVDHPFEEDPCHCHFRFTNLGGEGELVLKYQWFLGGKTPTDFVAIPGASSEVYWPKREDVGRCLKVECTPIVNGAEFSPVFAVSLPVSPGTGCPKVINLAVSGEVVEGNILSGVPEIAWCGGTPGKGVASWLRRRWNGNAVVIDGAEGMEYQLTVNDINSSLVFMYTPVTDEGVKGEPQCTMTDFVKAATPSVSNVHVLGDIVEDNIIVGKGKYFGGREGLSKIRWFREKENGEFLLVLSDSMEYTLTKEDVGRHLKFVYIPVNLEGQEGESACAITDVVKKAPPKVFNLKIVGESMEGSKISASATVTGGTEGSSRVQWYKASSSEFKNEHELEALTPSRVSKTFRIPLGAVGYYIVAKFTPVAPDGEVGEPAYATSDGLVETLPPSLNFLTVTGEFSEGQILTASYGYIGGHEGNSLYSWHLHEAEDDEGTPLSEATGLLQYCVTKEAVGKFVSFKCTPVRDDDIVGEARSFIGKDRVTPGMPTLLSLEVTGDAIEGTTMFASKRYWGGEEGDTMFRWILTNSDGTEKEIEGATSSSYTLKCNDIGFYISVLCKPVRNDGVDGSLVSTEAIGPIIPGPPTCQSLELAGSMVEGGRLTFHAVYTGGLRGSCIQEWFRLHDDGHKDKLTADECLDLDLADIDCRIELMYTPVREDGVHGLPRSVTSDTILPGEPKGVNLILPECFEDNEISPIKTYFGGKEGTGKYTWFRNKEKLDNLEFDLVAESSEVVGETLKYKPSLNDVSSYLILYWVPTRRDGKVGDPLMAISDDPVMLYSCSFRWDKWRRKTL

SEQ ID NO: 188218 - protein, 1235 aa, Zea Mays
METPSEALKPAEAKPAKPRPVAPTGRFALGTASSIKKRADGSAPAEVGVPRSSLMKSTSSLNASSATRRSSTGTAGKQQDNGSSAAAKKSSPTLSDGARKTKLVSAPAAGSKPAVEKKTSLVERTGADLARKPAVKASPTSTLKKVQSKTESSNGSSGSTRRVSSNASVPSPRSVTSNAARKLGTQASSAASNRRKSSTADSRDSRFMMLPQVDLKASDEVRLDSRGHRVRSLKQLRLSHALEFVYLRDNLLSSLEGIEILKGVKVLDLSFNDFKLPGFEPLGNCVVLQQLYLAGNQITSLASLPELPNLEFLSIAQNRLKSVCMARQPRLQVLAASRNKISTLKGFPHFPSLEHLRVEENPLLEMPHLEAASILLIGPTLKKFNDRDLNPNEAEVAKQYPAHTAICIRDGWEFCSPELAADSTFSFLLEQWNNKLPQGYMVNKAYVDHPFEEDPCHCHFRFTNLGGEGELVLKYQWFLGGKTPTDFVAIPGASSEVYWPKREDVGRCLKVECTPIVNGAEFSPVFAVSLPVSPGTGCPKVINLAVSGEVVEGNILSGVPEIAWCGGTPGKGVASWLRRRWNGNAVVIDGAEGMEYQLTVNDINSSLVFMYTPVTDEGVKGEPQCTMTDFVKAATPSVSNVHVLGDIVEDNIIVGKGKYFGGREGLSKIRWFREKENGEFLLVLSDSMEYTLTKEDVGRHLKFVYIPVNLEGQEGESACAITDVVKKAPPKVFNLKIVGESMEGSKISASATVTGGTEGSSRVQWYKASSSEFKNEHELEALTPSRVSKTFRIPLGAVGYYIVAKFTPVAPDGEVGEPAYATSDGLVETLPPSLNFLTVTGEFSEGQILTASYGYIGGHEGNSLYSWHLHEAEDDEGTPLSEATGLLQYCVTKEAVGKFVSFKCTPVRDDDIVGEARSFIGKDRVTPGMPTLLSLEVTGDAIEGTTMFASKRYWGGEEGDTMFRWILTNSDGTEKEIEGATSSSYTLKCNDIGFYISVLCKPVRNDGVDGSLVSTEAIGPIIPGPPTCQSLELAGSMVEGGRLTFHAVYTGGLRGSCIQEWFRLHDDGHKDKLTADECLDLDLADIDCRIELMYTPVREDGVHGLPRSVTSDTILPGEPKGVNLILPECFEDNEISPIKTYFGGKEGTGKYTWFRNKEKLDNLEFDLVAESSEVVGETLKYKPSLNDVSSYLILYWVPTRRDGKVGDPLMAISDDPVMAEKFRCILWTRHLLWWI

SEQ ID NO: 188219 - protein, 858 aa, Zea Mays
MVNKAYVDHPFEEDPCHCHFRFTNLGGEGELVLKYQWFLGGKTPTDFVAIPGASSEVYWPKREDVGRCLKVECTPIVNGAEFSPVFAVSLPVSPGTGCPKVINLAVSGEVVEGNILSGVPEIAWCGGTPGKGVASWLRRRWNGNAVVIDGAEGMEYQLTVNDINSSLVFMYTPVTDEGVKGEPQCTMTDFVKAATPSVSNVHVLGDIVEDNIIVGKGKYFGGREGLSKIRWFREKENGEFLLVLSDSMEYTLTKEDVGRHLKFVYIPVNLEGQEGESACAITDVVKKAPPKVFNLKIVGESMEGSKISASATVTGGTEGSSRVQWYKASSSEFKNEHELEALTPSRVSKTFRIPLGAVGYYIVAKFTPVAPDGEVGEPAYATSDGLVETLPPSLNFLTVTGEFSEGQILTASYGYIGGHEGNSLYSWHLHEAEDDEGTPLSEATGLLQYCVTKEAVGKFVSFKCTPVRDDDIVGEARSFIGKDRVTPGMPTLLSLEVTGDAIEGTTMFASKRYWGGEEGDTMFRWILTNSDGTEKEIEGATSSSYTLKCNDIGFYISVLCKPVRNDGVDGSLVSTEAIGPIIPGPPTCQSLELAGSMVEGGRLTFHAVYTGGLRGSCIQEWFRLHDDGHKDKLTADECLDLDLADIDCRIELMYTPVREDGVHGLPRSVTSDTILPGEPKGVNLILPECFEDNEISPIKTYFGGKEGTGKYTWFRNKEKLDNLEFDLVAESSEVVGETLKYKPSLNDVSSYLILYWVPTRRDGKVGDPLMAISDDPVMAAFPSVSDVHLEQKSSDVYCGLGIYYGGYEGLSLYRWYRESSDGTRLHIDGADSVTYEVTDADYSCRLLFGWDKWRRKTL

SEQ ID NO: 188220 - protein, 746 aa, Zea Mays
MVYFTSVQSDTYLETQYFSCSVEEKTAGMPTLLSLEVTGDAIEGTTMFASKRYWGGEEGDTMFRWILTNSDGTEKEIEGATSSSYTLKCNDIGFYISVLCKPVRNDGVDGSLVSTEAIGPIIPGPPTCQSLELAGSMVEGGRLTFHAVYTGGLRGSCIQEWFRLHDDGHKDKLTADDLDLADIDCRIELMYTPVREDGVHGLPRSVTSDTILPGEPKGVNLILPECFEDNEISPIKTYFGGKEGTGKYTWFRNKEKLDNLEFDLVAESSEVVGETLKYKPSLNDVSSYLILYWVPTRRDGKVGDPLMAISDDPVMAAFPSVSDVHLEQKSSDVYCGLGIYYGGYEGLSLYRWYRESSDGTRLHIDGADSVTYEVTDADYSCRLLFGYTPVRSDGISGEEKLSEPSDVILPELLKIETLNFKGNQVERETLTAAEQIPYSEIQQHIWKNYKKEMKYQWFISNESGGDQSFEPLATQCSRSYKVRFEDIGRCLKCECFVTDVFGRSSELVSAVTAPILPGRPKIEKLEIEGRGFHTDLYAVQGTYSGGKEGKSKIQWLRSMVGSPDLISIPGETGRTYEANVDDVGYRLVAIYTPVREDGVEGQPVSVSTEQIAVEPELYREVKQKLDDGSVKFEVLCDKDRTPKKAQVMGHLERRVLEVNRKRIKVVKPGSKTSFPSTEVRGTYAPPFHVELYRNDQHRFKIVVDGDTEVDLMVQTRHMRDRIILTIRGLAQKFNSTSLNTLLRIES

SEQ ID NO: 188221 - protein, 462 aa, Zea Mays
MVYFTSVQSDTYLETQYFSCSVEEKTAGMPTLLSLEVTGDAIEGTTMFASKRYWGGEEGDTMFRWILTNSDGTEKEIEGATSSSYTLKCNDIGFYISVLCKPVRNDGVDGSLVSTEAIGPIIPGPPTCQSLELAGSMVEGGRLTFHAVYTGGLRGSCIQEWFRLHDDGHKDKLTADECLDLDLADIDCRIELMYTPVREDGVHGLPRSVTSDTILPGEPKGVNLILPECFEDNEISPIKTYFGGKEGTGKYTWFRNKEKLDNLEFDLVAESSEVVGETLKYKPSLNDVSSYLILYWVPTRRDGKVGDPLMAISDDPVMAAFPSVSDVHLEQKSSDVYCGLGIYYGGYEGLSLYRWYRESSDGTRLHIDGADSVTYEVTDADYSCRLLFGYTPVRSDGISGEEKLSEPSDVILPELLKIETLNFKGNQVERETLTAAEQIPYSEIQQHIWKNYKKEMKYQWKA

SEQ ID NO: 188222 - protein, 328 aa, Zea Mays
MVYFTSVQSDTYLETQYFSCSVEEKTAGMPTLLSLEVTGDAIEGTTMFASKRYWGGEEGDTMFRWILTNSDGTEKEIEGATSSSYTLKCNDIGFYISVLCKPVRNDGVDGSLVSTEAIGPIIPGPPTCQSLELAGSMVEGGRLTFHAVYTGGLRGSCIQEWFRLHDDGHKDKLTADECLDLDLADIDCRIELMYTPVREDGVHGLPRSVTSDTILPGEPKGVNLILPECFEDNEISPIKTYFGGKEGTGKYTWFRNKEKLDNLEFDLVAESSEVVGETLKYKPSLNDVSSYLILYWVPTRRDGKVGDPLMAISDDPVMAVILLFVQMG

SEQ ID NO: 188223 - protein, 79 aa, Zea Mays
MVTTTTLMLFAGRFGLAPSANRKATAGLKLEARDSGLQTGDPAGFTLADTLACGAVGHILGVGIVLGLKNTGALDQIIG

SEQ ID NO: 188224 - protein, 272 aa, Zea Mays
MGEITNVMEYQAIAKQKLPKMAYDYYASGAEDEWTLQENREAFSRILFRPRILIDVSKIDMTTTVLGFKISMPIMVAPTAMQKMAHPDGENATARAAAAAGTIMTLSSWATSSVEEVASTGPGIRFFQLYVYKDRKVVEQLVRRAERAGFKAIALTVDTPRLGRREADIKNRFVLPPHLTLKNFEGLDLGKMDQAADSGLASYVAGQVDRTLSWKDVKWLQTITTLPILVKGVLTAEDSLRWRTARRGSSCRTTARGSWTTCRRPSARWRRS

SEQ ID NO: 188225 - protein, 66 aa, Zea Mays
MFFVLCSVLRTYSDVLPSSEVGGLSCVYQMCWALDARRSSAHTKKKNTEAHLHVFLRAKIRSWQQR

SEQ ID NO: 188226 - protein, 846 aa, Zea Mays
MATAATASHPASASTSGRDALAAASSSPAAVCLVPFRWWARVREEEAAGGVQYAATAAASPSYYGLRLLHSLLHPDLVLRLERGECRAGGGNGGGRSYALVPADELSRALARQNSGLGLQNKHSFAGDSAGAYPLVLRISVRETSILTLKISKKDNPFENYKRANKIFNVDSQPVHVWDFSGQTNLILMNEWNRLHDCCHADQENLLEVQVYAMSDSLTSKIGGTNKENYGDISDMNSDSSYRSFGRAGSMGLIGLENLGNTCFMNSSIQCLAHTPKLVEYFLGDYAKNINRTNPLGLNGELALAFGELLRSLWTTDGKPVPPHYFKEKIACFAPQFGGFNQHDSQELLAFLLDGLHEDLNQVKCKPYEEAKDASGRPDEEVADEYWSNHLARNDSVIVDTCHGQYKSTLTCPTCIFSTDGSREPCSYDVSVPKFGTLSDLVQALSIVCLLGDDEILLVTEVYNNCIIRYLEEPSDSVSLLRDGDKLAAYRLPKRHEKSPLVVFTHQHFVQHSSDGNLTPQMREFEAPLLAALPEEISGLSLQDIYLKLLSPFQLSNGASSLNDCMESNSDSVDTPSDSGSINFQNSQLEDGPESNHCSASECEVTKGPDDLYDGVSGSNKEAHMDFEFYLKSERGEGQQQKIEINELHLLLETAPSRLHVNVHWLQNASRKYATSMLNNLPEIHKLELIPKGTEDSVALHGCLEAFLKEEPLGPEDMWYCPRCKKHQQAMKKLDLWRLPEVLVIHLKRFSYTQFTRNKLETFVDFPTVDLDLSSYVADKSEQPSSHYRLYAVSNHYGNMGGGHYTASIYHEEGKGWYKFDDDCVTPMSEDSIKTPAAYVLFYRRE

SEQ ID NO: 188227 - protein, 411 aa, Zea Mays
MATAATASHPASASTSGRDALAAASSSPAAVCLVPFRWWARVREEEAAGGVQYAATAAASPSYYGLRLLHSLLHPDLVLRLERGECRAGGGNGGGRSYALVPADELSRALARQNSGLGLQNKHSFAGDSAGAYPLVLRISVRETSILTLKISKKDNPFENYKRANKIFNVDSQPVHVWDFSGQTNLILMNEWNRLHDCCHADQENLLEVQVYAMSDSLTSKIGGTNKENYGDISDMNSDSSYRSFGRAGSMGLIGLENLGNTCFMNSSIQCLAHTPKLVEYFLGDYAKNINRTNPLGLNGELALAFGELLRSLWTTDGKPVPPHYFKEKIACFAPQFGGFNQHDSQELLAFLLDGLHEDLNQVKCKPYEEAKDASGRPDEEVADEYWSNHLARNDSVIVDTCHVSLNAPIL

SEQ ID NO: 188228 - protein, 825 aa, Zea Mays
MASPSLVDTQLIEALEHQTRVILAELDKRFTALDSKWEARVQTHQVAVGAVVEWRPQVDASIEHLQQHQADQPHLRSVGNMPHEGGLLSSAITKQIEPVCLKELALLGDADSRVQATETDVVFPSSKMLSLVGAVDKEERHSTQEVPRRAPRRNALRGGTKPTPSPSSTTTAPLEHPALGSRETWSRASSTLCSSASCSSSRWRACATRRTRAWRPTRGTCNASGRATHSTQAPPSPAASGTSPPPRRCPRRSTGMWRPATTVGVGSTPTSTLLHTQASTAPWVEEQVSGSSPLGCSTKCLCQAMQNIVKPNPPRMNEITGAARLKPQGSFHYGSINGSQIYKMRNEPPVIINGKKRVIVSALVWRIKSLDIMTSYILPKPPWLAFDPGKLFRVDYSSSSTSASLPYALQFSLDVQTMETVDIVVPNQRYTTGEQVSVAVSVAATQGLASVNTMKFQGIIQGVKVAILVDSGSSHSFVSADLASQLSSVVGMVTLVSVQVADGGLLQCYCQLLGAKWMVQQCEFSTNFRVLDISAYNVIVDMDWLSSYSSMKVHWAQWWVIIPYQGSFVLLHGCSAVLPPRFWIIDDGWQETLDYYPETLHQMLVANADGSFKLPGNSVKDFLDSKTALKIHVLITNFQNKLLEVINATELPEFLGGPCTYTMGGCLMSNKGPWNDPDTMKLSHNKEAKFTRHNRGTALNSDPDKLSFNGFILWEYSIKCVDWQPWAPPMSLEILLEIGTSRPRPWPNFAPPLIPSQGYCSVVRQSDHNSRCVKFPYFGRCSAESQCFQFKALQYVLLHSWHQDPGYVQFLLRLGGKSNFKEGRM

SEQ ID NO: 188229 - protein, 636 aa, Zea Mays
MAGGIILLLLVIPLVVRIEGSVMGERSNSFSQDSNNSSPAENKLEPGEKSFASEAYPVKWSISPSLGQQSQESFEPEAYPMKWKEPPPSSQQSQDSFEPEAYRVKWNKSPPPHQQSQDSLEPEAYRVKWNKSPPPLQQSQDSFEPEAYRVKWNKSPPPHQQLQDSLEPEAYRVKWNKSPPPLQQSQGSFESEAYRVKWNKSPPPHQQSQDSFEPEAYRVKWNKSPPPLQQSQDSFEPEAYRVKWNKSPPPHQQSQDSFEPEAYRVKWNKSPPPLQQSQDSFEPEAYRVKWNKSPPPLQQSQDSFEPEAYRVKWNKSPPPLQQSQDSFEPEAYRVKWNKSPPPLQQSQDSFEPEAYRVKWNKSPPPLQQSQDSFEPEAYWVGWKQHAQGETDVADGTTPARGHGLHVATGMLFTRKSLLPGTALPEGTRFSGHGFPDPQRFALRADADAIPFSYSQLDAILRMFRIPRGSKKAEQVADTLRACEAESSDAHACATSEQAAADFAASSLGVRASDLVSVVTAVHGGKDATRYVVAPDGVTRIGKAAGAATAVPCHPMPYPYMVHYCHRPTDVEALRVELTGLGDDGATIAIAMCHANTMSWDDRYFQMLNATRGEEICHFMPWNYVLWLPAADLLANN

SEQ ID NO: 188230 - protein, 85 aa, Zea Mays
MIAGFPTFQLLFSVSCCSVAVFHVLMSFVHLFVEQHSVLVSRSIEQAFLVSIGLRCDVYLLYLNNIIVMSCQCYKTTEQMHCILF

SEQ ID NO: 188231 - protein, 63 aa, Zea Mays
MASAGLKPGVPVILRELEPSSEMFKQGASLRVTGRSFTLLLRKQIFKGTGKAGTPSHKQVKGL

SEQ ID NO: 188232 - protein, 144 aa, Zea Mays
MAGGHPAPLRPVVVAMKGHPGSGKSTAARAIATALCCPLLDKDDVRDCMLPLEGLAAAGMLNDLSYAVLWRMAERQPVCLWSSWSVALVITRNGAGGWRAVGRLLPMVAVVMDGISQRHGLSWRGFWKGTKVAQTMKLGMYRGL

SEQ ID NO: 188233 - protein, 162 aa, Zea Mays
MLISSPRAAFSSSVPCRAAAKFPARSSFSSQPSKLSARRGFPAMAAPASLLPTSCPAASLSPSARLPCIARSLLQACRQSSPVAPLARLCAPRAAFRARPNQTVPSLLLPVSFLYLQLLSHGRRMASRSPNLPTRFLPVLSSCLTRCAVLPHDIVFPAFARP

SEQ ID NO: 188234 - protein, 472 aa, Zea Mays
MARGEKSFASEAYAVNWNEPPDQQSQDSLEQLEPYRVIWKQPVQGEKSFVSEAYPAKWNKPPSPSKQSQDSFEPEAYRVKWNKSPPPHQQSQDSFESEAYRVKWNKSPPPHQQSQDSFEPEAYRVKWNKSPPPHQQSQDSLEQEAYRVKWNKSPPPQQQTQDSFEQEAYRVKWNKSPPPHQQSQDSFEPEAYRVKWNKSPPPHQQSQDSFEPKAYWVGWKKHAQGATDVADETTPARGHGLHVATGMLFTRKSLLPGTALPEGTKFCGHGFLDPERFELRADADAIPFSYSQLDTILRMFRIPRGSKKAEQVAATLRTCEAESPEAHACATSEQAAADFAASSLGVRASKLVALVTTVHGGKDATRYVVAPNGITRIGKAAGAAAVVPCHPMPYPYMVHYCHQPADVEALRVELTGLGDGGVTTAIAMCHANTMNWDDRYFQMLNVTRGEEICHFMPRNYVLWLPAAELLGN

SEQ ID NO: 188235 - protein, 107 aa, Zea Mays
MPGPSTISTNLAIAELALRVNRAIAGKLRRSRRSGPDNWSGRIRGAYQRCRVTGVGLCWSESTTIARRSHLRVRFRSTTWAGITATGFTVKDRYHKMRHMKDVVMSS

SEQ ID NO: 188236 - protein, 238 aa, Zea Mays
MRGCNQNVVVPPIKARSVVRLGPLTESTVRLNTTLLLSLNAIMIGVDLSAREYYIPGPSGSYLNYGAAASEVEIDLLTGASTIVRSDLIYDCGQSLNPAVDLGQVEGAFVQGIGYFMSEEYVTNSDGLLISDGTWTYKIPTVDTIPKQFNVKLLNSGFHKKRVLSSKASGEPPLLLAASVHCATREAIRAARNEQHCSGSKPSPSHFDLEVPAIMPVVKELCGLDNVERYLESLLSSE

SEQ ID NO: 188237 - protein, 246 aa, Zea Mays
MAHLPASAPAALTLCPPNLFPPAQSILCGATATPSPVPPPSVPRPPLSSPPARLSLPLSPSLLAAMNNLLTDSFELPRRDSSRDADIEMGMHQADASDNLKDFLKKVDAIESIIAKLSNLLNKLQTANEESKAVTKASSMKAIKQRMEKDIDEVGKIARQAKTKVDELERDNLSNRQKPGCGKGSAVDRSREQTTGAVKKKLKERMDDFQTLREAIRQEYREVVERRVFTVTGNRPDEEFLMWLPL

SEQ ID NO: 188238 - protein, 279 aa, Zea Mays
MGMHQADASDNLKDFLKKVDAIESIIAKLSNLLNKLQTANEESKAVTKASSMKAIKQRMEKDIDEVGKIARQAKTKVDELERDNLSNRQKPGCGKGSAVDRSREQTTGAVKKKLKERMDDFQTLREAIRQEYREVVERRVFTVTGNRPDEETIDDLIETGKSEQIFKDAIQHQGRGQILDTVAEIQERHDAVRDLERKLLELQQIFMDMAVLVEAQGDMINNIETHVSNATNHIQQGVSALQNAKKLQKNSRKWMCYAIILLLVIVAVIVVAVIQPWKK

SEQ ID NO: 188239 - protein, 210 aa, Zea Mays
MGMHQADASDNLKDFLKKVDAIESIIAKLSNLLNKLQTANEESKAVTKASSMKAIKQRMEKDIDEVGKIARQAKTKVDELERDNLSNRQKPGCGKGSAVDRSREQTTGAVKKKLKERMDDFQTLREAIRQEYREVVERRVFTVTGNRPDEETIDDLIETGKSEQIFKDAIQHQGRGQILDTVAEIQERHDAVRDLERKLLELQQVMLFFA

SEQ ID NO: 188240 - protein, 366 aa, Zea Mays
MFTKWIQSYRDLPLMINQWANVTRWEMRTKPFIRTLEFLWQEGHTAHATLEEAEKEAMQMIDVYTKFAFEHAAIPVIPGRKSRVETFAGANRTYTIEAMMGDKKALQAGTSHNLGQNFSRAFGTQFMDENGQIEHVWQTSWAISTRFVGGIIMTHGDDAGLMLPPRIAPIQVIIVPIWKKGDEKAVVVEAVDSVQKILKEAGIRVKVDDSELRTPGWKFNHYEMKGVPVRIEIGPRDVTNKSVVVSRRDVPGKQGKEFGVSMEPSILVNHIKGRLDDIQASLLQKAITFRDSNIVDVSSYGELKEAISEGKWARGPWSASDADELKVKEETSATIRCYPFEQPEGTKKCFMTGNPAEEVAIFAKSY

SEQ ID NO: 188241 - protein, 523 aa, Zea Mays
MAIALAFGGTEPPNPGGQSPQATMASLLRLPSLLSPSKPLLRRRLPAARLAASAASRGQASATAGAAAPAAAETRGGDREGQVTPRSADFNAWYTDVIAAAELADYGPVRGTMVIRPYGYAIWEAIQDYLNVKFKETGHSNMYFPQVRPTSETIVNHMFTKWIQSYRDLPLMINQWANVTRWEMRTKPFIRTLEFLWQEGHTAHATLEEAEKEAMQMIDVYTKFAFEHAAIPVIPGRKSRVETFAGANRTYTIEAMMGDKKALQAGTSHNLGQNFSRAFGTQFMDENGQIEHVWQTSWAISTRFVGGIIMTHGDDAGLMLPPRIAPIQVIIVPIWKKGDEKAVVVEAVDSVQKILKEAGIRVKVDDSELRTPGWKFNHYEMKGVPVRIEIGPRDVTNKSVVVSRRDVPGKQGKEFGVSMEPSILVNHIKGRLDDIQASLLQKAITFRDSNIVDVSSYGELKEAISEGKWARGPWSASDADELKVKEETSATIRCYPFEQPEGTKKCFMTGNPAEEVAIFAKSY

SEQ ID NO: 188242 - protein, 105 aa, Zea Mays
MEPSILVNHIKGRLDDIQASLLQKAITFRDSNIVDVSSYGELKEAISEGKWARGPWSASDADELKVKEETSATIRCYPFEQPEGTKKCFMTGNPAEEVAIFAKSY

SEQ ID NO: 188243 - protein, 152 aa, Zea Mays
MKIPSYLMISLGVPVRIEIGPRDVTNKSVVVSRRDVPGKQGKEFGVSMEPSILVNHIKGRLDDIQASLLQKAITFRDSNIVDVSSYGELKEAISEGKWARGPWSASDADELKVKEETSATIRCYPFEQPEGTKKCFMTGNPAEEVAIFAKSY

SEQ ID NO: 188244 - protein, 104 aa, Zea Mays
MGRILSIHEKIGQQPLHYDSHHHEQPGLLMGAERRRQTTNQSLGFFNVSTSLANQKHKEWVCFFFHAFLLCPYRARRASLCTSRLSSSAPRSHGLCGCTPACSR

SEQ ID NO: 188245 - protein, 651 aa, Zea Mays
MIDANSSFSGAKSTPRPGAKAEGSLHLQGQQNPQLQALIQQHNLAHMQQRQQQLLQSFAQTQPSQIGIPHQPQLPPSLAQPGIAVPVRTPVNNGLCSRRLMQYLYHKRRRPENNPITYWRKLVEEYFAPTARERWCVSSYEKRANASVSTAQTAQDVWRCDICKTHGAKGYESTYEVLPRLCQIRFDHGVIDEYLFLDMTKPNEFQLPNGLMVLEHTKVVQKSVYEHLHVIHEGHLRIIFTPELKIMSWEFCSRRHEEYITRRVLAPKVNNLLQVAQKFQTAATENGPAGVSNNDAQTICNMFVAASRQLAKNLEHHTLNEHGLSKRYVRCLQISEVVNNMKDLIEFTNRNNFGPIEGLKNYPKPNVSELPGQNPRETKQTTAAGGLPNDQNNTEAMGTKQETSARVDNGASVAGAVGNSAPQNAAALNGYQNLPRSSSANQSQLQQGASGAFKGPAATRNGMQMEASRSFCGPNQVQLARFQHPGSFQHPMPQHNNLQGLGLQNNHRGLGVSPQYQQHALNQLIQEVKNAKRHTLPQQPPLDIPNISSGITSGGANTNSAGTGDQGQRMAVNGAATIYTGPTSVINNSTARSNNFKSVSSNLAVAAAPAGGNAATLKAKPFHEFDDLEHLIANELVGSGLLNGNELAWNS

SEQ ID NO: 188246 - protein, 362 aa, Zea Mays
MKSISLAGFWHRRFVAASRQLAKNLEHHTLNEHGLSKRYVRCLQISEVVNNMKDLIEFTNRNNFGPIEGLKNYPKPNVSELPGQNPRETKQTTAAGGLPNDQNNTEAMGTKQETSARVDNGASVAGAVGNSAPQNAAALNGYQNLPRSSSANQSQLQQGASGAFKGPAATRNGMQMEASRSFCGPNQVQLARFQHPGSFQHPMPQHNNLQGLGLQNNHRGLGVSPQYQQHALNQLIQEVKNAKRHTLPQQPPLDIPNISSGITSGGANTNSAGTGDQGQRMAVNGAATIYTGPTSVINNSTARSNNFKSVSSNLAVAAAPAGGNAATLKAKPFHEFDDLEHLIANELVGSGLLNGNELAWNS

SEQ ID NO: 188247 - protein, 453 aa, Zea Mays
MTKPNEFQLPNGLMVLEHTKVVQKSVYEHLHVIHEGHLRIIFTPELKIMSWEFCSRRHEEYITRRVLAPKVNNLLQVAQKFQTAATENGPAGVSNNDAQTICNMFVAASRQLAKNLEHHTLNEHGLSKRYVRCLQISEVVNNMKDLIEFTNRNNFGPIEGLKNYPKPNVSELPGQNPRETKQTTAAGGLPNDQNNTEAMGTKQETSARVDNGASVAGAVGNSAPQNAAALNGYQNLPRSSSANQSQLQQGASGAFKGPAATRNGMQMEASRSFCGPNQVQLARFQHPGSFQHPMPQHNNLQGLGLQNNHRGLGVSPQYQQHALNQLIQEVKNAKRHTLPQQPPLDIPNISSGITSGGANTNSAGTGDQGQRMAVNGAATIYTGPTSVINNSTARSNNFKSVSSNLAVAAAPAGGNAATLKAKPFHEFDDLEHLIANELVGSGLLNGNELAWNS

SEQ ID NO: 188248 - protein, 184 aa, Zea Mays
MPPAQLPLLPQGRYPQFPIPSPPFARLEVVCPHHLCASRFPVPPHAPRRRHSGRWWGGGFALHRCCRVQEAESPRSMEVAFRVDNSATRCYNYTHDSFNSISAFFPHPQNRLSRILTACCQRRRAWCTLSSAISRKKSLTCKLVSIFLAYSNHSIVQSTPIQFRGFLLCSQAPVEKQGPVITNS

SEQ ID NO: 188249 - protein, 163 aa, Zea Mays
MFVLWYDLSFLFCFRIIYKLSIEIDFTVLIPTMSMKSLTSGLYSISADLDQFLFIRRLQMFSLPYKNTLFHLLIINCCTVHGLLSHSTSYDFRILTACCQRRRAWCTLSSAISRKKSLTCKLVSIFLAYSNHSIVQSTPIQFRGFLLCSQAPVEKQGPVITNS

SEQ ID NO: 188250 - protein, 163 aa, Zea Mays
MFVLWYDLSFLFCFRIIYKLSIEIDFTVLIPTMSMKSLTSGLYSISADLDQFLFIRRLQMFSLPYKNTLFHLLIINCCTVHGLLSHSTSYDFRILTAYCQRRRAWCTLSSAISRKKSLTCKLVSIFLAYSNHSIVQSTPIQFRGFLLCSQAPVEKQGPVITNS

SEQ ID NO: 188251 - protein, 117 aa, Zea Mays
MIKRRYFRQDHGDNSGSSSSSSSDCDSDNDLAEEAVSSEEVEEQEEEEAVKEESGEEEEGELEQQIVEGSSGYQSEDNSWNDVDGASIDDDEHSSPRDEERHEISLPIMKSSVQALS

SEQ ID NO: 188252 - protein, 235 aa, Zea Mays
MALASQVAANQPPPPTLSSPARRLPRASSNALLLLQPAAAVLGGRTLRLRPPGARRRALDAVVVARASSEAKAETAEAGGGGGGAEEERPYEEYEVTIEKPYGLKFTKGRDGGTYVEAIQPGAAADLTGQFEVGDKVLATSSVFGEEIWPAAGYGQTMYCIRQRIGPLYMKMERRFGKWDGAGDLTEKEIIRFERNSGVVSGRVREIQLQNYQRKMEQKMQREEDLRMGLKLYKT

SEQ ID NO: 188253 - protein, 508 aa, Zea Mays
MALHMSGSTLNGCYGIPSVHYKGRQGDYYILVMDMLGPSLWDVWNSMGQAMTPNMAACIAVESISILEKLHSKGFVHGDVKPENFLLGQPGSPDDKKLYLIDLGLASKWKENNGHHVDYDQRPDIFRGTIRYASVHAHLGRTGSRRDDLESLAYTLIFLIRGRLPWQGYQGDTKSFLVCKKKMATSPEMLCCFCPAPFKQFLEIVTNMKFDEEPNYAKLISIFDGLIEAPASRPVRIDGALKVGQKRGRLHANLEDEQPKKKVRLGSPAAQWISVYNARRPMKQRYHYNVADSRLSQHIEKGNDDGLYVSCVASSANLWALIMDAGTGFCSQVYELSPVFLHKDWIMEQWEKSYYITAIAGSTNGSSLVVMSKGTPYTQQSYKVSESFPYKWINKKWKEGFHVTSMATAGNRWGVVMSRNSGFSTQVVELDFLYPSEGIHRRWESGYRITSTAATNDQAAFILSMPKRKPMDETQETLRTSAFPSSHVKEKWAKNLYIASICYGRTVC

SEQ ID NO: 188254 - protein, 503 aa, Zea Mays
MALHMSGRFITLSMVAMAYHRSTTRVVRATTIYFLWDVWNSMGQAMTPNMAACIAVESISILEKLHSKGFVHGDVKPENFLLGQPGSPDDKKLYLIDLGLASKWKENNGHHVDYDQRPDIFRGTIRYASVHAHLGRTGSRRDDLESLAYTLIFLIRGRLPWQGYQGDTKSFLVCKKKMATSPEMLCCFCPAPFKQFLEIVTNMKFDEEPNYAKLISIFDGLIEAPASRPVRIDGALKVGQKRGRLHANLEDEQPKKKVRLGSPAAQWISVYNARRPMKQRYHYNVADSRLSQHIEKGNDDGLYVSCVASSANLWALIMDAGTGFCSQVYELSPVFLHKDWIMEQWEKSYYITAIAGSTNGSSLVVMSKGTPYTQQSYKVSESFPYKWINKKWKEGFHVTSMATAGNRWGVVMSRNSGFSTQVVELDFLYPSEGIHRRWESGYRITSTAATNDQAAFILSMPKRKPMDETQETLRTSAFPSSHVKEKWAKNLYIASICYGRTVC

SEQ ID NO: 188255 - protein, 476 aa, Zea Mays
MDMLGPSLWDVWNSMGQAMTPNMAACIAVESISILEKLHSKGFVHGDVKPENFLLGQPGSPDDKKLYLIDLGLASKWKENNGHHVDYDQRPDIFRGTIRYASVHAHLGRTGSRRDDLESLAYTLIFLIRGRLPWQGYQGDTKSFLVCKKKMATSPEMLCCFCPAPFKQFLEIVTNMKFDEEPNYAKLISIFDGLIEAPASRPVRIDGALKVGQKRGRLHANLEDEQPKKKVRLGSPAAQWISVYNARRPMKQRYHYNVADSRLSQHIEKGNDDGLYVSCVASSANLWALIMDAGTGFCSQVYELSPVFLHKDWIMEQWEKSYYITAIAGSTNGSSLVVMSKGTPYTQQSYKVSESFPYKWINKKWKEGFHVTSMATAGNRWGVVMSRNSGFSTQVVELDFLYPSEGIHRRWESGYRITSTAATNDQAAFILSMPKRKPMDETQETLRTSAFPSSHVKEKWAKNLYIASICYGRTVC

SEQ ID NO: 188256 - protein, 341 aa, Zea Mays
MATVVSSKYSAAFSILLGSLSVAFSDVVVDSMVVERARGESQSTSGSLQSLCWGSSAFGGIVSAYFSGSLVDTYGVRFVFGVTAFLPLMTSAVAVLVNEHGIPSGEHNTFLSGSGFVESSKQHVRQLWASVKQPNILLPTLFIFLWQATPQSDSAMFFFITNKLGFTPEFLGRVKLVTSFASLLGVGLYNYFLKEVALRKIFLVTTIIGSALGMTQVLLVTGLNRQLGISDEWFSIGDSLIITVLGQASFMPVLVLAAKLCPPGMEATLFATLMSISNAGSVTGGLVGAGLTRIFGVTRDTFGNLPLLIVVCNLSSLLPLPLLGLLPEGSGDTDNGETKNN

SEQ ID NO: 188257 - protein, 1107 aa, Zea Mays
MGSDREGRGSEAVAASKPRKRQLVMESSDSEADEFCISTRQNASGAASLGNAGVSSQGSGDRSEEKPVTSSPEKLPGVKSSDVDGSDKKTGVQLESSSSQPAVKRIRVETVHGDGNGCSGGASKCGTGGKMLPRGLPAWRFERPEVRGGRVLDDKGGVSMKASSASKMKEQVSSLGDKRQAELQKHERRTPLKTDQGKAIDSGQQEVLRLQGKRGVLRILPKNDKVTRDTGDGKILSRQTEVDEETGNGRIPTKRGVLKLLPKNNGAVMESNECKLLSKKVKVDEETGDDKMPMKKTKVVDKETSDGKILAITTNLDAEFGGHKLPMKNCTVDMETVAGKFQQKNSKADGETKGRYKGYEEKSGAPAEFQKHDANGEKRVLGKLLSPVALRKSDPSVVGVSLGQRMKQQNSKQQLKNYSLSLKDDSTKSSEQKNLKKRLLEHKGSSESLSKKAQLKAVDQQATSGPVLNKLEKKPRGGPLNKHKQDLRNKIKHVLLDNGWKIDLRQRKNKDYEDSVYVSPTGTGYWSITKAYAVFQEQFQNMGRSSKLNNTKPGASDAISKDDLALLKKNIVKRRTNKEICGAEKKPGVSRNRSSKDILANRDFRNKHQNKEDRVKIKDRRCGLLVRGSTHDTEDNMDGYIPYEWKRTLCSWMIDLGVISEDMHVKYMNSNRTREMLAGKITREGIFCGCCSKILTIAKFELHAGSKEKKPYANIFLEGGKVSLLQCLLDAWEKHTQSENKGFYKIDKGDDEHDDTCAICGDGGDLVCCDHCASTFHLDCLGIKLPSGDWYCRSCLCRFCGFPQEKPSSSPELLLSCLQCSRKYHQTCSSGTGTDSGCTMPGTSIDCFCSPGCRKIYKRLNKLLGIKNHMEAGFSWSLVHCFANDQAMPNKNKEKLAQCNSKTALAFTVLDECFQPHIDDRSGINMIHNVAYNCGSDFSRLDFSGFYAFILERGDEVIAAASVRIHGTDLAEMPFIGTRGMYRHQGMCRRLLNGIESALGSLSVQKLVVSAVTEMENTWTTGFGFKPVAPSKKQRMKSLNLLIMNGTGLLEKRLLPTQTVDGQITTKTGLNTKLFQQKFSLFRYCDALMLLDLIRWMLKCLVKQVDL

SEQ ID NO: 188258 - protein, 80 aa, Zea Mays
MPRAGMTGGLRGSTTDMIIPIRFAAYSTAFCTSSCLRWAPNGRTIARRHARIHGMPGAAAPWIEMGETTPAVGCRTCGRD

SEQ ID NO: 188259 - protein, 91 aa, Zea Mays
MRNVNYRAHFVQETEQTISTVHLNLTRDPVERKEKNGDKFRAGNKDRGPRIHGHNLCVSVSCHGSWTTHKKKEAYFGTREFILFPVCCKGT

SEQ ID NO: 188260 - protein, 64 aa, Zea Mays
MNFSRASLIDPIDLRRVVARNSKMCGTKRSAQLATEERRAEKGGAGGGGGKANDQEHTVVVRQD

SEQ ID NO: 188261 - protein, 82 aa, Zea Mays
MDPCRGRSSSRRGSIAAGAGHGHFDADDDAAALVPPPYRLFPEPEETAARDIQLRQFFSVDRRQPPQLECVAGGTFIPIRQK

SEQ ID NO: 188262 - protein, 76 aa, Zea Mays
MDPCRGRSSSRRGSIAAGAGHGHFDADDDAAALVPPPYRLFPEPEETAARDIQLRQFFSVDRRQPPQLESNMELLH

SEQ ID NO: 188263 - protein, 590 aa, Zea Mays
MGDCLLSCLLGTNNGSWRLYFSSYIEASWRQQLPAFYPGGGVTVADPSSQLATMGAQDATALSVQQGRARTAAENLVHVPAAQVSLPGALALGNFEQELGEDALLPPVLSQEQQDAVKRYNHLMGVHVAYFRVCIDPTVASSRRLLQQAIQDLKNHCAGDALVAHYYVNNRNNNDPADQPDTTTAIRQQAIARSADASSRQHHGACRGFNDHHGGGVVPSVHREEEEALAAPVVAMSMSPALRLVDIKGKVAAFCADRNGSRFVQQALEAAAPEEIAMVYKEIMPCVRTLAVDMFGNHAIQKILEHGPRSCKRGVISNLIGHLLPLSLDKYSCRVVQKSFDVGEHDQKVAMAKELGSKVLRCVRDQFANHVVQKCVECLPSKDIHSILRSFYGRAKALSTHPFGCHVIQKVLARCKDHEIYHALTAEIMENVNKLAADRFGNYVVQQLVEHGGGAMRSAMVRRFAGRVVGMSYHKFASNVVEKCLAFGSQEDRRLIADEIVAGGGGGQQQHLDHLVDMMINPYANFVIQKMVVTAEERQVRLLLEVASSNAASLARYAHGRHVIDAMERFLGGAKAVVHADPAALPCRRR

SEQ ID NO: 188264 - protein, 286 aa, Zea Mays
MNKPIHEETVLSTRKQIEFRNPLAFAPKVIRMSDAGLETGEDPNNTPASARHKRGCNCKKSSCLKKYCECYQGGVGCSSNCRCESCKNAFGRRDAETELPEEMKQEESDQTENPQQEKENDQQKANVQGEDHPLLDLVPITPPFDFCSSLLKLPNFSSAKPPRPTKARSVTSRSSASKATAAVQPCRSSKLAASASASGIDEETPDILHEPDSLSNCVKTTTSPNGKRVSPPHNALGSSPNRKGGRKLILKSIPLFPSLTGDTNSGSAMNSTDSAFCASPLTLGPS

SEQ ID NO: 188265 - protein, 404 aa, Zea Mays
MACQDPPPTASALLPSSASEKDARGELLCAGENFAHSGGELLEFPLDGCSAGGGFPVNDHHVSGQSVSPQKKRRKTDNGDDGEACKRCSCKKSKCLKLYCECFAAGVYCSEPCSCQGCMNKPIHEETVLSTRKQIEFRNPLAFAPKVIRMSDAGLETGEDPNNTPASARHKRGCNCKKSSCLKKYCECYQGGVGCSSNCRCESCKNAFGRRDAETELPEEMKQEESDQTENPQQEKENDQQKANVQGEDHPLLDLVPITPPFDFCSSLLKLPNFSSAKPPRPTKARSVTSRSSASKATAAVQPCRSSKLAASASASGIDEETPDILHEPDSLSNCVKTTTSPNGKRVSPPHNALGSSPNRKGGRKLILKSIPLFPSLTGDTNSGSAMNSTDSAFCASPLTLGPS

SEQ ID NO: 188266 - protein, 184 aa, Zea Mays
MKQEESDQTENPQQEKENDQQKANVQGEDHPLLDLVPITPPFDFCSSLLKLPNFSSAKPPRPTKARSVTSRSSASKATAAVQPCRSSKLAASASASGIDEETPDILHEPDSLSNCVKTTTSPNGKRVSPPHNALGSSPNRKGGRKLILKSIPLFPSLTGDTNSGSAMNSTDSAFCASPLTLGPS

SEQ ID NO: 188267 - protein, 878 aa, Zea Mays
MHAFCSTQYFEPFVIPLLLDKLSSSLPLAKIDSLKYLDKCIRFYGADRMVRHASAVWYKLKEVIFNLSSDQLLISEALNCLKTAIMYTDSSDKDLFINLILLDEDIVNKIHSVSSVEKTILSSLEDLAQLHALGSVISILAESSTYFCTRVLQEHFAHLVDIVGTKADYESWQLNNCNGSSSAPVNYGALYLSVQLLSSCREVALVSYEDFSSVKLAKGSWWLILQKKLEQLIHLLRSIFAIASQSMQPNFRQEYVSCAVKGLLTLATFPEQCSPLPANAYEDILLMFTSIIINKFENLDLWRLSLKALASIGSSIAKFHASEREVVYYRTVVDKIVSLAESYDTSMPLGLRLEASYEVGTAGLNYMLRVAKSLEVAVVTNISESEANGRMECADHVAHLFECYSNRVLPWLLASGGVNELALSFALHLLDETEDLTVLDRISSQGLLDSLMTGMKLLVGVCTEEQQSLIVQKAHSTISSMLSLPMELMTDRLLPVDELVPLHSVSETALISMFSSIIIGLRPQTPVPDMMVMIKLFTVFLLNGKMPAAYALASIFNKYLHNPEFSHENQMDKILDDILERCFSTVLANSCSKTSQSCAGTSDVNFSDVSSRNKLSKINILSSLAWIGKGLLMRGDEKVKDISMFLLKILFSDEILSTVPSHQEEPYGGDSSDTSLAISAASAFHVMMSDSEMCLNKKFHARIKPLYKQRFFSIMMPIFLSKIKETTVVTTKLALYRAFGHIISNAPVPAVITEAHQILLVMVDSLAKLSMDVGDKDLVYSLLLVFSGMLMDEKGKECILDNIQITISVLTELVSYPHMMVVRETALQCLVAFSTFPHSKIYPVRRKVVQAAVRALDDKKRAVRRVAVRCRHTWQSFT

SEQ ID NO: 188268 - protein, 664 aa, Zea Mays
MYTDSSDKDLFINLILLDEDIVNKIHSVSSVEKTILSSLEDLAQLHALGSVISILAESSTYFCTRVLQEHFAHLVDIVGTKADYESWQLNNCNGSSSAPVNYGALYLSVQLLSSCREVALVSYEDFSSVKLAKGSWWLILQKKLEQLIHLLRSIFAIASQSMQPNFRQEYVSCAVKGLLTLATFPEQCSPLPANAYEDILLMFTSIIINKFENLDLWRLSLKALASIGSSIAKFHASEREVVYYRTVVDKIVSLAESYDTSMPLGLRLEASYEVGTAGLNYMLRVAKSLEVAVVTNISESEANGRMECADHVAHLFECYSNRVLPWLLASGGVNELALSFALHLLDETEDLTVLDRISSQGLLDSLMTGMKLLVGVCTEEQQSLIVQKAHSTISSMLSLPMELMTDRLLPVDELVPLHSVSETALISMFSSIIIGLRPQTPVPDMMVMIKLFTVFLLNGKMPAAYALASIFNKYLHNPEFSHENQMDKILDDILERCFSTVLANSCSKTSQSCAGTSDVNFSDVSSRNKLSKINILSSLAWIGKGLLMRGDEKVKDISMFLLKILFSDEILSTVPSHQEEPYGGDSSDTSLAISAASAFHVMMSDSEMCLNKKFHARIKPLYKQRFFSIMMPIFLSKIKETTVVTTNHTILTSYSAPVHHCCSP

SEQ ID NO: 188269 - protein, 937 aa, Zea Mays
MLSFHVVEVVMKLFPDPSGLAAQFAGDVFEILSKYFPVYFTHGVGNGLDTTREDLSRALMHAFCSTQYFEPFVIPLLLDKLSSSLPLAKIDSLKYLDKCIRFYGADRMVRHASAVWYKLKEVIFNLSSDQLLISEALNCLKTAIMYTDSSDKDLFINLILLDEDIVNKIHSVSSVEKTILSSLEDLAQLHALGSVISILAESSTYFCTRVLQEHFAHLVDIVGTKADYESWQLNNCNGSSSAPVNYGALYLSVQLLSSCREVALVSYEDFSSVKLAKGSWWLILQKKLEQLIHLLRSIFAIASQSMQPNFRQEYVSCAVKGLLTLATFPEQCSPLPANAYEDILLMFTSIIINKFENLDLWRLSLKALASIGSSIAKFHASEREVVYYRTVVDKIVSLAESYDTSMPLGLRLEASYEVGTAGLNYMLRVAKSLEVAVVTNISESEANGRMECADHVAHLFECYSNRVLPWLLASGGVNELALSFALHLLDETEDLTVLDRISSQGLLDSLMTGMKLLVGVCTEEQQSLIVQKAHSTISSMLSLPMELMTDRLLPVDELVPLHSVSETALISMFSSIIIGLRPQTPVPDMMVMIKLFTVFLLNGKMPAAYALASIFNKYLHNPEFSHENQMDKILDDILERCFSTVLANSCSKTSQSCAGTSDVNFSDVSSRNKLSKINILSSLAWIGKGLLMRGDEKVKDISMFLLKILFSDEILSTVPSHQEEPYGGDSSDTSLAISAASAFHVMMSDSEMCLNKKFHARIKPLYKQRFFSIMMPIFLSKIKETTVVTTKLALYRAFGHIISNAPVPAVITEAHQILLVMVDSLAKLSMDVGDKDLVYSLLLVFSGMLMDEKGKECILDNIQITISVLTELVSYPHMMVVRETALQCLVAFSTFPHSKIYPVRRKVVQAAVRALDDKKRAVRRVAVRCRHTWQSFT

SEQ ID NO: 188270 - protein, 959 aa, Zea Mays
MDGEQLYGICEAIDEEKDPECLMLSFHVVEVVMKLFPDPSGLAAQFAGDVFEILSKYFPVYFTHGVGNGLDTTREDLSRALMHAFCSTQYFEPFVIPLLLDKLSSSLPLAKIDSLKYLDKCIRFYGADRMVRHASAVWYKLKEVIFNLSSDQLLISEALNCLKTAIMYTDSSDKDLFINLILLDEDIVNKIHSVSSVEKTILSSLEDLAQLHALGSVISILAESSTYFCTRVLQEHFAHLVDIVGTKADYESWQLNNCNGSSSAPVNYGALYLSVQLLSSCREVALVSYEDFSSVKLAKGSWWLILQKKLEQLIHLLRSIFAIASQSMQPNFRQEYVSCAVKGLLTLATFPEQCSPLPANAYEDILLMFTSIIINKFENLDLWRLSLKALASIGSSIAKFHASEREVVYYRTVVDKIVSLAESYDTSMPLGLRLEASYEVGTAGLNYMLRVAKSLEVAVVTNISESEANGRMECADHVAHLFECYSNRVLPWLLASGGVNELALSFALHLLDETEDLTVLDRISSQGLLDSLMTGMKLLVGVCTEEQQSLIVQKAHSTISSMLSLPMELMTDRLLPVDELVPLHSVSETALISMFSSIIIGLRPQTPVPDMMVMIKLFTVFLLNGKMPAAYALASIFNKYLHNPEFSHENQMDKILDDILERCFSTVLANSCSKTSQSCAGTSDVNFSDVSSRNKLSKINILSSLAWIGKGLLMRGDEKVKDISMFLLKILFSDEILSTVPSHQEEPYGGDSSDTSLAISAASAFHVMMSDSEMCLNKKFHARIKPLYKQRFFSIMMPIFLSKIKETTVVTTKLALYRAFGHIISNAPVPAVITEAHQILLVMVDSLAKLSMDVGDKDLVYSLLLVFSGMLMDEKGKECILDNIQITISVLTELVSYPHMMVVRETALQCLVAFSTFPHSKIYPVRRKVVQAAVRALDDKKRAVRRVAVRCRHTWQSFT

SEQ ID NO: 188271 - protein, 816 aa, Zea Mays
MRSSFLSESPCDEQRIHGYGFNPQSWLQVERGKLPKSSYSPSSIESLIKIAEPHVVPLYKPLDYVEVLSRIHEELEQCRPSELPGLYLVQSQVFRGLGEAKLRQRSLHSAWRCASSVHEKVIFGAWLRYEKQGEEIISDVLASCQKCCREFGLLDVASEMPVRNFEVIGSWETGSSSQVSSMVTFQVQDGRVTCDRCKIASLSIPFCSMLNGPFNESQLELVDLSENGISLEGMRAVSEFSSTCSLGDLPVEILLEILVFANTFCCDRLKDACDRKLASFVSTRQDAVELMPLAFEENAPVLAASCLQIFLQELPDCLADDLVISLFLGATAQQQLIMVGHASFLLYCLLSEVAMNIDPRTETTVLLLEKLVQLAVTPTQKQIAFHQLACIRLLRKEYSEAEHQFEVAFSAGHVYSIAGIARVAGIQGQKALAYEKLSSVITSNLPLGWMYLERSLYSEGDRKLADLDKASELDPTLTYPYMYRAASLMRKKDAKHALEEINRLLGFKLALECLELRICLYLALEDYKSAICDIHAILTLSPDYRMLEGRVAASKIGTLLGAHVEQWNTAECWLQLYERWSSVDDIGSLSVIYRMLESDAAKGVLYFRQSLLLLRLNCPEAAMRSLQLARHHAATEHERLVYEGWLLYDTGHYGEALQKAEESISIQRSFEAFFLKAYVLADSGVDPSYSATVISLLEDALKCPSDRLRKGQALNNLGGVYVDCGKLDSAADCYTSALKIRHTRAHQGLARVHFLRNNREAAYEEMTKLIEKAKNNASAYEKRSEYCEREQTMTDLQTVTQLDPLRVYPYRYRAAG

SEQ ID NO: 188272 - protein, 88 aa, Zea Mays
MENSNFDLYNAILQFIATSFCYVITNLSYQSYLMKLIWQEKVEFLRGQNWSVTLTRSRASPSSSQPPGPRRVKGATILGLSSTFGLIR

SEQ ID NO: 188273 - protein, 397 aa, Zea Mays
MNTSSSSDHRRKRRKGSKKDKRKLTKRKGKHTRSKRKSRGSKRRPRRSYGSSSDDSVSSKTDNSSSDSENGGHYTKRSLPKDKESTKMTNSEQGRTFPDVDKVKQTVTTINRSQSHDGSKPSNKDDNGADDRSGNYSSKDRNDPGASSRISPIQTDVNLTKPVNVYGNIGGDNADAGMSITGTERHLPSNEPVSTNGKDLAVGSADNGQPQRIRKGRGFTQKYGFARRYRTPSPERPPVRPRYDGGREDRWNNFNRYGRTGPYSRRSPVRRYHGSPRANSPSRYQRRGRSRSRSPATRHDRGGYRRPSPRRSRSPADPRRDANDRPRSGHGGGGPDHRGHIPPANNRSRSKSRDPLRSRSPDAAPAKRESSRYNRRRSSSSRSSSPDADGNKGLVSY

SEQ ID NO: 188274 - protein, 646 aa, Zea Mays
MPKVKNPHVFMDISIGGGSAERITFELFANVVPKTAENFRALCERGLGASTQKPLYYKGTYIHRIVKGFVAQGGDFSSGDGKGGESIYGGKFPDENFKLLHNQPGVLSMANSGPGTNGSQFFITFKALPHLDGKHVVFGKVVSGIALLKNLEAAGSETGNPSCQVKIVDCGEVSNTNSQDLLKGEKEKKLRTADGNSNAEGRAKLKKASGDYKQRKKRKHYSSDSYSSDTSDSSSYSSDSGSDSESQSSMNTSSSSDHRRKRRKGSKKDKRKLTKRKGKHTRSKRKSRGSKRRPRRSYGSSSDDSVSSKTDNSSSDSENGGHYTKRSLPKDKESTKMTNSEQGRTFPDVDKVKQTVTTINRSQSHDGSKPSNKDDNGADDRSGNYSSKDRNDPGASSRISPIQTDVNLTKPVNVYGNIGGDNADAGMSITGTERHLPSNEPVSTNGKDLAVGSADNGQPQRIRKGRGFTQKYGFARRYRTPSPERPPVRPRYDGGREDRWNNFNRYGRTGPYSRRSPVRRYHGSPRANSPSRYQRRGRSRSRSPATRHDRGGYRRPSPRRSRSPADPRRDANDRPRSGHGGGGPDHRGHIPPANNRSRSKSRDPLRSRSPDAAPAKRESSRYNRRRSSSSRSSSPDADGNKGLVSY

SEQ ID NO: 188275 - protein, 248 aa, Zea Mays
MGRKDTSSSSAAAGGGKKEKPMSVSAMLASMDAPAAKPKSSKSAAPSKAKAKPSKAPASSYMGDIDLPPSDDEDQEEAQLAAAKPKPARAAVDLSAGAAPSHKDAKKKDKREAVAAAAAEAARQEALRDDRDAFSVVIGARVPGSSAADGTVDDNVRDVVLENFSVSARGKELLKSASLRISHGRRSPCRGTSMSCSSSRRSSAMTARPSRPWSPPTRSSPPSRPSRRGLRPLMMLMTTSGLWRCMRS

SEQ ID NO: 188276 - protein, 58 aa, Zea Mays
MVHVLERGISCCLIQTIHKLQMPCRSHQLAGGVSRVVRIDYLIMFVFALILIIGEDII

SEQ ID NO: 188277 - protein, 352 aa, Zea Mays
MARFEVIEKIGPDVKCRCTDPGLLLPRANLTFWRDGSIVRERNAMLPTISSKDWLDIDFGIAEGVDFIAVSFVKSAEVIRHLKSYIAARSRGSDMAVIAKIESIDSLKNLEEIIRASDGAMVARGDMGAQVPLEQVPSIQQKIVQLCRQLNKPVIVASQLLESMIEYPTPTRAEVADVSEAVRQRADALMLSGESAMGRYPDKALSVLRSVSLRIEKWWREEKRHEALELRSVSSSFSDKISEEICNSAAKMANGLGVDAVFVFTKTGHMASLLSRCRPDCPVFAFTTSTSVRRRLNLQWGLIPFRLAFSDDMESNLNRTFSLLKARGMIQSGDLVIALSDMLQSIQVMNVP

SEQ ID NO: 188278 - protein, 50 aa, Zea Mays
MFSSFLSSLRIYFSLLLRALMRTVMKNTIKTHHLSGLIGSIRAMLPTLQF

SEQ ID NO: 188279 - protein, 79 aa, Zea Mays
MKHLDYDYLHCLWVQVLWIALAGDDAEVQQDAAARLNEAEARCPLGSRRVGEILIYDPCRPRHGCKNDFGSCPLELVLS

SEQ ID NO: 188280 - protein, 407 aa, Zea Mays
MGCAPVVWAAVWLLAAAVAGFADPGGLERAFPIVKPDYGHTKLQLAKEGLEAIQRIRTPIAAVSVIGPYRSGKSFLLNQLLSLSCDNGFGVGHMRDTKTKGIWVWGSPVEVDIGGSKVSVLYLDTEGFESVGKSNVYDDRIFALATVLSSVLIYNLPETIREADISRLSFAVEIAEEFYGRVKGQDVAFEPAKLLWLIQRDFLQGKSVQQMVDEALQRVPNNNGDTNIDELNQIRDSLAVMGDNSTAFSLPQPHLQRTKLCDMEDQELDPLYVKKRDQLKEVVASMIKPKIVQGRTLNGTEFVSFLGQIVDALNKGEIPSAGSLVEIFNKAILERCLKVYSEIMGRAGLPVSVDELREFHDLAKDEARRLFNKQHFETWAKLTSISHQSCAKHGSQSAKIKWNDSKS

SEQ ID NO: 188281 - protein, 399 aa, Zea Mays
MGCAPVVWAAVWLLAAAVAGFADPGGLERAFPIVKPDYGHTKLQLAKEGLEAIQRIRTPIAAVSVIGPYRSGKSFLLNQLLSLSCDNGFGVGHMRDTKTKGIWVWGSPVEVDIGGSKVSVLYLDTEGFESVGKSNVYDDRIFALATVLSSVLIYNLPETIREADISRLSFAVEIAEEFYGRVKGQDVAFEPAKLLWLIQRDFLQGKSVQQMVDEALQRVPNNNGDTNIDELNQIRDSLAVMGDNSTAFSLPQPHLQRTKLCDMEDQELDPLYVKKRDQLKEVVASMIKPKIVQGRTLNGTEFVSFLGQIVDALNKGEIPSAGSLVEIFNKAILERCLKVYSEIMGRAGLPVSVDELREFHDLAKDEARRLFNKQHFGKHHAARSILKLDEEIKKKLGPS

SEQ ID NO: 188282 - protein, 393 aa, Zea Mays
MVDEALQRVPNNNGDTNIDELNQIRDSLAVMGDNSTAFSLPQPHLQRTKLCDMEDQELDPLYVKKRDQLKEVVASMIKPKIVQGRTLNGTEFVSFLGQIVDALNKGEIPSAGSLVEIFNKAILERCLKVYSEIMGRAGLPVSVDELREFHDLAKDEARRLFNKQHFGKHHAARSILKLDEEIKKVYRNLGQANEYQSSKLCEARFSECEDKMERLQVLKLPSMAKFDAGFLLCNRSFETDCVGPAKESYRHRMSKMLARSRALFIKEYNNKLFNWLAIFSLAMVVVGRFLVKFFLLEVAAWVMFAFLETYTRLFWSSESLYYNPAWHAIVSSWETVVYSPVLDLDRWAFPICAVLLFLAFYWRCLGGRRGIARSLLPLYNGAYYRSSSRTRTD

SEQ ID NO: 188283 - protein, 490 aa, Zea Mays
MRDTKTKGIWVWGSPVEVDIGGSKVSVLYLDTEGFESVGKSNVYDDRIFALATVLSSVLIYNLPETIREADISRLSFAVEIAEEFYGRVKGQDVAFEPAKLLWLIQRDFLQGKSVQQMVDEALQRVPNNNGDTNIDELNQIRDSLAVMGDNSTAFSLPQPHLQRTKLCDMEDQELDPLYVKKRDQLKEVVASMIKPKIVQGRTLNGTEFVSFLGQIVDALNKGEIPSAGSLVEIFNKAILERCLKVYSEIMGRAGLPVSVDELREFHDLAKDEARRLFNKQHFGKHHAARSILKLDEEIKKVYRNLGQANEYQSSKLCEARFSECEDKMERLQVLKLPSMAKFDAGFLLCNRSFETDCVGPAKESYRHRMSKMLARSRALFIKEYNNKLFNWLAIFSLAMVVVGRFLVKFFLLEVAAWVMFAFLETYTRLFWSSESLYYNPAWHAIVSSWETVVYSPVLDLDRSGVLPPFPTLRCPCMASLYLLSAAILL

SEQ ID NO: 188284 - protein, 553 aa, Zea Mays
MGCAPVVWAAVWLLAAAVAGFADPGGLERAFPIVKPDYGHTKLQLAKEGLEAIQRIRTPIAAVSVIGPYRSGKSFLLNQLLSLSCDNGFGVGHMRDTKTKGIWVWGSPVEVDIGGSKVSVLYLDTEGFESVGKSNVYDDRIFALATVLSSVLIYNLPETIREADISRLSFAVEIAEEFYGRVKGQDVAFEPAKLLWLIQRDFLQGKSVQQMVDEALQRVPNNNGDTNIDELNQIRDSLAVMGDNSTAFSLPQPHLQRTKLCDMEDQELDPLYVKKRDQLKEVVASMIKPKIVQGRTLNGTEFVSFLGQVYSEIMGRAGLPVSVDELREFHDLAKDEARRLFNKQHFGKHHAARSILKLDEEIKKVYRNLGQANEYQSSKLCEARFSECEDKMERLQVLKLPSMAKFDAGFLLCNRSFETDCVGPAKESYRHRMSKMLARSRALFIKEYNNKLFNWLAIFSLAMVVVGRFLVKFFLLEVAAWVMFAFLETYTRLFWSSESLYYNPAWHAIVSSWETVVYSPVLDLDRSGVLPPFPTLRCPCMASLYLLSAAILL

SEQ ID NO: 188285 - protein, 232 aa, Zea Mays
MNFGSSTTWQKMKLEGFSTSSISVYRNLGQANEYQSSKLCEARFSECEDKMERLQVLKLPSMAKFDAGFLLCNRSFETDCVGPAKESYRHRMSKMLARSRALFIKEYNNKLFNWLAIFSLAMVVVGRFLVKFFLLEVAAWVMFAFLETYTRLFWSSESLYYNPAWHAIVSSWETVVYSPVLDLDRWAFPICAVLLFLAFYWRCLGGRRGIARSLLPLYNGAYYRSSSRTRTD

SEQ ID NO: 188286 - protein, 182 aa, Zea Mays
MVKGVIPDLSCPVALFTYYNPILKRGVPNFMSIVKEAGVHGLVVPDVPLEETDVLRSEAAKNNLELVLLTTPTTPNERMEKIAQASEGFIYLVSTVGVTGTRANVSGKVQSLLQDIKKVTEKPVAVGFGVSTPEHVRQIAGWGADGVIIGSAVMKTLEEAASPEEGLKKLEEFAKNLKAALP

SEQ ID NO: 188287 - protein, 62 aa, Zea Mays
MFQFSLELLFKKSCPLSSNCPFVFQLLLEPLFKDSCPLKCSCSFIFQLPKMWSSNKHRQSHI

SEQ ID NO: 188288 - protein, 1540 aa, Zea Mays
MVKTPRSPVTTGTRRCRAKPQKKEEESTENNKLENGPLDATEEVHHGVEKGDGHVTRKRPRRAAACSDFKEKSIRLSEKKSVVMVKKNRMEEEEVDAVNLTKLGPEDPPPCRKLIDFILHDAEGNPQPFEMSEIDDFFITALIMPMDDDLEKEREKGVRCEGFGRIEDWNISGYDEGTPVIWVSTDVADYECVKPSTNYKSYFDHFYEKAQVCVEVFKKLAKSVGGNPNQGLDELLASVVRSTNAMKGYSGTMSKDLVISIGEFVYNQLVGLDETSNNDDEKFATLPVLLSLRDQCRSRVELTKLPSNFSNTSLKIKDSECDETAEDDDDAKLARLLQQEEEWKMMKKQRGRRGTPSQKNVYIKISEAEIANDYPLPAYYKPFSQEMDEYIFDSDDSIFSDDVPVRILNNWTLYNADSRLISLELIPMKSGAENDVVVFGSGFMRDDDGSCCSTAESVKSSSSSSKADQLDAGIPIYLSPIKEWIIEFGGSMICITIRTDVAWYKLRQPTKQYAPWCEPVLKTARLAVSIITLLKEQSRASKLSFADVIRKVAEFDKGNPAFISSNITLVERYIVVHGQIILQQFADFPDETIRRSAFVSGLLLKMEQRRHTKLVMKKKTQVMRGENLNPSAAMGPASRKKAMRATTTRLINRIWSDYYAHHFPEDSKEGDGNEIKEIDDEQEENEDEDAEDEGQIEENISKTPPSTRSRKLLSQTCKEIRWEGETSGKTLSGETLYKCAYVRELRIPVGGTVALEDDSGDTVMCFVEYMFQKVDGSKMVHGRILQKGSQTILDNAANEREVFLTNDCLEFKLDDIKELVMVDIQSRPWGHKYRKENSEADKVEQVKAEERKKKGQPMVYFCKSLYWPEKGAFFALSRDKMGLGSGLCSSCDNIEPDSDELKIFSKTSFVYRKVTYNVNEFLYISPDFFAEDEDRATFKAGRNVGLKPYAVCQILSIPEGAGSKKLNPASANISARRFYRPDDISSAKAYASDIREVYYSEDVIDVPVDMIEGKCEVRKKNDLASSDLPVMFEHVFFCELIYDRASGALKQLPPNVRFMSMVQRTSALKKNKGKQICEPDQIDSGKWLDVPKENRLATLDIFAGCGGLSEGLQQAGVSFTKWAIEYEEPAGEAFNKNHPEAVVFVDNCNVILKAIMDKCGDTDDCVSTSEAAEQAAKLPEVNINNLPVPGEVEFINGGPPCQGFSGMNRFNQSPWSKVQCEMILAFLSFAEYFRPRFFLLENVRNFVSFNKGQTFRLAVASLLEMGYQVRFGILEAGAFGVAQSRKRAFIWAAAPGEMLPDWPEPMHVFASPELKITLPDGQYYAAARSTAGGAPFRAITVRDTVGDLPKVGNGASKLTLEYGGEPVSWFQKKIRGNMMVLNDHISKEMNELNLIRCQHIPKRPGCDWHDLPDEKVKLSNGQMADLIPWCLPNTAKRHNQWKGLYGRLDWEGNFPTSVTDPQPMGKVGMCFHPDQDRIITVRECARSQGFPDSYEFAGNIQNKHRQIGNAVPPPLAYALGRKLKEAVDKRQEASAGVPAP

SEQ ID NO: 188289 - protein, 107 aa, Zea Mays
MQPAVLQPALPQLTVLLCMLKTWVMKKDAPVGEKPEPVKTHLRNMIIVPEMIGSIVGVYNGKTFNQVEIKPEMIGHYLAEFSISYKPVKHGRPGIGATHSSRFIPLK

SEQ ID NO: 188290 - protein, 97 aa, Zea Mays
MCANGLVFTMNNIFSLLIFASADNVLAASNCSTSKVQICLQTTPKRFVMTTWFVMTAARVAKLTDDVSLACNLFLCKIIIPMLKLLPKQHLNGLRKR

SEQ ID NO: 188291 - protein, 131 aa, Zea Mays
MATALLRDSYRTRATSRLILPGGMAGTTRFSARGPQRLCTGPSTSTGAWRWRGTRCSCTTSCAARRSWSASTARSTCSSPSATAPSCGSTRPGPTPPRPASPSTSSPSSSPPAEQCAGDGGSTVTERSDQP

SEQ ID NO: 188292 - protein, 330 aa, Zea Mays
MGKIDMSTDEESDCVAICPPNRNAGHEEVEDVSVNLDLLKLIHQQESSVSNSPTKPAVARQQGSGHTVLEPCAVAPERRSSGAGNIARIPHPTSSGEKLSDKSSSSPRSMAKKSPSFTPRKPLQSDNTSHSQDDDSYSVTSSTVTSARAGKTKKTTVAVAPTFVCANRAEKRGEFYTKLEEKRKALEEEKLQAEARKREEEEEALRQLRKNLVVRAKPMPSFYQEGPPPKVELKKVPPTRAKSPKLTRRKSCSETPHTPEGGNGSAVCCRLHRHSIGNARDVSSKAQCSPKSASKAGSATRSRVTKSREDLKASVKKVGLPSAANFAVQT

SEQ ID NO: 188293 - protein, 231 aa, Zea Mays
MGKIDMSTDEESDCVAICPPNRNAGHEEVVSGSHDEDSSGKQENPYAVNSHMDSNGQEDVSVNLDLLKLIHQQESSVSNSPTKPAVARQQGSGHTVLEPCAVAPERRSSGAGNIARIPHPTSSGEKLSDKSSSSPRSMAKKSPSFTPRKPLQSDNTSHSQDDDSYSVTSSTVTSARAGKTKKTTVAVAPTFVCANRAEKRGEFYTKLEEKRKALEEEKLQAEARKRRKKKL

SEQ ID NO: 188294 - protein, 112 aa, Zea Mays
MPSFYQEGPPPKVELKKVPPTRAKSPKLTRRKSCSETPHTPEGGNGSAVCCRLHRHSIGNARDVSSKAQCSPKSASKAGSATRSRVTKSREDLKASVKKVGLPSAANFAVQT

SEQ ID NO: 188295 - protein, 467 aa, Zea Mays
MNAILGKLTASTQELSYYHSEADIGVYLSYCDFQPYVRSALACTKELNKWFSKKFEKGPLQLVVQDDKLRGDPVNSHHFVVELSRINSIFAKSKRQYIEAQVEYAKEEAILSVLRTQLASQQSYIHQDSHSLRRKNSELAEELKDLSHQVQEYLSETVTGLCADLARLSGANILEGDHNLKLLRQDCYISHQKKFINHLVNQLAAHLFLKIACQLEEQIKISSAYSFLKAVELELQGYFSAFDGRLGRYNLIDQAASEMFEEGSVDDSDSYLHAVRDILSSHSSSQATSPEYVSSYGLIGQITELQDELQYLQHETENVLPRERGRCTDELCRMIQTLEQILAVSLSDEQPKLTPWPLAHSLEDLEMVSQQVSASVSEVTLARDEKAEKLKQPSRNAQQERTGKPRKKRSGSILNPVACSIPSRKLLWRCTRRTISLHLQSNLFSRSWVARQSLTMKSSRQRSWTCN

SEQ ID NO: 188296 - protein, 152 aa, Zea Mays
MPTLRRGHEPATYSASRQYRSGRHFVVKLSPFATPCSADLDANYNFSLAPVQDLLSPWEAKKEAFRKYLESSGVLDTLTKALVALYEENDKPSSAVEFVQQKLGGPSISDYEKLKAEKLDLQLKYDKLLETHKETCRQLEELKNMKYGAPWN

SEQ ID NO: 188297 - protein, 107 aa, Zea Mays
MPTLRRGHEPATYSASRQYRSGRHFVVKLSPFATPCSADLDANYNFSLAPVQDLLSPWTGKPRKKRSGSILNPVACSIPSRKLLWRCTRRTISLHLQSTEAGWPVNL

SEQ ID NO: 188298 - protein, 231 aa, Zea Mays
MDCAKRRAVADLHNELMVEIFSRVPVKDLRRCTCVCKSWCNIITDPLNGKKLPQTLEGFFQGVVGGPHSYGQFTSLSGSGERVPPVDPSFSFITAVLPGVERMVLLDSCNGLLLFGCTREDKFGYIVTNPATKELMTVPASSGSCPPPPPFERDMDAGERYAHTFLMINPAVSSHFHLVQIWENRAVKEVETVHSYSSETKAWSDRSSKWGRGEEGGEWELWGGNGTLLLV

SEQ ID NO: 188299 - protein, 221 aa, Zea Mays
MDCAKRRAVADLHNELMVEIFSRVPVKDLRRCTCVCKSWCNIITDPHNGKKLPQTLEGFFQGVVGGPHSYGQFTSLSGSGERVPPVDPSFSFITAVLPGVERMVLLDSCNGLLLFGCTREDKFGYIVTNPATKELMTVPASSGSCPPPPPFERDMDAGERYAHTFLMINPAVSSHFHLVQIWENRAVKEVETVHSYSSETKAWSDRSSKWGRGGNGTLLLV

SEQ ID NO: 188300 - protein, 175 aa, Zea Mays
MCGWTLVDGLLHFLAFDLQKEETVIIAVDGEGETRRIIGWHGKDVRAIVFIGESQDHLHCIGVNVQLDQGSEVRFTRMSIWVLEDYDTQAWILKHNVSSLQFFELLSHPIKDFHIVAIHPYHNSFILIQHWNQKLVSYNMDTQELHGLGTLGKGYAVITPYIPCFLESSVLATKH

SEQ ID NO: 188301 - protein, 221 aa, Zea Mays
MTVEDVETVHSYSSETKAWSDRSSKWRRGEEGSEWGLWGECLIKFRMGRALINDLLHFVGFDSQKQEDVIVAVDGEGKTCRIIDWHGKDVRLIIFIGQSQDRLHCIGVNTKAGQDHIHITRMSIWVLEDYDTKAWILKHSVGSLQFFGLLGRLVHDFNIVAIHPDHNSIIIVQHWNQKLVSYNMDTQELRGLRTLENGCAYVAITPYVPCFLESSVLATKG

SEQ ID NO: 188302 - protein, 89 aa, Zea Mays
MLLSREVLPDFALLSVSFFLFLCCLSFVGRVFGNIHCVGAMGCYSDQELSSQAGSSRARIVTLGFPTPQIDIDIGIKIDIANSPNNIGV

SEQ ID NO: 188303 - protein, 63 aa, Zea Mays
MHTSIERHFDGIQMINICKRSYITHQVPTCYGRGWVSNNPYSQVINIHECVSLLPYVLIIASL

SEQ ID NO: 188304 - protein, 88 aa, Zea Mays
MEYRKRVDALVFFSFLLVGYFAAHAYDEKGHVTDEVAVPAPSEGGVMRATGAHCEVSVPCKDKRCYCCVGGRIDECYLTMPFCNYACF

SEQ ID NO: 188305 - protein, 252 aa, Zea Mays
MPLDLGAKGSCHIGGNISTNAGGLRFIRYGSLHGNVLGLEVVLADGTILDMLTTLRKDNTGYDLKHLFIGSEGSLGVVTKISVLTPAKLSSTNVAFLSCNDYTSCQKLLLAARRSLGEILSAFEFMDHHCIDLAMQHLEGVQNPLPASPYKFYVLVETTGSDESSDKTKLEAFLLRSMEDGLVADGVIAQDISQASNFWRIREGISEASVKVGAVYKYDLSITVEKLYDIVEEMRCRLGNCQIGSVDNLQLN

SEQ ID NO: 188306 - protein, 358 aa, Zea Mays
MPRREAARLLRRLGPIAVQSPKRGMPHNQYESTNHAVNSYRRFHWIPSVQHPLCGPTSSGGIYEGQRSANKACEVQKRTFGSAATQFQRNPAYSVLNSDDIAYFKSILGENGVVQDEDRVAVANVDWMGKYRGASQLVLLPKTTTEVSKILSYCNTKRLAVVPQGGNTGLVGGSVPVFDEVIVGLAGMNKIISFDNVNGILTCEAGCVLENLSTFVENEGFIMPLDLGAKGSCHIGGNISTNAGGLRFIRYGSLHGNVLGLEVVLADGTILDMLTTLRKDNTGYDLKHLFIGSEGSLGVVTKISVLTPAKLSSTNVAFLSCNDYTSCQKLLLAARRSLGEILSAFEFMDHHCIDLVLA

SEQ ID NO: 188307 - protein, 406 aa, Zea Mays
MLSLQVSKILSYCNTKRLAVVPQGGNTGLVGGSVPVFDEVIVGLAGMNKIISFDNVNGILTCEAGCVLENLSTFVENEGFIMPLDLGAKGSCHIGGNISTNAGGLRFIRYGSLHGNVLGLEVVLADGTILDMLTTLRKDNTGYDLKHLFIGSEGSLGVVTKISVLTPAKLSSTNVAFLSCNDYTSCQKLLLAARRSLGEILSAFEFMDHHCIDLAMQHLEGVQNPLPASPYKFYVLVETTGSDESSDKTKLEAFLLRSMEDGLVADGVIAQDISQASNFWRIREGISEASVKVGAVYKYDLSITVEKLYDIVEEMRCRLGDNAEVLGYGHLGDGNLHLNIVSSKYDDNILAQIEPFVYEWTSAQRGSISAEHGLGLMKAEKIHYSKSPEAVSVSILPCQHLEVCCT

SEQ ID NO: 188308 - protein, 361 aa, Zea Mays
MPRREAARLLRRLGPIAVQSPKRGFSGMPHNQYESTNHAVNSYRRFHWIPSVQHPLCGPTSSGGIYEGQRSANKACEVQKRTFGSAATQFQRNPAYSVLNSDDIAYFKSILGENGVVQDEDRVAVANVDWMGKYRGASQLVLLPKTTTEVSKILSYCNTKRLAVVPQGGNTGLVGGSVPVFDEVIVGLAGMNKIISFDNVNGILTCEAGCVLENLSTFVENEGFIMPLDLGAKGSCHIGGNISTNAGGLRFIRYGSLHGNVLGLEVVLADGTILDMLTTLRKDNTGYDLKHLFIGSEGSLGVVTKISVLTPAKLSSTNVAFLSCNDYTSCQKLLLAARRSLGEILSAFEFMDHHCIDLVLA

SEQ ID NO: 188309 - protein, 233 aa, Zea Mays
MSPKLINPSETWISDSEFLVSTSIDGSARIWKIDEGAPLVNLTRSSDEKIECCRFSRDGMKPFLFCTVAKGPKVVTVVWNISDWERIGYKRLLGKPISTLSVSLDGKYLALGSHDGDFCAVDVKKMEVSHWSKKVHLGSPVTSIEFCPSERVVISTSHQWGAELTKLNVPADWKEWQVWLVLLALFLASAVLFYVFFERSDTFWNFPMGRHQPAKPWNVLKESPPVPEDQTPW

SEQ ID NO: 188310 - protein, 131 aa, Zea Mays
MDLSVVPSLSLSPRRALPLPARRAARRPAFVCRCSCSLDASPVATRRLFASLLATAAAVGVGVAGGGGEAGAVSTSRRALRASKIPESEFTTLPNGLKYYDIKVGSGAEAVKGSRVACRYIMWPSGRASHS

SEQ ID NO: 188311 - protein, 128 aa, Zea Mays
MDLSVVPSLSLSPRRALPLPARRAARRPAFVCRCSCSLDASPVATRRLFASLLATAAAVGVGVAGGGGEAGAVSTSRRALRASKIPESEFTTLPNGLKYYDIKVGSGAEAVKGSRVAVSATTICVSGI

SEQ ID NO: 188312 - protein, 211 aa, Zea Mays
MDLSVVPSLSLSPRRALPLPARRAARRPAFVCRCSCSLDASPVATRRLFASLLATAAAVGVGVAGGGGEAGAVSTSRRALRASKIPESEFTTLPNGLKYYDIKVGSGAEAVKGSRVAVHYVAKWKGITFMTSRQGLGVGGGTPYGFDVGNSERGNVLKGLDLGVEGMKVGGQRLIIVPPELAYGKKGVQEIPPNATIEFWFSPSIFLLFPF

SEQ ID NO: 188313 - protein, 426 aa, Zea Mays
MGGSDEVIIQSTPPQVERRRDDVKLERLELGLARARSAIMEAIRKKDKVSPLPDKDYVPMGPVYRNAHVFHRSYLEMERQLKVYVYEEGEPPVFHDGPCRSIYSTEGRFIHSMETETEAEEGRRLRTRDPARAHVFFLPFSVVKMVQTIYEPGSRDMAPLKRTVADYVRVLSSKYPYWNRSLGADHFMLSCHDWGPYVSSANAQLFGNSIRVLCNANTSEGFDPARDVSLPQVNLRSDAVERQVGGPSASRRPVLAFFAGGNHGPVRPALLAHWGPGGRRGGDPDVRVSEYLPRGGGAPSYADMMRRSRFCLCPGGYEVASPRLAEALYLGCVPVVVDDGEYALPFADVLDWDAFALRLRVADIPRLKEILAAVSPRQYIRMQRRVRMVRRHFMLHGGPPRRYDAFHMILHSVWLRRLNVRIAAAE

SEQ ID NO: 188314 - protein, 350 aa, Zea Mays
MERQLKVYVYEEGEPPVFHDGPCRSIYSTEGRFIHSMETETEAEEGRRLRTRDPARAHVFFLPFSVVKMVQTIYEPGSRDMAPLKRTVADYVRVLSSKYPYWNRSLGADHFMLSCHDWGPYVSSANAQLFGNSIRVLCNANTSEGFDPARDVSLPQVNLRSDAVERQVGGPSASRRPVLAFFAGGNHGPVRPALLAHWGPGGRRGGDPDVRVSEYLPRGGGAPSYADMMRRSRFCLCPGGYEVASPRLAEALYLGCVPVVVDDGEYALPFADVLDWDAFALRLRVADIPRLKEILAAVSPRQYIRMQRRVRMVRRHFMLHGGPPRRYDAFHMILHSVWLRRLNVRIAAAE

SEQ ID NO: 188315 - protein, 397 aa, Zea Mays
MLRSALFRSAPGLRRSPATAHLSTAAAAAAAWLSNGPASAPSRVRLLIGGEFVESRADEHVDVTNPEVVSRIPLTTADEFKAAVDAARTAFPGWRNTPVTTRQRVMFKFQELIRANMDKLAENITTEQGKTLKDAWGDVFRGLEVVEHACGMGTLQMGEYVSNVSNGIDTFSIREPLGVCAGICPFNFPAMIPLWMFPIAVTCGNTFVLKPSEKDPGAAMMLAELAMEAGLPKGVLNIVHGTNDVVNNICDDEDIKAVSFVGSNTAGMHIYSRASAAGKRVQCNMGAKNHAIILPDADRDATLNALIAAGFGAAGQRCMALSTAVFVGGSESWEDELVKRASGLVVSSGMVNDADLGPVISRQAKDRICKLVQSGVDLCARILLDGRKIVVPYPVVY

SEQ ID NO: 188316 - protein, 484 aa, Zea Mays
MLRSALFRSAPGLRRSPATAHLSTAAAAAAAWLSNGPASAPSRVRLLIGGEFVESRADEHVDVTNPATQEVVSRIPLTTADEFKAAVDAARTAFPGWRNTPVTTRQRVMFKFQELIRANMDKLAENITTEQGKTLKDAWGDVFRGLEVVEHACGMGTLQMGEYVSNVSNGIDTFSIREPLGVCAGICPFNFPAMIPLWMFPIAVTCGNTFVLKPSEKDPGAAMMLAELAMEAGLPKGVLNIVHGTNDVVNNICDDEDIKAVSFVGSNTAGMHIYSRASAAGKRVQCNMGAKNHAIILPDADRDATLNALIAAGFGAAGQRCMALSTAVFVGGSESWEDELVKRASGLVVSSGMVNDADLGPVISRQEEIFGPVLLLMKAESLEDAIQIINRNKYGNGASIFTTSGVSARKFQTDIEAGQVGINVPIPVPLPFFSFTGSKASFAGDLNFYGKAGVQFFTQIKTITQQWKESPVQRVSLSMPTSQK

SEQ ID NO: 188317 - protein, 178 aa, Zea Mays
MMLAELAMEAGLPKGVLNIVHGTNDVVNNICDDEDIKAVSFVGSNTAGMHIYSRASAAGKRVQCNMGAKNHAIILPDADRDATLNALIAAGFGAAGQRCMALSTAVFVGGSESWEDELVKRASGLVVSSGMVNDADLGPVISRQAKDRICKLVQSGVDLCARILLDGRKIVVPYPVVY

SEQ ID NO: 188318 - protein, 250 aa, Zea Mays
MSPRWPRSRLLLGIIMSSLVPRERQINNGSSADQGRRASCSVVVVPAGAGDDAAVAGPVPRGGGDEPERARRRAAADRPVLRLAARARPEHRPRPAVRRAALELERGVEQRHRLPVRLRVLPHLPVRRGPPAARLEGPRRRLPGARPRRRLRLPRLVQLRLRPLLRGRRHRTPRQLELQWAAAACAELRGGGSAAGLLQVAGAGLLLHQHQWQQCRRRRFVFLRSRRWASGVRAPPAAGRCMSFGSRLSS

SEQ ID NO: 188319 - protein, 238 aa, Zea Mays
MSPLVLLLLAHLLATATAAGAARTRDDGPPAPSSSSPRVPATTPPWPDQFHAVVVTNLSARGGGLQLIDLYYDWPRGRDLNIVRDQLSGERRWSWNVEWSNGTAFLFDSASCRTFQFAVGLLPPDWKARGAAYLGRDRVDGFDCHVWSNFVFARYYEDVATGRPVSWNFNAACAELRGGGSAAGLLQVAGAGLLLHQHQWQQCRRRRFVFLRSRRWASGVRAPPAAGRCMSFGSRLSS

SEQ ID NO: 188320 - protein, 156 aa, Zea Mays
MSPPPSSLVVLPLLLPLLLAAVSHATANAAGAGAPPPVPTPWPEQFHAVVFTNLTESGGRLQLIDLYYDWPRGRNLNLIRDQLSSDPLYDVEWTNGTSYFFDSGSCRTMRFPVGILPPDWLAAGAVYLGREHVDGFDCHLWTKVDFVWDAAACDEL

SEQ ID NO: 188321 - protein, 72 aa, Zea Mays
MQQHVMSFEVGGVLEDSKWQAPPRCFSGGNADTANAAADGVHGEEAGSVDVMDSMIRFAVAPAAAVAASFDQ

SEQ ID NO: 188322 - protein, 80 aa, Zea Mays
MSISMEYPHRLLFFLSQELPYSFSLIRIEIAGRRISSRISPSVLCNRPRTEALPHATSASHSRHLFPTYLAPGNFLHKMR

SEQ ID NO: 188323 - protein, 79 aa, Zea Mays
MELGFVCACAGSPGHMLVRFDVVHVPACGTRRRCQLLLDLTVHRRSRYRPEFTPRAATSRSPHRQVVVALAVIRSIRSG

SEQ ID NO: 188324 - protein, 81 aa, Zea Mays
MPPWRRLLCHLFSVVSLHLIVILVLVSISLRQHRRSRYRPEFTPRAATSRSPHRQVVVALAVIGSIRSGRRKRVKSIPSAG

SEQ ID NO: 188325 - protein, 894 aa, Zea Mays
MELVTAVLGDHGQRPKDDYAVVTAVTELGNGKPKFYSTPEVIAFCRKWRLPTNHVWLFSTRKSASSFFAAYDALCEEGTATPVCKTLDEIADIAVPGSKDHVKVQGEILEGLVARIVPRQSLVQMEEVLKNFPQAPFDAGDSDLGPSLREICAANRSDEKQQIKALLENVGASMCPDHSDWFGTGGLDAQSRNADRSVVTKFLQAHPADYATKKLQEMIRLMKQRHFSAAFKCYWNYHKIDSLSNDNLYYKMVIHVHNDSVFRRYQQEMRNQGLWPLYRGFFVDVNLFKANNKKAAELAKDGNTLLKNINGALDSNGSVVDGLADEDSNLMVKLKFLTYKLRTFLIRNGLSTLFKDGPSAYRTYYLRQMKNWGTSTNKQRELIKLLDEWAVFIRRKYGNKPLSSSTYLSEAEPFLEQYAKRSPANQALIGAAGNLVQTENFLAILDAKRDEEGDLRTDHGAAPSGPVSTSVDVVPKTEGLIVFFPGIPGCAKSALCKEILNTPGGLGDDRPFHSLMGDLIKGRYWQKVADERRKKPARITLADKNAPNEEVWKQIEDMCGSTKAAAVPVVPDSEGTDSNPFSLEALAVFMFRVLQRVNHPGNLDKASPNAGYVLLMFYHLYDGKSRREFENELYERFGSLVKMPLLKPDRAPLPDAVKAILDEGISLFKMHRSRHGRAEPSKGSYAKEWAQWEQRLRATLFGNADHLNSIQVPFDYAVKAVLEQLKAVAKGDLKTPDTGKRKFGNIMFAAVRLTPPDILGLLRKVAEKDTAVDSFVNKIRLEDNLTKVHVTLAHKRGHGVSAVASYGIYQHQEVPVSFNALYYTDKMAALEAQLGAVNDEPINSRNEWPHATLWTAPGVTPKEANMLPQLASEGKAERVPIDPPITISGVVDFY

SEQ ID NO: 188326 - protein, 905 aa, Zea Mays
MELVTAVLGDHGQRPKDDYAVVTAVTELGNGKPKFYSTPEVIAFCRKWRLPTNHVWLFSTRKSASSFFAAYDALCEEGTATPVCKTLDEIADIAVPGSKDHVKVQGEILEGLVARIVPRQSLVQMEEVLKNFPQAPFDAGDSDLGPSLREICAANRSDEKQQIKALLENVGASMCPDHSDWFGTGGLDAQSRNADRSVVTKFLQAHPADYATKKLQEMIRLMKQRHFSAAFKCYWNYHKIDSLSNDNLYYKMVIHVHNDSVFRRYQQEMRNQGLWPLYRGFFVDVNLFKANNKKAAELAKDGNTLLKNINGALDSNGSVVDGLADEDSNLMVKLKFLTYKLRTFLIRNGLSTLFKDGPSAYRTYYLRQMKNWGTSTNKQRELIKLLDEWAVFIRRKYGNKPLSSSTYLSEAEPFLEQYAKRSPANQALIGAAGNLVQTENFLAILDAKRDEEGDLRTDHGAAPSGPVSTSVDVVPKTEGLIVFFPGIPGCAKSALCKEILNTPGGLGDDRPFHSLMGDLIKGRYWQKVADERRKKPARITLADKNAPNEEATLTVEIELINHCFQIEDMCGSTKAAAVPVVPDSEGTDSNPFSLEALAVFMFRVLQRVNHPGNLDKASPNAGYVLLMFYHLYDGKSRREFENELYERFGSLVKMPLLKPDRAPLPDAVKAILDEGISLFKMHRSRHGRAEPSKGSYAKEWAQWEQRLRATLFGNADHLNSIQVPFDYAVKAVLEQLKAVAKGDLKTPDTGKRKFGNIMFAAVRLTPPDILGLLRKVAEKDTAVDSFVNKIRLEDNLTKVHVTLAHKRGHGVSAVASYGIYQHQEVPVSFNALYYTDKMAALEAQLGAVNDEPINSRNEWPHATLWTAPGVTPKEANMLPQLASEGKAERVPIDPPITISGVVDFY

SEQ ID NO: 188327 - protein, 678 aa, Zea Mays
MIRLMKQRHFSAAFKCYWNYHKIDSLSNDNLYYKMVIHVHNDSVFRRYQQEMRRNQGLWPLYRGFFVDVNLFKANNKKAAELAKDGNTLLKNINGALDSNGSVVDGLADEDSNLMVKLKFLTYKLRTFLIRNGLSTLFKDGPSAYRTYYLRQMKNWGTSTNKQRELIKLLDEWAVFIRRKYGNKPLSSSTYLSEAEPFLEQYAKRSPANQALIGAAGNLVQTENFLAILDAKRDEEGDLRTDHGAAPSGPVSTSVDVVPKTEGLIVFFPGIPGCAKSALCKEILNTPGGLGDDRPFHSLMGDLIKGRYWQKVADERRKKPARITLADKNAPNEEVWKQIEDMCGSTKAAAVPVVPDSEGTDSNPFSLEALAVFMFRVLQRVNHPGNLDKASPNAGYVLLMFYHLYDGKSRREFENELYERFGSLVKMPLLKPDRAPLPDAVKAILDEGISLFKMHRSRHGRAEPSKGSYAKEWAQWEQRLRATLFGNADHLNSIQVPFDYAVKAVLEQLKAVAKGDLKTPDTGKRKFGNIMFAAVRLTPPDILGLLRKVAEKDTAVDSFVNKIRLEDNLTKVHVTLAHKRGHGVSAVASYGIYQHQEVPVSFNALYYTDKMAALEAQLGAVNDEPINSRNEWPHATLWTAPGVTPKEANMLPQLASEGKAERVPIDPPITISGVVDFY

SEQ ID NO: 188328 - protein, 722 aa, Zea Mays
MCPDHSDWFGTGGLDAQSRNADRSVVTKFLQAHPADYATKKLQEMIRLMKQRHFSAAFKCYWNYHKIDSLSNDNLYYKMVIHVHNDSVFRRYQQEMRRNQGLWPLYRGFFVDVNLFKANNKKAAELAKDGNTLLKNINGALDSNGSVVDGLADEDSNLMVKLKFLTYKLRTFLIRNGLSTLFKDGPSAYRTYYLRQMKNWGTSTNKQRELIKLLDEWAVFIRRKYGNKPLSSSTYLSEAEPFLEQYAKRSPANQALIGAAGNLVQTENFLAILDAKRDEEGDLRTDHGAAPSGPVSTSVDVVPKTEGLIVFFPGIPGCAKSALCKEILNTPGGLGDDRPFHSLMGDLIKGRYWQKVADERRKKPARITLADKNAPNEEVWKQIEDMCGSTKAAAVPVVPDSEGTDSNPFSLEALAVFMFRVLQRVNHPGNLDKASPNAGYVLLMFYHLYDGKSRREFENELYERFGSLVKMPLLKPDRAPLPDAVKAILDEGISLFKMHRSRHGRAEPSKGSYAKEWAQWEQRLRATLFGNADHLNSIQVPFDYAVKAVLEQLKAVAKGDLKTPDTGKRKFGNIMFAAVRLTPPDILGLLRKVAEKDTAVDSFVNKIRLEDNLTKVHVTLAHKRGHGVSAVASYGIYQHQEVPVSFNALYYTDKMAALEAQLGAVNDEPINSRNEWPHATLWTAPGVTPKEANMLPQLASEGKAERVPIDPPITISGVVDFY

SEQ ID NO: 188329 - protein, 906 aa, Zea Mays
MELVTAVLGDHGQRPKDDYAVVTAVTELGNGKPKFYSTPEVIAFCRKWRLPTNHVWLFSTRKSASSFFAAYDALCEEGTATPVCKTLDEIADIAVPGSKDHVKVQGEILEGLVARIVPRQSLVQMEEVLKNFPQAPFDAGDSDLGPSLREICAANRSDEKQQIKALLENVGASMCPDHSDWFGTGGLDAQSRNADRSVVTKFLQAHPADYATKKLQEMIRLMKQRHFSAAFKCYWNYHKIDSLSNDNLYYKMVIHVHNDSVFRRYQQEMRRNQGLWPLYRGFFVDVNLFKANNKKAAELAKDGNTLLKNINGALDSNGSVVDGLADEDSNLMVKLKFLTYKLRTFLIRNGLSTLFKDGPSAYRTYYLRQMKNWGTSTNKQRELIKLLDEWAVFIRRKYGNKPLSSSTYLSEAEPFLEQYAKRSPANQALIGAAGNLVQTENFLAILDAKRDEEGDLRTDHGAAPSGPVSTSVDVVPKTEGLIVFFPGIPGCAKSALCKEILNTPGGLGDDRPFHSLMGDLIKGRYWQKVADERRKKPARITLADKNAPNEEATLTVEIELINHCFQIEDMCGSTKAAAVPVVPDSEGTDSNPFSLEALAVFMFRVLQRVNHPGNLDKASPNAGYVLLMFYHLYDGKSRREFENELYERFGSLVKMPLLKPDRAPLPDAVKAILDEGISLFKMHRSRHGRAEPSKGSYAKEWAQWEQRLRATLFGNADHLNSIQVPFDYAVKAVLEQLKAVAKGDLKTPDTGKRKFGNIMFAAVRLTPPDILGLLRKVAEKDTAVDSFVNKIRLEDNLTKVHVTLAHKRGHGVSAVASYGIYQHQEVPVSFNALYYTDKMAALEAQLGAVNDEPINSRNEWPHATLWTAPGVTPKEANMLPQLASEGKAERVPIDPPITISGVVDFY

SEQ ID NO: 188330 - protein, 270 aa, Zea Mays
MELVTAVLGDHGQRPKDDYAVVTAVTELGNGKPKFYSTPEVIAFCRKWRLPTNHVWLFSTRKSASSFFAAYDALCEEGTATPVCKTLDEIADIAVPGSKDHVKVQGEILEGLVARIVPRQSLVQMEEVLKNFPQAPFDAGDSDLGPSLREICAANRSDEKQQIKALLENVGASMCPDHSDWFGTGGLDAQSRNADRSVVTKFLQAHPADYATKKLQEMIRLMKQRHFSAAFKCYWNYHKIDSLSNDNLYYKMVIHVHNDSVFRRYQQEMR

SEQ ID NO: 188331 - protein, 526 aa, Zea Mays
MKNWGTSTNKQRELIKLLDEWAVFIRRKYGNKPLSSSTYLSEAEPFLEQYAKRSPANQALIGAAGNLVQTENFLAILDAKRDEEGDLRTDHGAAPSGPVSTSVDVVPKTEGLIVFFPGIPGCAKSALCKEILNTPGGLGDDRPFHSLMGDLIKGRYWQKVADERRKKPARITLADKNAPNEEVWKQIEDMCGSTKAAAVPVVPDSEGTDSNPFSLEALAVFMFRVLQRVNHPGNLDKASPNAGYVLLMFYHLYDGKSRREFENELYERFGSLVKMPLLKPDRAPLPDAVKAILDEGISLFKMHRSRHGRAEPSKGSYAKEWAQWEQRLRATLFGNADHLNSIQVPFDYAVKAVLEQLKAVAKGDLKTPDTGKRKFGNIMFAAVRLTPPDILGLLRKVAEKDTAVDSFVNKIRLEDNLTKVHVTLAHKRGHGVSAVASYGIYQHQEVPVSFNALYYTDKMAALEAQLGAVNDEPINSRNEWPHATLWTAPGVTPKEANMLPQLASEGKAERVPIDPPITISGVVDFY

SEQ ID NO: 188332 - protein, 337 aa, Zea Mays
MCGSTKAAAVPVVPDSEGTDSNPFSLEALAVFMFRVLQRVNHPGNLDKASPNAGYVLLMFYHLYDGKSRREFENELYERFGSLVKMPLLKPDRAPLPDAVKAILDEGISLFKMHRSRHGRAEPSKGSYAKEWAQWEQRLRATLFGNADHLNSIQVPFDYAVKAVLEQLKAVAKGDLKTPDTGKRKFGNIMFAAVRLTPPDILGLLRKVAEKDTAVDSFVNKIRLEDNLTKVHVTLAHKRGHGVSAVASYGIYQHQEVPVSFNALYYTDKMAALEAQLGAVNDEPINSRNEWPHATLWTAPGVTPKEANMLPQLASEGKAERVPIDPPITISGVVDFY

SEQ ID NO: 188333 - protein, 305 aa, Zea Mays
MFRVLQRVNHPGNLDKASPNAGYVLLMFYHLYDGKSRREFENELYERFGSLVKMPLLKPDRAPLPDAVKAILDEGISLFKMHRSRHGRAEPSKGSYAKEWAQWEQRLRATLFGNADHLNSIQVPFDYAVKAVLEQLKAVAKGDLKTPDTGKRKFGNIMFAAVRLTPPDILGLLRKVAEKDTAVDSFVNKIRLEDNLTKVHVTLAHKRGHGVSAVASYGIYQHQEVPVSFNALYYTDKMAALEAQLGAVNDEPINSRNEWPHATLWTAPGVTPKEANMLPQLASEGKAERVPIDPPITISGVVDFY

SEQ ID NO: 188334 - protein, 147 aa, Zea Mays
MKARMYGTCEKKRLSLTACKTEQSPLRIQSSLRRTTLPPPLLRFCTQRPPVADGSLFAAAAADPPWERRRCEARRRERWRPPTTGSSSSAASHGRRARTASASTSAASARSPRLPSCGTAARGVPAGSGSWSSPTQRSPSASPWRNI

SEQ ID NO: 188335 - protein, 143 aa, Zea Mays
MAEAQGHLDRDALGRSLLEACPRASRRLTSGGNGGQVSLTGDNWGGLPSAHGIGNISGLGSGNLGRGAGDNNFGLPSGSYGRSNSTGTIGEPFSAAGNTYDVNNADTYGSSSVYGGTVWRFTSSEVDMHSFGHDIGNVGPTIK

SEQ ID NO: 188336 - protein, 169 aa, Zea Mays
MSESEAGPTTLPPPPPPPPLPDTSESIDPPAPPFPLPPLPPLPPPPPKPNSDAALPGLPLPPPGPPLRESVSGHTVLPPPLPPSQRSSNPPPASSANESKTDSAWVSTLDLFCIFTSASNPFVNASNPFPYCSNVWILAFVTLSDVTLFAALSCVASTTPATWVVTKII

SEQ ID NO: 188337 - protein, 452 aa, Zea Mays
MTHFYEFTERRCISQSACFAKFLVWFHAGRILPRSGRAREPLAAVAVPLPEGERDEKEEGKMKTTKGGKAMNPTDAFRKEQRKKELKRNKKERKKVRDVGILKKDPEAIWEQIEKLEKMKADGALDKARKHKKRQLEDTYNLIVKKRKEYEQKMKEKGEQPIMFSHLAPPKRRPTGDEDGRANPKPEDSVYYHPTLNPSGAPPPGKPPMYKSSIGPRIPPPSSSSTGASSSMSESEAGPTTLPPPPPPPPLPDTSESIDPPAPPFPLPPLPPLPPPPPKPNSDAALPGLPLPPPGPPLRESVSGHTVLPPPLPPSQRSSNPPPASSANESKTDSAWPLVVLPPPPPPPGLSPKSYDMEAAGTSKDTPGLKEDTAARVLPPPPPPSLPPLPPMQSDMLSPGVMRLPPPPPPPDSRPSLMAPGVSRPPPPPPGFPRLKCQYHHMHPVWFSFFFD

SEQ ID NO: 188338 - protein, 179 aa, Zea Mays
MSESEAGPTTLPPPPPPPPLPDTSESIDPPAPPFPLPPLPPLPPPPPKPNSDAALPGLPLPPPGPPLRESVSGHTVLPPPLPPSQRSSNPPPASSANESKTDSAWVPASVRVKRESALPKPKPKVQQQQQLSTASISRPSVTLIRSDARPSSAAPKPPSMDDSYLAFLEDMKELGALDG

SEQ ID NO: 188339 - protein, 247 aa, Zea Mays
MKEKGEQPIMFSHLAPPKRRPTGDEDGRANPKPEDSVYYHPTLNPSGAPPPGKPPMYKSSIGPRIPPPSSSSTGASSSMSESEAGPTTLPPPPPPPPLPDTSESIDPPAPPFPLPPLPPLPPPPPKPNSDAALPGLPLPPPGPPLRESVSGHTVLPPPLPPSQRSSNPPPASSANESKTDSAWVSTLDLFCIFTSASNPFVNASNPFPYCSNVWILAFVTLSDVTLFAALSCVASTTPATWVVTKII

SEQ ID NO: 188340 - protein, 285 aa, Zea Mays
MVLWTRLGSIRKDSLRIHTILLLRNEYEQKMKEKGEQPIMFSHLAPPKRRPTGDEDGRANPKPEILLMFILQDSVYYHPTLNPSGAPPPGKPPMYKSSIGPRIPPPSSSSTGASSSMSESEAGPTTLPPPPPPPPLPDTSESIDPPAPPFPLPPLPPLPPPPPKPNSDAALPGLPLPPPGPPLRESVSGHTVLPPPLPPSQRSSNPPPASSANESKTDSAWVSTLDLFCIFTSASNPFVNASNPFPYCSNVWILAFVTLSDVTLFAALSCVASTTPATWVVTKII

SEQ ID NO: 188341 - protein, 133 aa, Zea Mays
MVLWTRLGSIRKDSLRIHTILLLRNEYEQKMKEKGEQPIMFSHLAPPKRRPTGDEDGRANPKPEDSVYYHPTLNPSGAPPPGKPPMYKSSIGPRIPPPSSSSTGASSSMSESEAALSCVASTTPATWVVTKII

SEQ ID NO: 188342 - protein, 214 aa, Zea Mays
MDSVYYHPTLNPSGAPPPGKPPMYKSSIGPRIPPPSSSSTGASSSMSESEAGPTTLPPPPPPPPLPDTSESIDPPAPPFPLPPLPPLPPPPPKPNSDAALPGLPLPPPGPPLRESVSGHTVLPPPLPPSQRSSNPPPASSANESKTDSAWVSTLDLFCIFTSASNPFVNASNPFPYCSNVWILAFVTLSDVTLFAALSCVASTTPATWVVTKII

SEQ ID NO: 188343 - protein, 290 aa, Zea Mays
MRLMVLWTRLGSIRKDSLRIHTILLLRNEYEQKMKEKGEQPIMFSHLAPPKRRPTGDEDGRANPKPEDSVYYHPTLNPSGAPPPGKPPMYKSSIGPRIPPPSSSSTGASSSMSESEAGPTTLPPPPPPPPLPDTSESIDPPAPPFPLPPLPPLPPPPPKPNSDAALPGLPLPPPGPPLRESVSGHTVLPPPLPPSQRSSNPPPASSANESKTDSAWVPASVRVKRESALPKPKPKVQQQQQLSTASISRPSVTLIRSDARPSSAAPKPPSMDDSYLAFLEDMKELGALDG

SEQ ID NO: 188344 - protein, 304 aa, Zea Mays
MKEKGEQPIMFSHLAPPKRRPTGDEDGRANPKPEDSVYYHPTLNPSGAPPPGKPPMYKSSIGPRIPPPSSSSTGASSSMSESEAGPTTLPPPPPPPPLPDTSESIDPPAPPFPLPPLPPLPPPPPKPNSDAALPGLPLPPPGPPLRESVSGHTVLPPPLPPSQRSSNPPPASSANESKTDSAWPLVVLPPPPPPPGLSPKSYDMEAAGTSKDTPGLKEDTAARVLPPPPPPSLPPLPPMQSDMLSPGVMRLPPPPPPPDSRPSLMAPGVSRPPPPPPGFPRLKCQYHHMVSSLVRHRCLGLHFC

SEQ ID NO: 188345 - protein, 221 aa, Zea Mays
MSESEAGPTTLPPPPPPPPLPDTSESIDPPAPPFPLPPLPPLPPPPPKPNSDAALPGLPLPPPGPPLRESVSGHTVLPPPLPPSQRSSNPPPASSANESKTDSAWPLVVLPPPPPPPGLSPKSYDMEAAGTSKDTPGLKEDTAARVLPPPPPPSLPPLPPMQSDMLSPGVMRLPPPPPPPDSRPSLMAPGVSRPPPPPPGFPRLKCQYHHMHPVWFSFFFD

SEQ ID NO: 188346 - protein, 123 aa, Zea Mays
MTSYCVVAVESVGRQIPIAFLDRVKEDFTKKYGGGKAATAAANSLKREFGPKLKEHMQYCVDHPEEVSKLAKVKAQVSEVKGVMMENIEKVLDRGEKIELLVDKTENLRSQGRAQLYGHNLDR

SEQ ID NO: 188347 - protein, 679 aa, Zea Mays
MNEKEIRHLCSYLQDLKKASAEEMRRSVYANYAAFIRTSKEISDLEGELLSIRNLLNTQAALIHGLSEGVQIDSLTSGPEGSAEDDISNVEDQEPSEIQKWSADFPDMLDVLLAERRVDEALDALDEAERVAVDAKRKQTLTAAEVLALKRSISDNRQRLADQLAEAACQSSTRGIELRAAASALKRLGDGPRAHSLLLSAHNQRLQCNMQTIHPSSTSYGGAYTAALAQQVFSVIAQALSDSVDVFGDESCYASELVTWATKQVMSFALLVKRHVLSSCAAAGGLRAAAECVQISLGHCSLLEARGLSVSSVLLKQFKPSLEQALDANLRRIEESTAALAAADNWILTYPPTGIRPLTRLSAANLALQPKLSSSGHRFNSMVQDFFEDVAPLLSLQLGGSTMDGITQIFNSYVNLLINALPGSMDDEANLDGLGNKIVRMAETEEQQLALLANASLLAEELLPRAAMKLSSINQSMDDLCKRGTDKQSRVPEQREWKRKLHRMVDRLRDSFCRQHALELIFTDEGDTHLSAEMYISMDNTVEEPEWVPSPIFQELYAKLNRMASIAAEMFVGRERFATLLMMRLTETVILWLSEDQAFWEEIEQGAKPLGPLGLQQFYLDMQFVIIFGQGRFLSRHVHQVILDVIDRAMAAFSATGMNPDSLLPSVAYSNCNWQPVVT

SEQ ID NO: 188348 - protein, 641 aa, Zea Mays
MASAKSSRSRPAGHSGVFPVGSAAAVGSGGGGGGGGDGGVQLADKLKIFKTDNFDPDAYVQSKCQTMNEKEIRHLCSYLQDLKKASAEEMRRSVYANYAAFIRTSKEISDLEGELLSIRNLLNTQAALIHGLSEGVQIDSLTSGPEGSAEDDISNVEDQEPSEIQKWSADFPDMLDVLLAERRVDEALDALDEAERVAVDAKRKQTLTAAEVLALKRSISDNRQRLADQLAEAACQSSTRGIELRAAASALKRLGDGPRAHSLLLSAHNQRLQCNMQTIHPSSTSYGGAYTAALAQQVFSVIAQALSDSVDVFGDESCYASELVTWATKQVMSFALLVKRHVLSSCAAAGGLRAAAECVQISLGHCSLLEARGLSVSSVLLKQFKPSLEQALDANLRRIEESTAALAAADNWILTYPPTGIRPLTRLSAANLALQPKLSSSGHRFNSMVQDFFEDVAPLLSLQLGGSTMDGITQIFNSYVNLLINALPGSMDDEANLDGLGNKIVRMAETEEQQLALLANASLLAEELLPRAAMKLSSINQSMDDLCKRGTDKQSRVPEQREWKRKLHRMVDRLRDSFCRQHALELIFTDEGDTHLSAEMYISMDNTVEEPEWVPSPIFQSYCGSQRTRPFGKRLNRGLSL

SEQ ID NO: 188349 - protein, 874 aa, Zea Mays
MAQPLVVKKDDDLDEEEYYSPFLGIEKGAVLQEARVFHDPQLDARRCCQVITKLLYLLNQGDTFTKVEATEVFFATTKLFQSKDAGLRRMVYLMIKELSPSADEVIIVTSSLMKDMNSKTDMYRANAIRVLCRIIDSTLLTQIERYLKQAIVDKNPVVASAALVSGIYLLQTSPEVVKRWSNEVQEAVQSRAALVQFHALALLHQIRQNDRLAVSKLVTSLTRGSVRSPLAQCLLIRYTSQVIRESGVYQGGDRPFFDFLESCLRNKAEMVILEAARAITELNGVTSRELTPAITVLQLFLSSSKPVLRFAAVRTLNKVASTHPLAVTNCNIDMESLISDQNRSVATLAITTLLKTGNESSVDRLMKQMTNFMSDIADEFKIVVVEAIRSLCLKFPLKYRSLMNFLSNILREEGGFEYKKAIVDSIIILIRDIPDAKESGLFHLCEFIEDCEFTYLSTQILHFLGNEGPKTSDPSKYIRYIYNRVILENATVRASAVSTLAKFGALVDSLKPRIFVLLRRCLFDGDDEVRDRATLYLKLLGGEATVGETEKDVNEFLFGSLDVPLVNLETSLRNYETKSQPLAEKKSTGKKSAGPASAVSGSVSTVDASYEKLLSSIPEFADFGKLFKSSAPVELTEAETEYSVNVVKHIFDRHVVLQYNCTNTIPEQLLEQVIVLVDASEADEFLEVASKPLESLPYDSPGQTFVAFENPEGVIATGKFSNILKFFVKEVDPSTGEAEDDGVEDEYQLEDLEIVSADYMLKVGVSNFRNAWENMDPETERVDEYGLGVRESLAEAVSAVISILGMQPCEGTDVVPSNSRSHTCLLSGVFIGNVKVLVRLSFGISAPKEVAMKLAVRSDDPEISDRIHEIVANG

SEQ ID NO: 188350 - protein, 799 aa, Zea Mays
MVYLMIKELSPSADEVIIVTSSLMKDMNSKTDMYRANAIRVLCRIIDSTLLTQIERYLKQAIVDKNPVVASAALVSGIYLLQTSPEVVKRWSNEVQEAVQSRAALVQFHALALLHQIRQNDRLAVSKLVTSLTRGSVRSPLAQCLLIRYTSQVIRESGVYQGGDRPFFDFLESCLRNKAEMVILEAARAITELNGVTSRELTPAITVLQLFLSSSKPVLRFAAVRTLNKVASTHPLAVTNCNIDMESLISDQNRSVATLAITTLLKTGNESSVDRLMKQMTNFMSDIADEFKIVVVEAIRSLCLKFPLKYRSLMNFLSNILREEGGFEYKKAIVDSIIILIRDIPDAKESGLFHLCEFIEDCEFTYLSTQILHFLGNEGPKTSDPSKYIRYIYNRVILENATVRASAVSTLAKFGALVDSLKPRIFVLLRRCLFDGDDEVRDRATLYLKLLGGEATVGETEKDVNEFLFGSLDVPLVNLETSLRNYEPSDVPFDISSVSKETKSQPLAEKKSTGKKSAGPASAVSGSVSTVDASYEKLLSSIPEFADFGKLFKSSAPVELTEAETEYSVNVVKHIFDRHVVLQYNCTNTIPEQLLEQVIVLVDASEADEFLEVASKPLESLPYDSPGQTFVAFENPEGVIATGKFSNILKFFVKEVDPSTGEAEDDGVEDEYQLEDLEIVSADYMLKVGVSNFRNAWENMDPETERVDEYGLGVRESLAEAVSAVISILGMQPCEGTDVVPSNSRSHTCLLSGVFIGNVKVLVRLSFGISAPKEVAMKLAVRSDDPEISDRIHEIVANG

SEQ ID NO: 188351 - protein, 129 aa, Zea Mays
MITFLDLSKRLARRGHAVTFVSTPRNAAKLQGSIPLELAAHLCIVRLDLPGVDGLPEGAESTADVLPKKVGLLQKAFDGLAAPFERLAIGAVLPPARRPRSRGSSTGSSSTSLRTGSGQLLNSIRPSGP

SEQ ID NO: 188352 - protein, 1870 aa, Zea Mays
MAPPRVTRKKGKGAGGKTDLRPDRKQFKRHHKEDAAAEQGDGNGERQQSAAPGSAALLAAASDEADFPRGGHSLLSKDEMAEARAEAEQDFEREAKKGKGKRKRSGGESSGFGVDDDLGILFGGATTGKLPRFANRITVKNISPNMKLWGVVIEVNQKDIVLSLPGGIRGFVRSEDVCDIALQENRKDSGNNLCAEVVHVGQLVPCIVLRVDDDSREGKVNKRVWLSLRLSLLYKGLALDGLQEGMVLTAQVKSIEDHGYILHFGVSSFSGFMQKDDKEDVKTERRQLMQCVVKAIDKTRAIVHLSSDEDLLSKSTIKDLKGLSIDHLIPGMMVNARVHSFLENGLMLSFLTYFSGTVDIFNLLNSFPSGNWKDDYSKNKKVNARILFVDPSTRAVGLTLNKHLLHLEVPPINLKAGDIYDKSKVLRVDKKAGLFLEIPSPTPSPGFISIRDVSDKDAKNLEKFKEGSSLRVRILGVRNLEGVAIGTIKDSAFEGSVFTHDDVKPGMLVRAKVATVEPFGAIVQFSSGVKALCPLPHMSELEHVVKPPKKFKVGAELLFRVLGCKSKRVTVTYKKSLVKSKLDVLSSYADAKIGLVTHGWITHIEKHGCFVKFYNGVQGFVSRSDLGLEAGTEAENVYHVGQVVKCRIINVIPASRKLNVSFVISHNRIAPIDTPKLGSIVSGVVERLTPAAVVVSVNGFSKGTILNEHLADHHGQAAQLKNVLKPGHEFNQLLVLDTEGQNLVLSAKHSLINCANDIPSEISQMHPGVVVHGYICNIIEAGCFVRFLGHLTGFSPKDKAVDRWIEKLSDAFYVGQSVRSHILSVNAETARVKLALQQSMCSSMDSSFIQGYFLLDQKIAALKYSSNDWARHFGIGSLVEAEVGAIEEYGIILNFKDHLDTVGLIEHHQLGGSSVEVGSSVKGLVLDLSDGVVNLSVKPELIDSVRIVGKKKKRQRAVVADLELHEEVNAVVEIIKDSYMVLSIPEYNYAIGFSPLMDYNSQLLPHHHYDNGQRITVVVGNIPSSDSSGRLILLPKASAQYSSLSDSKRAKKKSGYKIGSLVEAEIIDIKPLELLLKFGGNLHGRIHITEILEEDSAEHPFSELRIGQKLTARIVSEAEPSGKSGKKFKWELSIRPCIVNGEFAQKEQNHTTNGIVRAYVVKVDKEWVWLTVSRNVMAHLFLLDSSSEPSELKEFQQRFSVGQAVKGRVISVNQEKRLLRLKALDNQCTQPNIDETQEPKSSVFGQTKQGDIIGGRVQKILPGVGGLVVQIGPHLHGRVHYTEIVDSWVSEPLSGFHEGQFVKCKVLSVSRSSEGSLRVDLSLRSSNLIRDSNNSRLDDLETCTSRIEKIKDLLPGTEIKGYVKNVNSKGCFIMLSRMVDARITLSNLSDEYVENPQKDFPVGMLVHGRILSTDPSSGRVEASLRKTTGSKLEKLDDISYSDLHVGDIVDGQVKRVESFGLFVTIRRSELVGLCHVSELSDEPVVDINSCYKAGDMVKAKILKIDETRHRVSLGMKKSYFDSDLTADTNDDESALMDISVAPQMVEYHNRNLVHRKAEPRASVLPLQVSLDESEGSDLEDNISNTCLEIANGTEANAKKSDKQLKKEARKQRELEISAMEERALQEDIPQTPDDFEKLVRSSPNSSFIWIKYMATLLDLADVEKARAVAERALKTIIPREEEEKLNVWVAYFNLENEYGSPREDAVKKVFQRALQYCDPKKLHLALLAMYERTEQYELADELLDRMTKRFKTSCKIWLCRIQFALKQEFKCGVPEEGRSRFELILREYPKRTDLWSVYLDQEIRLGDVEVIRALFERVTCLTLPPKKMQFLFKKYLNFEKSLGKDNERIQLVQQKAIEYVQSSLPSQDNS

SEQ ID NO: 188353 - protein, 1955 aa, Zea Mays
MAPPRVTRKKGKGAGGKTDLRPDRKQFKRHHKEDAAAEQGDGNGERQQSAAPGSAALLAAASDEADFPRGGHSLLSKDEMAEARAEAEQDFEREAKKGKGKRKRSGGESSGFGVDDDLGILFGGATTGKLPRFANRITVKVGDSEIKITAAEASRARSKIEWSSSGIEGLFWTVSVARIWYKLCTSMHIKIKNISPNMKLWGVVIEVNQKDIVLSLPGGIRGFVRSEDVCDIALQENRKDSGNNLCAEVVHVGQLVPCIVLRVDDDSREGKVNKRVWLSLRLSLLYKGLALDGLQEGMVLTAQVKSIEDHGYILHFGVSSFSGFMQKDDKEDVKTERRQLMQCVVKAIDKTRAIVHLSSDEDLLSKSTIKDLKGLSIDHLIPGMMVNARVHSFLENGLMLSFLTYFSGTVDIFNLLNSFPSGNWKDDYSKNKKVNARILFVDPSTRAVGLTLNKHLLHLEVPPINLKAGDIYDKSKVLRVDKKAGLFLEIPSPTPSPGFISIRDVSDKDAKNLEKFKEGSSLRVRILGVRNLEGVAIGTIKDSAFEGSVFTHDDVKPGMLVRAKVATVEPFGAIVQFSSGVKALCPLPHMSELEHVVKPPKKFKVGAELLFRVLGCKSKRVTVTYKKSLVKSKLDVLSSYADAKIGLVTHGWITHIEKHGCFVKFYNGVQGFVSRSDLGLEAGTEAENVYHVGQVVKCRIINVIPASRKLNVSFVISHNRIAPIDTPKLGSIVSGVVERLTPAAVVVSVNGFSKGTILNEHLADHHGQAAQLKNVLKPGHEFNQLLVLDTEGQNLVLSAKHSLINCANDIPSEISQMHPGVVVHGYICNIIEAGCFVRFLGHLTGFSPKDKAVDRWIEKLSDAFYVGQSVRSHILSVNAETARVKLALQQSMCSSMDSSFIQGYFLLDQKIAALKYSSNDWARHFGIGSLVEAEVGAIEEYGIILNFKDHLDTVGLIEHHQLGGSSVEVGSSVKGLVLDLSDGVVNLSVKPELIDSVRIVGKKKKRQRAVVADLELHEEVNAVVEIIKDSYMVLSIPEYNYAIGFSPLMDYNSQLLPHHHYDNGQRITVVVGNIPSSDSSGRLILLPKASAQYSSLSDSKRAKKKSGYKIGSLVEAEIIDIKPLELLLKFGGNLHGRIHITEILEEDSAEHPFSELRIGQKLTARIVSEAEPSGKSGKKFKWELSIRPCIVNGEFAQKEQNHTTNGIVRAYVVKVDKEWVWLTVSRNVMAHLFLLDSSSEPSELKEFQQRFSVGQAVKGRVISVNQEKRLLRLKALDNQCTQPNIDETQEPKSSVFGQTKQGDIIGGRVQKILPGVGGLVVQIGPHLHGRVHYTEIVDSWVSEPLSGFHEGQFVKCKVLSVSRSSEGSLRVDLSLRSSNLIRDSNNSRLDDLETCTSRIEKIKDLLPGTEIKGYVKNVNSKGCFIMLSRMVDARITLSNLSDEYVENPQKDFPVGMLVHGRILSTDPSSGRVEASLRKTTGSKLEKLDDISYSDLHVGDIVDGQVKRVESFGLFVTIRRSELVGLCHVSELSDEPVVDINSCYKAGDMVKAKILKIDETRHRVSLGMKKSYFDSDLTADTNDDESALMDISVAPQMVEYHNRNLVHRKAEPRASVLPLQVSLDESEGSDLEDNISNTCLEIANGTEANAKKSDKQLKKEARKQRELEISAMEERALQEDIPQTPDDFEKLVRSSPNSSFIWIKYMATLLDLADVEKARAVAERALKTIIPREEEEKLNVWVAYFNLENEYGSPREDAVKKVFQRALQYCDPKKLHLALLAMYERTEQYELADELLDRMTKRFKTSCKIWLCRIQFALKQGKDVEYIKAIVNRALLSLPHRKRIKFLSQTAILEFKCGVPEEGRSRFELILREYPKRTDLWSVYLDQEIRLGDVEVIRALFERVTCLTLPPKKMQFLFKKYLNFEKSLGKDNERIQLVQQKAIEYVQSSLPSQDNS

SEQ ID NO: 188354 - protein, 1079 aa, Zea Mays
MSNFSCFTKAVDRWIEKLSDAFYVGQSVRSHILSVNAETARVKLALQQSMCSSMDSSFIQGYFLLDQKIAALKYSSNDWARHFGIGSLVEAEVGAIEEYGIILNFKDHLDTVGLIEHHQLGGSSVEVGSSVKGLVLDLSDGVVNLSVKPELIDSVRIVGKKKKRQRAVVADLELHEEVNAVVEIIKDSYMVLSIPEYNYAIGFSPLMDYNSQLLPHHHYDNGQRITVVVGNIPSSDSSGRLILLPKASAQYSSLSDSKRAKKKSGYKIGSLVEAEIIDIKPLELLLKFGGNLHGRIHITEILEEDSAEHPFSELRIGQKLTARIVSEAEPSGKSGKKFKWELSIRPCIVNGEFAQKEQNHTTNGIVRAYVVKVDKEWVWLTVSRNVMAHLFLLDSSSEPSELKEFQQRFSVGQAVKGRVISVNQEKRLLRLKALDNQCTQPNIDETQEPKSSVFGQTKQGDIIGGRVQKILPGVGGLVVQIGPHLHGRVHYTEIVDSWVSEPLSGFHEGQFVKCKVLSVSRSSEGSLRVDLSLRSSNLIRDSNNSRLDDLETCTSRIEKIKDLLPGTEIKMNMLKIHRRISPLECLYTEDPSSGRVEASLRKTTGSKLEKLDDISYSDLHVGDIVDGQVKRVESFGLFVTIRRSELVGLCHVSELSDEPVVDINSCYKAGDMVKAKILKIDETRHRVSLGMKKSYFDSDLTADTNDDESALMDISVAPQMVEYHNRNLVHRKAEPRASVLPLQVSLDESEGSDLEDNISNTCLEIANGTEANAKKSDKQLKKEARKQRELEISAMEERALQEDIPQTPDDFEKLVRSSPNSSFIWIKYMATLLDLADVEKARAVAERALKTIIPREEEEKLNVWVAYFNLENEYGSPREDAVKKVFQRALQYCDPKKLHLALLAMYERTEQYELADELLDRMTKRFKTSCKIWLCRIQFALKQGKDVEYIKAIVNRALLSLPHRKRIKFLSQTAILEFKCGVPEEGRSRFELILREYPKRTDLWSVYLDQEIRLGDVEVIRALFERVTCLTLPPKKMQFLFKKYLNFEKSLGKDNERIQLVQQKAIEYVQSSLPSQDNS

SEQ ID NO: 188355 - protein, 1368 aa, Zea Mays
MAPPRVTRKKGKGAGGKTDLRPDRKQFKRHHKEDAAAEQGDGNGERQQSAAPGSAALLAAASDEADFPRGGHSLLSKDEMAEARAEAEQDFEREAKKGKGKRKRSGGESSGFGVDDDLGILFGGATTGKLPRFANRITVKNISPNMKLWGVVIEVNQKDIVLSLPGGIRGFVRSEDVCDIALQENRKDSGNNLCAEVVHVGQLVPCIVLRVDDDSREGKVNKRVWLSLRLSLLYKGLALDGLQEGMVLTAQVKSIEDHGYILHFGVSSFSGFMQKDDKEDVKTERRQLMQCVVKAIDKTRAIVHLSSDEDLLSKSTIKDLKGLSIDHLIPGMMVNARVHSFLENGLMLSFLTYFSGTVDIFNLLNSFPSGNWKDDYSKNKKVNARILFVDPSTRAVGLTLNKHLLHLEVPPINLKAGDIYDKSKVLRVDKKAGLFLEIPSPTPSPGFISIRDVSDKDAKNLEKFKEGSSLRVRILGVRNLEGVAIGTIKDSAFEGSVFTHDDVKPGMLVRAKVATVEPFGAIVQFSSGVKALCPLPHMSELEHVVKPPKKFKVGAELLFRVLGCKSKRVTVTYKKSLVKSKLDVLSSYADAKIGLVTHGWITHIEKHGCFVKFYNGVQGFVSRSDLGLEAGTEAENVYHVGQVVKCRIINVIPASRKLNVSFVISHNRIAPIDTPKLGSIVSGVVERLTPAAVVVSVNGFSKGTILNEHLADHHGQAAQLKNVLKPGHEFNQLLVLDTEGQNLVLSAKHSLINCANDIPSEISQMHPGVVVHGYICNIIEAGCFVRFLGHLTGFSPKDKAVDRWIEKLSDAFYVGQSVRSHILSVNAETARVKLALQQSMCSSMDSSFIQGYFLLDQKIAALKYSSNDWARHFGIGSLVEAEVGAIEEYGIILNFKDHLDTVGLIEHHQLGGSSVEVGSSVKGLVLDLSDGVVNLSVKPELIDSVRIVGKKKKRQRAVVADLELHEEVNAVVEIIKDSYMVLSIPEYNYAIGFSPLMDYNSQLLPHHHYDNGQRITVVVGNIPSSDSSGRLILLPKASAQYSSLSDSKRAKKKSGYKIGSLVEAEIIDIKPLELLLKFGGNLHGRIHITEILEEDSAEHPFSELRIGQKLTARIVSEAEPSGKSGKKFKWELSIRPCIVNGEFAQKEQNHTTNGIVRAYVVKVDKEWVWLTVSRNVMAHLFLLDSSSEPSELKEFQQRFSVGQAVKGRVISVNQEKRLLRLKALDNQCTQPNIDETQEPKSSVFGQTKQGDIIGGRVQKILPGVGGLVVQIGPHLHGRVHYTEIVDSWVSEPLSGFHEGQFVKCKVLSVSRSSEGSLRVDLSLRSSNLIRDSNNSRLDDLETCTSRIEKIKDLLPGTEIKDYSIKFIR

SEQ ID NO: 188356 - protein, 1139 aa, Zea Mays
MHPGVVVHGYICNIIEAGCFVRFLGHLTGFSPKDKAVDRWIEKLSDAFYVGQSVRSHILSVNAETARVKLALQQSMCSSMDSSFIQGYFLLDQKIAALKYSSNDWARHFGIGSLVEAEVGAIEEYGIILNFKDHLDTVGLIEHHQLGGSSVEVGSSVKGLVLDLSDGVVNLSVKPELIDSVRIVGKKKKRQRAVVADLELHEEVNAVVEIIKDSYMVLSIPEYNYAIGFSPLMDYNSQLLPHHHYDNGQRITVVVGNIPSSDSSGRLILLPKASAQYSSLSDSKRAKKKSGYKIGSLVEAEIIDIKPLELLLKFGGNLHGRIHITEILEEDSAEHPFSELRIGQKLTARIVSEAEPSGKSGKKFKWELSIRPCIVNGEFAQKEQNHTTNGIVRAYVVKVDKEWVWLTVSRNVMAHLFLLDSSSEPSELKEFQQRFSVGQAVKGRVISVNQEKRLLRLKALDNQCTQPNIDETQEPKSSVFGQTKQGDIIGGRVQKILPGVGGLVVQIGPHLHGRVHYTEIVDSWVSEPLSGFHEGQFVKCKVLSVSRSSEGSLRVDLSLRSSNLIRDSNNSRLDDLETCTSRIEKIKDLLPGTEIKGYVKNVNSKGCFIMLSRMVDARITLSNLSDEYVENPQKDFPVGMLVHGRILSTDPSSGRVEASLRKTTGSKLEKLDDISYSDLHVGDIVDGQVKRVESFGLFVTIRRSELVGLCHVSELSDEPVVDINSCYKAGDMVKAKILKIDETRHRVSLGMKKSYFDSDLTADTNDDESALMDISVAPQMVEYHNRNLVHRKAEPRASVLPLQVSLDESEGSDLEDNISNTCLEIANGTEANAKKSDKQLKKEARKQRELEISAMEERALQEDIPQTPDDFEKLVRSSPNSSFIWIKYMATLLDLADVEKARAVAERALKTIIPREEEEKLNVWVAYFNLENEYGSPREDAVKKVFQRALQYCDPKKLHLALLAMYERTEQYELADELLDRMTKRFKTSCKIWLCRIQFALKQGKDVEYIKAIVNRALLSLPHRKRIKFLSQTAILEFKCGVPEEGRSRFELILREYPKRTDLWSVYLDQEIRLGDVEVIRALFERVTCLTLPPKKMQFLFKKYLNFEKSLGKDNERIQLVQQKAIEYVQSSLPSQDNS

SEQ ID NO: 188357 - protein, 1176 aa, Zea Mays
MKGCAEFHNDTEGQNLVLSAKHSLINCANDIPSEISQMHPGVVVHGYICNIIEAGCFVRFLGHLTGFSPKDKAVDRWIEKLSDAFYVGQSVRSHILSVNAETARVKLALQQSMCSSMDSSFIQGYFLLDQKIAALKYSSNDWARHFGIGSLVEAEVGAIEEYGIILNFKDHLDTVGLIEHHQLGGSSVEVGSSVKGLVLDLSDGVVNLSVKPELIDSVRIVGKKKKRQRAVVADLELHEEVNAVVEIIKDSYMVLSIPEYNYAIGFSPLMDYNSQLLPHHHYDNGQRITVVVGNIPSSDSSGRLILLPKASAQYSSLSDSKRAKKKSGYKIGSLVEAEIIDIKPLELLLKFGGNLHGRIHITEILEEDSAEHPFSELRIGQKLTARIVSEAEPSGKSGKKFKWELSIRPCIVNGEFAQKEQNHTTNGIVRAYVVKVDKEWVWLTVSRNVMAHLFLLDSSSEPSELKEFQQRFSVGQAVKGRVISVNQEKRLLRLKALDNQCTQPNIDETQEPKSSVFGQTKQGDIIGGRVQKILPGVGGLVVQIGPHLHGRVHYTEIVDSWVSEPLSGFHEGQFVKCKVLSVSRSSEGSLRVDLSLRSSNLIRDSNNSRLDDLETCTSRIEKIKDLLPGTEIKGYVKNVNSKGCFIMLSRMVDARITLSNLSDEYVENPQKDFPVGMLVHGRILSTDPSSGRVEASLRKTTGSKLEKLDDISYSDLHVGDIVDGQVKRVESFGLFVTIRRSELVGLCHVSELSDEPVVDINSCYKAGDMVKAKILKIDETRHRVSLGMKKSYFDSDLTADTNDDESALMDISVAPQMVEYHNRNLVHRKAEPRASVLPLQVSLDESEGSDLEDNISNTCLEIANGTEANAKKSDKQLKKEARKQRELEISAMEERALQEDIPQTPDDFEKLVRSSPNSSFIWIKYMATLLDLADVEKARAVAERALKTIIPREEEEKLNVWVAYFNLENEYGSPREDAVKKVFQRALQYCDPKKLHLALLAMYERTEQYELADELLDRMTKRFKTSCKIWLCRIQFALKQGKDVEYIKAIVNRALLSLPHRKRIKFLSQTAILEFKCGVPEEGRSRFELILREYPKRTDLWSVYLDQEIRLGDVEVIRALFERVTCLTLPPKKMQFLFKKYLNFEKSLGKDNERIQLVQQKAIEYVQSSLPSQDNS

SEQ ID NO: 188358 - protein, 1901 aa, Zea Mays
MAPPRVTRKKGKGAGGKTDLRPDRKQFKRHHKEDAAAEQGDGNGERQQSAAPGSAALLAAASDEADFPRGGHSLLSKDEMAEARAEAEQDFEREAKKGKGKRKRSGGESSGFGVDDDLGILFGGATTGKLPRFANRITNISPNMKLWGVVIEVNQKDIVLSLPGGIRGFVRSEDVCDIALQENRKDSGNNLCAEVVHVGQLVPCIVLRVDDDSREGKVNKRVWLSLRLSLLYKGLALDGLQEGMVLTAQVKSIEDHGYILHFGVSSFSGFMQKDDKEDVKTERRQLMQCVVKAIDKTRAIVHLSSDEDLLSKSTIKDLKGLSIDHLIPGMMVNARVHSFLENGLMLSFLTYFSGTVDIFNLLNSFPSGNWKDDYSKNKKVNARILFVDPSTRAVGLTLNKHLLHLEVPPINLKAGDIYDKSKVLRVDKKAGLFLEIPSPTPSPGFISIRDVSDKDAKNLEKFKEGSSLRVRILGVRNLEGVAIGTIKDSAFEGSVFTHDDVKPGMLVRAKVATVEPFGAIVQFSSGVKALCPLPHMSELEHVVKPPKKFKVGAELLFRVLGCKSKRVTVTYKKSLVKSKLDVLSSYADAKIGLVTHGWITHIEKHGCFVKFYNGVQGFVSRSDLGLEAGTEAENVYHVGQVVKCRIINVIPASRKLNVSFVISHNRIAPIDTPKLGSIVSGVVERLTPAAVVVSVNGFSKGTILNEHLADHHGQAAQLKNVLKPGHEFNQLLVLDTEGQNLVLSAKHSLINCANDIPSEISQMHPGVVVHGYICNIIEAGCFVRFLGHLTGFSPKDKAVDRWIEKLSDAFYVGQSVRSHILSVNAETARVKLALQQSMCSSMDSSFIQGYFLLDQKIAALKYSSNDWARHFGIGSLVEAEVGAIEEYGIILNFKDHLDTVGLIEHHQLGGSSVEVGSSVKGLVLDLSDGVVNLSVKPELIDSVRIVGKKKKRQRAVVADLELHEEVNAVVEIIKDSYMVLSIPEYNYAIGFSPLMDYNSQLLPHHHYDNGQRITVVVGNIPSSDSSGRLILLPKASAQYSSLSDSKRAKKKSGYKIGSLVEAEIIDIKPLELLLKFGGNLHGRIHITEILEEDSAEHPFSELRIGQKLTARIVSEAEPSGKSGKKFKWELSIRPCIVNGEFAQKEQNHTTNGIVRAYVVKVDKEWVWLTVSRNVMAHLFLLDSSSEPSELKEFQQRFSVGQAVKGRVISVNQEKRLLRLKALDNQCTQPNIDETQEPKSSVFGQTKQGDIIGGRVQKILPGVGGLVVQIGPHLHGRVHYTEIVDSWVSEPLSGFHEGQFVKCKVLSVSRSSEGSLRVDLSLRSSNLIRDSNNSRLDDLETCTSRIEKIKDLLPGTEIKGYVKNVNSKGCFIMLSRMVDARITLSNLSDEYVENPQKDFPVGMLVHGRILSTDPSSGRVEASLRKTTGSKLEKLDDISYSDLHVGDIVDGQVKRVESFGLFVTIRRSELVGLCHVSELSDEPVVDINSCYKAGDMVKAKILKIDETRHRVSLGMKKSYFDSDLTADTNDDESALMDISVAPQMVEYHNRNLVHRKAEPRASVLPLQVSLDESEGSDLEDNISNTCLEIANGTEANAKKSDKQLKKEARKQRELEISAMEERALQEDIPQTPDDFEKLVRSSPNSSFIWIKYMATLLDLADVEKARAVAERALKTIIPREEEEKLNVWVAYFNLENEYGSPREDAVKKVFQRALQYCDPKKLHLALLAMYERTEQYELADELLDRMTKRFKTSCKIWLCRIQFALKQGKDVEYIKAIVNRALLSLPHRKRIKFLSQTAILEFKCGVPEEGRSRFELILREYPKRTDLWSVYLDQEIRLGDVEVIRALFERVTCLTLPPKKMQFLFKKYLNFEKSLGKDNERIQLVQQKAIEYVQSSLPSQDNS

SEQ ID NO: 188359 - protein, 94 aa, Zea Mays
MKWLLRSNVFQGSIVFQEPHLCIGLCAVQALQGKVCSVWPESHPLPEHLRRPHHPTPTLSSRPTTPSRSIWRPTRSWTSSSCICHFIDFIKLYT

SEQ ID NO: 188360 - protein, 230 aa, Zea Mays
MFVLFLLVYLNFFGCISLSSSSTTVSPVFRALKTIIPREEEEKLNVWVAYFNLENEYGSPREDAVKKVFQRALQYCDPKKLHLALLAMYERTEQYELADELLDRITKRFKTSCKIWLCRIQFALKQEFKCGVPEEGRSRFELILREYPKRTDLWSVYLDQEIRLGDVEVIRALFERRVACLTLPPKKMQFLFKKYLNFEKSLGKDNERIQLVQQKAIEYVQSSLPSQDNS

SEQ ID NO: 188361 - protein, 93 aa, Zea Mays
MACTYVFMHVGSICDQESTALAFHYSFRKRKKGLEVEEEEEEEEDRLRERLPVHFCLMGALTTTRPWPAAGGPRFLAHGWPCAHVHISIDASM

SEQ ID NO: 188362 - protein, 303 aa, Zea Mays
MASVAATTTLAPALAPRRRARPGTGLLPPRRASAVRCSLDRNVSDMGVNAPKGLFPPEPEHYRGPKLKVAIIGAGLAGMSTAVELLDQGHEVDLYESRPFIGGKVGSFVDRQGNHIEMGLHVFFGCYSNLFRLMKKVGADNNLLVKEHTHTFVNKGGTIGELDFRFPVGAPLHGIQAFLRTNQLKVYDKARNAVALALSPVVRALVDPDGALQQVRDLDDVSFSDWFMSKGGTRESITRMWDPVAYALGFIDCDNISARCMLTIFTLFATKTEASLLRMLKGSPDVYLSGPIKKYITDRGGFT

SEQ ID NO: 188363 - protein, 294 aa, Zea Mays
MLKGSPDVYLSGPIKKYITDRGGRFHLRWGCREVLYEKSPDGETYVKGLLLTKATSREIIKADAYVAACDVPGIKRLLPSEWREWEMFDNIYKLDGVPVVTVQLRYNGWVTELQDLEKSRQLQRAVGLDNLLYTADADFSCFSDLALSSPADYYIEGQGSLIQAVLTPGDPYMPLPNEEIISKVQKQVVELFPSSRGLEVTWSSVVKIGQSLYREAPGNDPFRPDQKTPVKNFFLSGSYTKQDYIDSMEGATLSGRRTSAYICGAGEELLALRKKLLIDDGEKALGNVQVLQAS

SEQ ID NO: 188364 - protein, 358 aa, Zea Mays
METSSTACISPTSQRLIILSSRTTQYRPAYHPEGLYDDTKSSIGSNNAGERPMLQMWHRNGRCPEGTVPIRRTKKDDLLRASSVRRYGRKRHTAPNPLSVDPNMLSEGGHQHAIAYVQGDKYYGAKATINVWEPKIQQANEFSLSQLWILGGSFGEDLNSIEAGWQVSPDLYGDNNTRLFTYWTSDAYQATGCYNMLCSGFIQINSEVAMGASIFPISNYAGSQYDISILIWKDPKEGNWWMQFGKEYVLGYWPSFLFSYLADSASMIEWGGEVVNSEPDGTHTSTQMGSGHFPEEGFSKASYFKNVQVVDSSNQLSAPKGVGTFTEQSNCYDVQNGNNGDWGTYFYYGGPGKNSNCP

SEQ ID NO: 188365 - protein, 225 aa, Zea Mays
MARARGGAAWWVLAAAWVLWAAAAAAEAEARSPSARRVHRHLKRLNKPAVKSIESPDGDIIDCVHISHQPAFDHPLLKNHTIQFRPAYHPEGLYDDTKSSIGSNNAGERPMLQMWHRNGRCPEGTVPIRRTKKDDLLRASSVRRYGRKRHTAPNPLSVDPNMLSEGGHQHAIAYVQGDKYYGAKATINVWEPKIQQANEFSLSQLWILGGSFGEDLNSIEAGWQP

SEQ ID NO: 188366 - protein, 306 aa, Zea Mays
MLQMWHRNGRCPEGTVPIRRTKKDDLLRASSVRRYGRKRHTAPNPLSVDPNMLSEGGHQHAIAYVQGDKYYGAKATINVWEPKIQQANEFSLSQLWILGGSFGEDLNSIEAGWQVSPDLYGDNNTRLFTYWTSDAYQATGCYNMLCSGFIQINSEVAMGASIFPISNYAGSQYDISILIWKDPKEGNWWMQFGKEYVLGYWPSFLFSYLADSASMIEWGGEVVNSEPDGTHTSTQMGSGHFPEEGFSKASYFKNVQVVDSSNQLSAPKGVGTFTEQSNCYDVQNGNNGDWGTYFYYGGPGKNSNCP

SEQ ID NO: 188367 - protein, 147 aa, Zea Mays
MTFEVEKDNAHPRGRSNATVTNEQGDYHHKGKCVIGASSSGVAGMSTMHVNTVEVITQNGRRVKLKGGIESPWSHGEPYGNDFSCNYCTSRIKGGGATRLREHLGGLPGNVAACINVPLNVKAIMTDEVVVRRIRRRRNSDIRLYVE

SEQ ID NO: 188368 - protein, 54 aa, Zea Mays
MLVATGAGVPDVAWSCHQPARSTSPSSSMQSSSMGPRSLSPRASTSCLLCSTAL

SEQ ID NO: 188369 - protein, 73 aa, Zea Mays
MRISIHQSPSCRPPARLGERDLFPNLRSRSTVLHSGCRIDPPRSRSGAEGWTRTGARVGSSSCWLRSRRLSKL

SEQ ID NO: 188370 - protein, 185 aa, Zea Mays
MKITPVQKQTRAGQRTRFKAFVVVGDGDGHVGLGVKCAKEVATAIRGAIILAKLSVVPVRRGYWGNKIGQPHTVPCKVTGKCGSVTVRMVPAPRGSGIVAARVPKKVLQFAGIEDVFTSSRGSTKTLGNFVKATFDCLMKTYGFLTPEFWAETKYAKTPFQEFTDLLAKPTKGLLIEAPTETVEA

SEQ ID NO: 188371 - protein, 125 aa, Zea Mays
MPATTPTRLMIRMVVGGIRSVVHLNMYSSAKSPSSSEALEVTVKLVSMPASTLSRPWNTAKRCAEMPPITQNCSFLHHSSMPTPLHLISRMPVAKIEMKREMNQMLAKLLICTHSIPRWRAGCSR

SEQ ID NO: 188372 - protein, 99 aa, Zea Mays
MVVEFVFLLAGFLLFLFGHECLLLSLILSILRGLSFFYIMSKLYIPLVMLLSREVLPDFVLFSVSITFLCGISFVGRVFGNIHCVGSMGCYSWYQRNRL

SEQ ID NO: 188373 - protein, 119 aa, Zea Mays
MEIKCSSQVTTLKSLHLLQITTCSTHELDLLATSSLEVNSSFKFFRLETVSWHADNSEDRISFLLVSRARDFCILTSLSCSSYNMSSCFSKSLSFSFKASVSSLIFSTLALSNPLNRLE

SEQ ID NO: 188374 - protein, 263 aa, Zea Mays
MASSSDEQSKPPEPPAAAAVVTAAAPPQTHAEWVASLQAYYAAAGHPYAWPAQHLMAAAAAGAHFGTPVPFPVYHPGAAAAYYAHASMAAGVPYPTCEAVPAVALPTVPEGKGKGKGGGASPEKGSSGAPSGEDASRSDDSGSDESSETRDDDTDHKDSSAPKKRKSGNTSAEGEPSQATVVRYAAVESPYPAKGRSASKLPVSAPGRAALPSATPNLNIGMDIWNASPALAVPAVQGEVSPGLALARRDGVTQLFLISSGRT

SEQ ID NO: 188375 - protein, 285 aa, Zea Mays
MASSSDEQSKPPEPPAAAAVVTAAAPPQTHAEWVASLQAYYAAAGHPYAWPAQHLMAAAAAGAHFGTPVPFPVYHPGAAAAYYAHASMAAGVPYPTCEAVPAVALPTVPEGKGKGKGGGASPEKGSSGAPSGEDASRSDDSGSDESSETRDDDTDHKDSSAPKKRKSGNTSAEGEPSQATVVRYAAVESPYPAKGRSASKLPVSAPGRAALPSATPNLNIGMDIWNASPALAVPAVQGEVSPGLALARRDGVTQLDEREIKRERRKQSNRESARRSRLRKQSARS

SEQ ID NO: 188376 - protein, 550 aa, Zea Mays
MGPPPQFQPLPSHSHIMQDEDIDRPLLSENQSDHSRQNISFLGSSVGEPSKIQTNRSNTSPRSHAIADTGRIYPAECCVTQGETHVINVENDTSEEFQLGSTLRRTPPPKWPTPDQKHRRRVSGDDNHNGSVPLKDNTYHSRLDLEVIAGPSHGISCSRQSSRPSMLPITLGRVPPSDLVLKDSEVSGKHAQINWNGKTLKWELVDMGSLNGTFLNSQAVHHPSAGSRHWGEPAELAHGDIITLGTSSKLSVQILLQNQRVPAGVGMASDPMVARRSGKKLPMEDISFCQCPLQGVEHFGLFGIFDGHGGDGAAKAVSKILPEHLGYILSHPETKERVQSYSDASDVLRYAFTLTEDTIDHQYEGCTGTALLIWFDQNKDCFAQCANLGDSACVMSVNGKTIDMTEDHRVTSATERARIARTGQPLRDGEARLSGLNLARMFGDKFLKEQDPRFSSEPYVSQAVRITKACTAFAVIASDGLWDVISTKRAVQLVVEGKERRSSGDATSAAARVASRVLDEARSLRTKDNTSVIFVDFDVLRRDPCISPVD

SEQ ID NO: 188377 - protein, 284 aa, Zea Mays
MASDPMVARRSGKKLPMEDISFCQCPLQGVEHFGLFGIFDGHGGDGAAKAVSKILPEHLGYILSHPETKERVQSYSDASDVLRYAFTLTEDTIDHQYEGCTGTALLIWFDQNKDCFAQCANLGDSACVMSVNGKTIDMTEDHRVTSATERARIARTGQPLRDGEARLSGLNLARMFGDKFLKEQDPRFSSEPYVSQAVRITKACTAFAVIASDGLWDVISTKRAVQLVVEGKERRSSGDATSAAARVASRVLDEARSLRTKDNTSVIFVDFDVLRRDPCISPVD

SEQ ID NO: 188378 - protein, 332 aa, Zea Mays
MLPITLGRVPPSDLVLKDSEVSGKHAQINWNGKVQILLQNQRVPAGVGMASDPMVARRSGKKLPMEDISFCQCPLQGVEHFGLFGIFDGHGGDGAAKAVSKILPEHLGYILSHPETKERVQSYSDASDVLRYAFTLTEDTIDHQYEGCTGTALLIWFDQNKDCFAQCANLGDSACVMSVNGKTIDMTEDHRVTSATERARIARTGQPLRDGEARLSGLNLARMFGDKFLKEQDPRFSSEPYVSQAVRITKACTAFAVIASDGLWDVISTKRAVQLVVEGKERRSSGDATSAAARVASRVLDEARSLRTKDNTSVIFVDFDVLRRDPCISPVD

SEQ ID NO: 188379 - protein, 276 aa, Zea Mays
MLIPEGTQQRMLKSVLLGAPSSSSHRTSSSAPETRGDDGEGTSRSRRGPVPSQTELSASHVLKERRRREKLNEGFAMLRSLVPFVTKMDRASILGDTIEYVKQLRRRIQELESRARLVGSNQKTTMAQPPPPAASTEERGRRQTSGGYLARAGTCSRAAEASGNSNLGEEPPAAAASDTDTEVQVSIIGSDALLELRCPHREGLLLRVMQALHQELRLEITYVQASSAGDVLLAKLRAKVKEVHGRRSSTTEVKRAIHLIVSSDWNWICEKNPCVA

SEQ ID NO: 188380 - protein, 389 aa, Zea Mays
MADHDLTALMAAQLDRHLVFPLLEFLQERQLYSRLRSLDEAAAPLVAFLQNPQLVQELRPDKQYNIHMLQERYQIGPDQIEALYQYAKFQFECGNYSWAAEYLYQYRALCTDTERSVSALWGKLAAEILMQNWDVALEEFNRLKEIIDSKNFSSPLNQLQNRIWLMHWALFIFFNHENGRNGIIDLFFQDRYLNAIQTNAHHLLRYLATAVVVNKRRRNMLKELIKVIQQEQHSYKDPITEFLQCLYVNYDFDGAQQKLVECEQVILNDPFLGKRVEEGNFVTVPLRAEFLENARLFIFETYCRIHRCIDISMLAQRLNMSYDEAELWIMNLVRSSKLDARIDSVSGTLIMTTNHINVHEQIIESMKGLNMRTYMLAKNIVEPAQQAAR

SEQ ID NO: 188381 - protein, 431 aa, Zea Mays
MADHDLTALMAAQLDRHLVFPLLEFLQERQLYSRPEILEAKIRLLSGTNMVDYAMDIHKSLHGTDDVPEDMVKRRSEVVSRLRSLDEAAAPLVAFLQNPQLVQELRPDKQYNIHMLQERYQIEALYQYAKFQFECGNYSWAAEYLYQYRALCTDTERSVSALWGKLAAEILMQNWDVALEEFNRLKEIIDSKNFSSPLNQLQNRIWLMHWALFIFFNHENGRNGIIDLFFQDRYLNAIQTNAHHLLRYLATAVVVNKRRRNMLKELIKVIQQEQHSYKDPITEFLQCLYVNYDFDGAQQKLVECEQVILNDPFLGKRVEEGNFVTVPLRAEFLENARLFIFETYCRIHRCIDISMLAQRLNMSYDEAELWIMNLVRSSKLDARIDSVSGTLIMTTNHINVHEQIIESMKGLNMRTYMLAKNIVEPAQQAAR

SEQ ID NO: 188382 - protein, 360 aa, Zea Mays
MADHDLTALMAAQLDRHLVFPLLEFLQERQPDKQYNIHMLQERYQIGPDQIEALYQYAKFQFECGNYSWAAEYLYQYRALCTDTERSVSALWGKLAAEILMQNWDVALEEFNRLKEIIDSKNFSSPLNQLQNRIWLMHWALFIFFNHENGRNGIIDLFFQDRYLNAIQTNAHHLLRYLATAVVVNKRRRNMLKELIKVIQQEQHSYKDPITEFLQCLYVNYDFDGAQQKLVECEQVILNDPFLGKRVEEGNFVTVPLRAEFLENARLFIFETYCRIHRCIDISMLAQRLNMSYDEAELWIMNLVRSSKLDARIDSVSGTLIMTTNHINVHEQIIESMKGLNMRTYMLAKNIVEPAQQAAR

SEQ ID NO: 188383 - protein, 224 aa, Zea Mays
MHWALFIFFNHENGRNGIIDLFFQDRYLNAIQTNAHHLLRYLATAVVVNKRRRNMLKELIKVIQQEQHSYKDPITEFLQCLYVNYDFDGAQQKLVECEQVILNDPFLGKRVEEGNFVTVPLRAEFLENARLFIFETYCRIHRCIDISMLAQRLNMSYDEAELWIMNLVRSSKLDARIDSVSGTLIMTTNHINVHEQIIESMKGLNMRTYMLAKNIVEPAQQAAR

SEQ ID NO: 188384 - protein, 175 aa, Zea Mays
MCDLVARTGRHLQRYENGRRLVAGYRDINDGASDDEQKKLVEVLMISSQSGPGLLFPKGGWENDETVEEAAAREAIEEAGVRGDLVQLLGFYDFKSKQPEATCRAAIFALHVKEELASWPEQSTRQRSWLTVPEAAERSRYPWMQEALVTGFSAWLENWRNGGGGGGGCVDRTER

SEQ ID NO: 188385 - protein, 392 aa, Zea Mays
MGCGPSKEDAEGGAESRCRERKHLLSAAVHARHALAGAHAGHTAALKNVGAALSDYAAGETDRHDAVLVPRSASAAAALSAGQGSAATVVKALPSPLDALLPPPPPPGAGDGDGDDGGHTTLHRSMSAPDIQLQPPIRKGRSGEAPIMEEDGEGDAPGDDAGRRREDDDPQLQPPPPPPPPANNPPPSRSPPPVPAAKANLERATAEGNSWKDYLFGSPDAMPGPPPTLDPSASAAAESSWAAERRMPAPPPPPPESDQQPTKQPQPVPSAEEIAEGKKPAAELVTRRARKPEGKKGRVVMVTPQPARLGDILRRLDDEFLKASQGAHEVSKMLEAARMHYHSNFAETRVRHRGMFIKYSFLWGRGGVGATLRRICGSFCKSDASHHLESLI

SEQ ID NO: 188386 - protein, 440 aa, Zea Mays
MGCGPSKEDAEGGAESRCRERKHLLSAAVHARHALAGAHAGHTAALKNVGAALSDYAAGETDRHDAVLVPRSASAAAALSAGQGSAATVVKALPSPLDALLPPPPPPGAGDGDGDDGGHTTLHRSMSAPDIQLQPPIRKGRSGEAPIMEEDGEGDAPGDDAGRRREDDDPQLQPPPPPPPPANNPPPSRSPPPVPAAKANLERATAEGNSWKDYLFGSPDAMPGPPPTLDPSASAAAESSWAAERRMPAPPPPPPESDQQPTKQPQPVPSAEEIAEGKKPAAELVTRRARKPEGKKGRVVMVTPQPARLGDILRRLDDEFLKASQGAHEVSKMLEAARMHYHSNFAETRGFVDHSARVMQAITWNRSFKGIPPPENVKNELADDEWETHATVLDKLLAWEKKLCHEVKEFEVIKVTYQRKLAVLNKKKQSGASSSSKLIV

SEQ ID NO: 188387 - protein, 72 aa, Zea Mays
MEEHKIIRARALTPLHKPNSVTMRFIFELKDSPDFKPQVWAKYLQCSRRNVAPALTVSPTRLRWRRERLFGG

SEQ ID NO: 188388 - protein, 445 aa, Zea Mays
MSSLMPVLDGWVKIGNRLERDKVNMVLFHLRKQRMYNKALKFVEWIERRKLLNFEERDYASHLDLIARNYGVEAAQKYIERVPEAFRSEVLYETLLVNCVCRDDAQKAEQVFNEIRELSLPLTISACNQMLLLYKRVSRNKVVDILTLMEKENIKYSIFTYKLMIDLKVRSNDILGMEQVLNSMKENGLEPNFTIQTMVAKFYISGCFTEKAEEVINAMEVHVKANRHAVRSLLDLYAILGRPVDVERVWNLCAEPKLEDFLAAIKAWSKLGHIERAEEIFDVLVKTFPKLTSKYFNAMLEVYAENKLLDKSKKFIERMCLDGCTIGPLTWDAVVKLYVNLGELSKADSFLMNVTEDNPDRHPLFSSYVILLKAYAEKGDIHNAEKIFDRVKQTNFPARTLPYNLLLAAYASAQVTPYGFRERMKADKFSPGKSQIEQLKQLDSL

SEQ ID NO: 188389 - protein, 316 aa, Zea Mays
MLLLYKRVSRNKVVDILTLMEKENIKYSIFTYKLMIDLKVRSNDILGMEQVLNSMKENGLEPNFTIQTMVAKFYISGCFTEKAEEVINAMEVHVKANRHAVRSLLDLYAILGRPVDVERVWNLCAEPKLEDFLAAIKAWSKLGHIERAEEIFDVLVKTFPKLTSKYFNAMLEVYAENKLLDKSKKFIERMCLDGCTIGPLTWDAVVKLYVNLGELSKADSFLMNVTEDNPDRHPLFSSYVILLKAYAEKGDIHNAEKIFDRVKQTNFPARTLPYNLLLAAYASAQVTPYGFRERMKADKFSPGKSQIEQLKQLDSL

SEQ ID NO: 188390 - protein, 156 aa, Zea Mays
MGLAFGKLFSRLFAKKEMRILMVGLDAAGKTTILYKLKLGEIVTTIPTIGFNVETVEYKNISFTVWDVGGQDKIRPLWRHYFQNTQGLIFVVDSNDRDRVVEARDELHRMLNEDELRDAVLLVFANKQDLPNAWTGCPATLRARLEAYLECQPRTD

SEQ ID NO: 188391 - protein, 152 aa, Zea Mays
MGLAFGKLFSRLFAKKEMRILMVGLDAAGKTTILYKLKLGEIVTTIPTIGFNVETVEYKNISFTVWDVGGQDKIRPLWRHYFQNTQGLIFVVDSNDRDRVVEARDELHRMLNEDELRDAVLLVFANKQDLPNAMNAAEITDKLGLHSLRQRH

SEQ ID NO: 188392 - protein, 155 aa, Zea Mays
MLPKFRSFVRPIIRSFVRSFVQIIFSCRYAAEILIVRSSDHSIVRPFVHSSHSSFIVRSYELFTITIHHYYSSLLFIVTIHIHYSSSLLFIIAIHHRYYSSMISIVTFPSPLFIVTNHRYYSSIIRSPQISTTHPSCCPVHLRPARPIFQSYGLR

SEQ ID NO: 188393 - protein, 227 aa, Zea Mays
MPCCPPSLLGVGPRLRSFLRDYDALQSLALVLIYLQIGCALIGSLGALFNGVLVINLVIGLFAVVAIESSSQRLGRTYAVLLFFAVVLDVAWFILFSHAIWTINPDDKYGQLFVFSLRLALWMQIIGFSVRFLSSFLWIQMYRLGPSFTTPTYFETNHEARTSFLSPRSDSVRRNSMADDILGGSIYDPSYYSSLFEDVRNNACNHQVLPSSFWHTVLFIQIQCLTY

SEQ ID NO: 188394 - protein, 83 aa, Zea Mays
MHLNSCLPAAPLGMLLHPYRLSALCAPTIRRACLWNLRHRRSCTGRGHIRFLGSTLHDCSTLSSTCRQGFSGRLMSSSTMGRY

SEQ ID NO: 188395 - protein, 247 aa, Zea Mays
MSGLYSQGFSPARTLSPQIRSNPDADSQYLAELLAEHQKLGPFMQVLPICSRLLNQEIMRVSSMVHDHGFSDLDRRRFRSPSPMSSPIVRPNLHGNGFGPWNGMHQERLGFPPPGTSMDWQGAPPSPGSYIVKKIVRLEVPVDSYPNFNFVGRILGPRGNSLKRVEASTGCRVFIRGKGSIKDTEKEEKLKGKPGYEHLNEPLHILIEAELPANIVDTRLRQAQEVMEELLKPVPTTKGNVLLYPET

SEQ ID NO: 188396 - protein, 379 aa, Zea Mays
MARFTLFCSGMSACDEDATILCTSKVRARAPPSTSLTPPKHGKAEEAEQSFVGASMAGTWVKKGAGPGARSSHAITLLGGTAYSFGGELTPRVPVDSTMYAFDLNTQTWSALDATGDVPPPRVGVTMAAAGGTVFTFGGRDLEHKELNELYAFDAATRAWTLLSSGADGPPHRSYHSMAADAGAGRVYVFGGCGDAGRLNDLWAYDVAAGQWEQLPPPGEACQPRGGPGLVVAGGKVWVVYGFSGEELDDVHCYDPATREWAAVQTTGDRPSPRSVFCAAGFGRHVVLFGGEVDPSDLGHLGAGKFSAEAFALDTETGAWTRLDDRAEAEHHPGPRGWCAFTAGEKDGQRGLLVYGGNSPTNDRLGDIYFFTPVLEAAS

SEQ ID NO: 188397 - protein, 72 aa, Zea Mays
MIKDYLNWPHALDMGQGKLEPGYSIHEKTIAHWEWRDGESGTYPPGKGPPKKGGVLSGGADLFMQWRIRGNG

SEQ ID NO: 188398 - protein, 63 aa, Zea Mays
MAVAATNPPMRCHHARAARQIHKSCLPYCALIHGVAAIRSSSTAISPSAPHRSPNNNKTSRGF

SEQ ID NO: 188399 - protein, 277 aa, Zea Mays
MASPAIPFAPLTSHRAAPFVLGCPPPWPPPPPPAARPRPPPPRPDAAAAARLLEEEAGAGSSRARSPGGPELESMVLDLNAESPTPGSASAASSSSVVVGGGFFRFDLLGGTPDEEGCSPSPPIVTRQLFPLPYPDAAGSTAASTASNGSPPPEVAGAWARRPADLGAPALAQGKVMSAPSSPAVLSPAAGKKSRRGPRSRSSQYRGVTFYRRTGRWESHIWDCGKQVYLGGFDTAHAAARAYDRAAIKFRGLDADINFQLKDYEDDLKQVHLPWSI

SEQ ID NO: 188400 - protein, 598 aa, Zea Mays
MASPAIPFAPLTSHRAAPFVLGCPPPWPPPPPPAARPRPPPPRPDAAAAARLLEEEAGAGSSRARSPGGPELESMVLDLNAESPTPGSASAASSSSVVVGGGFFRFDLLGGTPDEEGCSPSPPIVTRQLFPLPYPDAAGSTAASTASNGSPPPEVAGAWARRPADLGAPALAQGKVMSAPSSPAVLSPAAGKKSRRGPRSRSSQYRGVTFYRRTGRWESHIWDCGKQVYLGGFDTAHAAARAYDRAAIKFRGLDADINFQLKDYEDDLKQMRNWTKEEFVHILRRQSTGFARGSSKYRGVTLHKCGRWEARMGQLLGKKYIYLGLFDSEIEAARAYDRAAIRFNGPDAVRNFDSVSYDGDVPLPPAIEKDAVVDGDILDLNLRISQPNVHDLRSDGTLTGFGLSCNSPEASSSIVSQPMGPQWPVHPHSRSMRPQHPHLRRLCRKRRTGPSRRVPSRSPPGHGKRRAPVPQFSLPPLQHHQDSLPPLPPAWTRPQPATACRRRLVASGSSRATTSSASPQPPDGDRPPPVELAAAAASHSWPVVGWLPMQRHAGGCGSVFGNSRHCWVWFCGTTEDAVISRCCCVLSLSLPLPTHTCL

SEQ ID NO: 188401 - protein, 114 aa, Zea Mays
MRNWTKEEFVHILRRQSTGFARGSSKYRGVTLHKCGRWEARMGQLLGKKYIYLGLFDSEIEAARAYDRAAIRFNGPDAVRNFDSVSYDGDVPLPPAIEKDGTIGLLYLVLHGVH

SEQ ID NO: 188402 - protein, 265 aa, Zea Mays
MRNWTKEEFVHILRRQSTGFARGSSKYRGVTLHKCGRWEARMGQLLGKKYIYLGLFDSEIEAARAYDRAAIRFNGPDAVRNFDSVSYDGDVPLPPAIEKDAVVDGDILDLNLRISQPNVHDLRSDGTLTGFGLSCNSPEASSSIVSQPMGPQWPVHPHSRSMRPQHPHLYASPCPGFFVNLREAPMQEEENRSEPACPQPFPSWAWQTQGSRAPVLPATTAASSGFSTAAATGVDAATAGHSVPPPSGSLRQFSGYHQLRFPPTA

SEQ ID NO: 188403 - protein, 106 aa, Zea Mays
MHPTSFMSPHPTHSLPSPSSALLQTPRTSASHSARPWSTIAVHRNLGPIPRPSSSFRHAHCSAVSPPPLIRALAVFSPSLKRSKAVSQELVAIESAYPQLHFPRGA

SEQ ID NO: 188404 - protein, 143 aa, Zea Mays
MSLVETIMVVTLATFRRSSSAPSRRRWRSSDNSRRCRWHRGPPGALPSSLLGYEALTGSLDDSRFEDYLHRLNQDCEHIVLLRQFCRTTFVHPPFVDLSASTLCGSSTHCSCHMCSNSFFQMSRGGSCFYSELVIWRRSSVEC

SEQ ID NO: 188405 - protein, 58 aa, Zea Mays
MLYLFTTTFMGRNSHSHLQLGGVLQRLQGGDGDQATTREGAGGIEGNNSHPVTILVDR

SEQ ID NO: 188406 - protein, 259 aa, Zea Mays
MASLVVRAAGAAAAAARLPSLRPRRNGSGVLSGLRVGTGHYGARLALASSTASHKEFKIACLTVDDSSLGPGDEYESDPRMPGEDEFDHFYRVLAKKTDNLLSCYIPMPLALSEEEKAVQKEFKLIASGCIDLLVGAMRRTPAEKRRPLFLVFGELYPVFEFVRWTAEAGCAKWWMALQIIEKLEIVRKMVSSAFGGAPVDRSMVFARKVDLTGVDGEALAGHGLGSNLSVVIFVLMDSVFSNVKSDIDAMVSAASTPY

SEQ ID NO: 188407 - protein, 402 aa, Zea Mays
MPSFSWMHLYASHKEFKIACLTVDDSSLGPGDEYESDPRMPGEDEFDHFYRVLAKKTDNLLSCYIPMPLALSEEEKAVQKEFKLIASGCIDLLVGAMRRTPAEKRRPLFLVFGELYPVFEFVRWTAEAGCAKWWMALQIIEKLEIVRKMVSSAFGGAPVDRSMVFARKVDLTGVDGEALAGHGLGSNLSVVIFVLMDSVFSNVKSDIDAMVSDPCRMADEDVQEFDHYYRHLAKRAAKLHAIYPPELPKPLSESEDEKAVQERFKEMANESIDLAAGAMRRIPAEKWRPLISVFAYVFLVFVRVRWYAERGCAKWWMAPQIIEGLQTVRRMVSSACGGTPLDIDKVFDRMVALSGVSVQAAPGGHGVVGSNDLSEVIFALIDNVFGNVKSDIYDMVSASTPC

SEQ ID NO: 188408 - protein, 254 aa, Zea Mays
MVSHILGLMGVSRLKEHLGHIYGSMKACRKVPNHVKDIMSQKVTDGRIRRARGNKLCLFVEKEVSATRHDYRSARISLDEQAQIDMAMRNSMRDSFSTLEHDSCPPFGKSMGSATRAASCSTGKQSRLSSYYKNTLDTSRGPFDIDLAHSRTQVQPLIDVMLEKGHKEKLGISLAKWFHANDIPGRKVDCPYFRSTLNLAQQLGDGVPIPRGREIDGPLLDMNYVDMEAHMDWKDYGVTVMCDSWTAAALNPEA

SEQ ID NO: 188409 - protein, 150 aa, Zea Mays
MQVINRRLDCMLNDTLMLAAAALNPEALYTSKMARKPKFQHAVTMAIKKLSSSSSKASAAIDQYTFFRKQAGLFGGEEAKYSALNGRASAGGGDDEDGELSGPCFAARTQPKLATDQYIGPGQDEETTPLCPRSKRQKKLSIKGLHMLEK

SEQ ID NO: 188410 - protein, 88 aa, Zea Mays
MVFILYFNSIFFRLAYTDINFNSLSVEVSVMVLEDTCVANLEMQSQQEQLGVSIISMSPNVTLLFVNRAQKRAQVTALKPMLVLEVDQ

SEQ ID NO: 188411 - protein, 65 aa, Zea Mays
MLADYTLSGLVKLIMLHLDHRLSNTTKKSDSGLVISDVLKSRFRVIGDGDRGRMYSLWSMMLGSP

SEQ ID NO: 188412 - protein, 73 aa, Zea Mays
MLADYTLSGLVKLIMLHLDHRLSNTTKKSDSGLVISDVLKSRLFFTRTNILVYCLGLGSLEMAIVAGCILFGV

SEQ ID NO: 188413 - protein, 154 aa, Zea Mays
MLIAAIGHRFSFSYKEYAGSNARPFGGFRGSLLHAMKFNDFYHDTVHQFAPTYHEYVLYSNEGEDEPTKYSPSTMVPTGEHIVELAEVTVVNSKAPGMSRFLMYEPDQAETMPSQVMEANRTASAEPYDLSSFLNVELSDHPDEVPAIPDAREQ

SEQ ID NO: 188414 - protein, 369 aa, Zea Mays
MMLRTTKSYSSVGVKVYAVMSFLSLVLPHQAIYFNSIREIYDAWVIYNFFSLCLAWVGGPGNVVVSLNGQSLKPSWLLMTCCLPAIPLDGRFIRRCKQGCLQFVILKPILVVITFILYAKGKYEDGNFSVNQSYLYITIIYTISYSMALFALALFYAACRDLLQPYNPVPKFIIIKSVVFLTYWQGVLVFLAAKSGFIKNAEKAAYLQNFVLCVEMLIAAIGHRFSFSYKEYAGSNARPFGGFRGSLLHAMKFNDFYHDTVHQFAPTYHEYVLYSNEGEDEPTKYSPSTMVPTGEHIVELAEVTVVNSKAPGMSRFLMYEPDQAETMPSQVMEANRTASAEPYDLSSFLNVELSDHPDEVPAIPDAREQ

SEQ ID NO: 188415 - protein, 223 aa, Zea Mays
MALFALALFYAACRDLLQPYNPVPKFIIIKSVVFLTYWQGVLVFLAAKSGFIKNAEKAAYLQNFVLCVEMLIAAIGHRFSFSYKEYAGSNARPFGGFRGSLLHAMKFNDFYHDTVHQFAPTYHEYVLYSNEGEDEPTKYSPSTMVPTGEHIVELAEVTVVNSKAPGMSRFLMYEPDQAETMPSQVMEANRTASAEPYDLSSFLNVELSDHPDEVPAIPDAREQ

SEQ ID NO: 188416 - protein, 57 aa, Zea Mays
MSSHAKSILPRGARQMFDGTSNLIIVADSGDFRVYLIAVSTRRLYSICFTSKLIMVS

SEQ ID NO: 188417 - protein, 296 aa, Zea Mays
MYSTRVVISNLTFINSPFWNIHPVYCSQVLVQHLTILAPISSPNTDGIDPDSSTNVCIEDCYVRNGDDIIVIKSGWDEYGISFAHPSSNISIRNITGQTRNSAGLAFGSEMSGGISDVRAEGVRIVNSVHGIRIKTAPGRGGYVKNVYVADVSFDNVSIAIRITGNYGEHPDDGYDRNALPTISNITIKDVVGVNIGVAGMLQGIPGDSFSGICLSNVSLSVRSTDPWNCSLVEGYSSSVSPEVCEQLRATPGPGSGQMCYGGNYPAAAAQPQPPQKSGASRLVSPFLSISWFLRR

SEQ ID NO: 188418 - protein, 72 aa, Zea Mays
MPNGTRQRKNSKARLVLLLSPQLVWRSCIRCQWTDLTLTWPWGIQKGGRGFQVPDDRKSAYLEAVAQSKEIQ

SEQ ID NO: 188419 - protein, 180 aa, Zea Mays
MRRHGSATPVTDTHSTSSCTAATVAEESVPKNVSVAFLERLKDDFMKRYGGGKADTALAKCLNKEYGQVIKQHIQYVLDHSEELDKMLKVQAQVSEVKNIMLDSIEKTLGRGEKLSELQDKTSELHIQAQQFKKQGVKIRRKTWLQNMKIKLVILGILLLLVIIVWVSICQGFDCTKHET

SEQ ID NO: 188420 - protein, 249 aa, Zea Mays
MVSPTPGGKDAREGGGKAEWMIYAFVARGTAVLAEYTEFTGNFPAIAAQCLQRLPAGSSSAGTGPDGRGDAPARFSYACDRHTFNFLLYRGYVAEESVPKNVSVAFLERLKDDFMKRYGGGKADTALAKCLNKEYGQVIKQHIQYVLDHSEELDKMLKVQAQVSEVKNIMLDSIEKTLGRGEKLSELQDKTSELHIQAQQFKKQGVKIRRKTWLQNMKIKLVILGILLLLVIIVWVSICQGFDCTKHET

SEQ ID NO: 188421 - protein, 435 aa, Zea Mays
MASSSSSSSSSSSSSSSSRFLLPLLLLCSHLSLASAEEAASAAADLLSEARAPGFAAWLRGVRRRIHQRPELAFQEFRTSELVRAELDAIGVPYRWPVAQTGVVATIAGAAAGPVVALRADMDALPVQELVDWEHKSQESGKMHACGHDVHTTMLLGAARILQDRKSDLMPAEEGQGGAYYVLQEGVLDDASAIFGLHVDPALPVGVVSSRPGPFAATSGRFLATVTGKGGHAAMPHESIDPVVAAATTVVSLQKIISREIDPLQGAVVSVTFLKGGEAYNVIPENVAFGGTMRSMTNEGLSYLKKRIKEIVEGQAAVHHCSASVDFMEDTMKPYPAVVNDEGMYAHAKEVAEGLLGEKNVRVGPQVMGAEDFGFYAQRMAGAFFTIGVGNASTMATIHSTHSPHFVVDEDVLPVGAAFHAAVAIEYVRKNRAST

SEQ ID NO: 188422 - protein, 438 aa, Zea Mays
MASSSSSSSSSSSSSSSSRFLLPLLLLCSHLSLASAEEAASAAADLLSEARAPGFAAWLRGVRRRIHQRPELAFQEFRTSELVRAELDAIGVPYRWPVAQTGVVATIAGAAAGPVVALRADMDALPVQELVDWEHKSQESGKMHACGHDVHTTMLLGAARILQDRKSDLMGTVKLVFQPAEEGQGGAYYVLQEGVLDDASAIFGLHVDPALPVGVVSSRPGPFAATSGRFLATVTGKGGHAAMPHESIDPVVAAATTVVSLQKIISREIDPLQGAVVSVTFLKGGEAYNVIPENVAFGGTMRSMTNEGLSYLKKRIKEAAVHHCSASVDFMEDTMKPYPAVVNDEGMYAHAKEVAEGLLGEKNVRVGPQVMGAEDFGFYAQRMAGAFFTIGVGNASTMATIHSTHSPHFVVDEDVLPVGAAFHAAVAIEYVRKNRAST

SEQ ID NO: 188423 - protein, 439 aa, Zea Mays
MASSSSSSSSSSSSSSSSRFLLPLLLLCSHLSLASAEEAASAAADLLSEARAPGFAAWLRGVRRRIHQRPELAFQEFRTSELVRAELDAIGVPYRWPVAQTGVVATIAGAAAGPVVALRADMDALPVQELVDWEHKSQESGKMHACGHDVHTTMLLGAARILQDRKSDLMLVFQPAEEGQGGAYYVLQEGVLDDASAIFGLHVDPALPVGVVSSRPGPFAATSGRFLATVTGKGGHAAMPHESIDPVVAAATTVVSLQKIISREIDPLQGAVVSVTFLKGGEAYNVIPENVAFGGTMRSMTNEGLSYLKKRIKEIVEGQAAVHHCSASVDFMEDTMKPYPAVVNDEGMYAHAKEVAEGLLGEKNVRVGPQVMGAEDFGFYAQRMAGAFFTIGVGNASTMATIHSTHSPHFVVDEDVLPVGAAFHAAVAIEYVRKNRAST

SEQ ID NO: 188424 - protein, 334 aa, Zea Mays
MAPPPWPLLATSLLLILFHHSPRAAVAFPPSLGDSLLGAARAPGFAAWLRGLRRRIHERPELAFQEHRTSELVRDELDAIGVPYAWPVAQTGVVATIAGGSDGPVVALRADMDALPLQELVDWEHKSKESGKMHACGHDAHTTMLLGAAKLLHARKDDLKGTVKLVFQPGEEGYGGAYHVLREGVLDDVSAIFGLHVDPGLPVGTVSSRPGPFLAAAGRFRVTVTGKGGHAAGPQDAVDPIVAASSAIVSLQLLVAREIDPLQAAVVSVTFMKGGDAYNVIPESASFGGTFRSLTTEGFSYLMKRIKEKVMPPSTAAPPPSTSCRRSSARTQPP

SEQ ID NO: 188425 - protein, 1091 aa, Zea Mays
MEASAGLVAGSHNRNELVVIRRDRESGAAGGGAARRAEAPCQICGDEVGVGFDGEPFVACNECAFPVCRACYEYERREGSQACPQCRTRYKRLKGCPRVAGDEEEDGVDDLEGEFGLQDGAAHEDDPQYVAESMLRAQMSYGRGGDAHPGFSPVPNVPLLTNGQMVDDIPPEQHALVPSYMSGGGGGGKRIHPLPFADPNLPVQPRSMDPSKDLAAYGYGSVAWKERMEGWKQKQERLQHVRSEGGGDWDGDDADLPLMDEARQPLSRKVPISSSRINPYRMIIVIRLVVLGFFFHYRVMHPAKDAFALWLISVICEIWFAMSWILDQFPKWLPIERETYLDRLSLRFDKEGQPSQLAPIDFFVSTVDPTKEPPLVTANTVLSILSVDYPVEKVSCYVSDDGAAMLTFEALSETSEFAKKWVPFSKKFNIEPRAPEWYFQQKIDYLKDKVAASFVRERRAMKREYEEFKVRINALVAKAQKVPEEGWTMQDGSPWPGNNVRDHPGMIQVFLGQSGGRDVEGNELPRLVYVSREKRPGYNHHKKAGAMNALVRVSAVLSNAAYLLNLDCDHYINNSKAIKEAMCFMMDPLVGKKVCYVQFPQRFDGIDKNDRYANRNVVFFDINMKGLDGIQGPIYVGTGCVFRRQALYGYDAPKTKKPPSRTCNCWPKWCLSCCCSRNKNKKKTTKPKTEKKKRLFFKKAENPSPAYALGEIDEGADIEKAGIVNQQKLEKKFGQSSVFVASTLLENGGTLKSASPASLLKEAIHVISCGYEDKTDWGKEIGWIYGSITEDILTGFKMHCHGWRSIYCIPKRPAFKGSAPLNLSDRLHQVLRWALGSVEIFFSKHCPLWYGYGGGLKFLERFSYINSIVYPWTSIPLLAYCTLPAICLLTGKFITPELTNVASIWFMALFICISVTGILEMRWSGVAIDDWWRNEQFWVIGGVSAHLFAVFQGLLKVFAGIDTSFTVTSKAGDDEEFSELYTFKWTTLLIPPTTLLLLNFIGVVAGISNAINNGYESWGPLFGKLFFAFWVIVHLYPFLKGLVGRQNRTPTIVIVWSILLASIFSLLWVRVDPFLAKSNGPLLEECGLDCN

SEQ ID NO: 188426 - protein, 1118 aa, Zea Mays
MEASAGLVAGSHNRNELVVIRRDRESGAAGGGAARRAEAPCQICGDEVGVGFDGEPFVACNECAFPVCRACYEYERREGSQACPQCRTRYKRLKGCPRVAGDEEEDGVDDLEGEFGLQDGAAHEDDPQYVAESMLRAQMSYGRGGDAHPGFSPVPNVPLLTNGQMVDDIPPEQHALVPSYMSGGGGGGKRIHPLPFADPNLPVQPRSMDPSKDLAAYGYGSVAWKERMEGWKQKQERLQHVRSEGGGDWDGDDADLPLMDEARQPLSRKVPISSSRINPYRMIIVIRLVVLGFFFHYRVMHPAKDAFALWLISVICEIWFAMSWILDQFPKWLPIERETYLDRLSLRFDKEGQPSQLAPIDFFVSTVDPTKEPPLVTANTVLSILSVDYPVEKVSCYVSDDGAAMLTFEALSETSEFAKKWVPFSKKFNIEPRAPEWYFQQKIDYLKDKVAASFVRERRAMKREYEEFKVRINALVAKAQKVPEEGWTMQDGSPWPGNNVRDHPGMIQVFLGQSGGRDVEGNELPRLVYVSREKRPGYNHHKKAGAMNALVRVSAVLSNAAYLLNLDCDHYINNSKAIKEAMCFMMDPLVGKKVCYVQFPQRFDGIDKNDRYANRNVVFFDINMKGLDGIQGPIYVGTGCVFRRQALYGYDAPKTKKPPSRTCNCWPKWCLSCCCSRNKNKKKTTKPKTEKKKRLFFKKAENPSPAYALGEIDEGAPGADIEKAGIVNQQKLEKKFGQSSVFVASTLLENGGTLKSASPASLLKEAIHVISCGYEDKTDWGKEIGWIYGSITEDILTGFKMHCHGWRSIYCIPKRPAFKGSAPLNLSDRLHQVLRWALGSVEIFFSKHCPLWYGYGGGLKFLERFSYINSIVYPWTSIPLLAYCTLPAICLLTGKFITPEYLVHGTFHLHLRDRHPGNEVEWRGHRRLVEERAVLGHRRRFGASVRGVPGPAEGVRRHRHELHRDVEGRGRRGVLGAVHVQVDHPADTPDHAPPAELHRGGGRDLERDQQRVRVVGPPVREALLRLLGDRPPVPVPQGSGGEAEQDADDRHRLVHPAGLDLLAPVGPRRPVPRQEQRPAPGGVWPGLQLKWGPPVTRSSVTGELRLIFCCCCCWNSLL

SEQ ID NO: 188427 - protein, 108 aa, Zea Mays
MEGPHGKKAPGGRIKGEPILFYIPFKFQARGRGFLRQRWRASVAAARGPSGVCCSVFFRAASIHGEDEETMPWCRRSASLPAPGVGRPWSSACRCQGHSSSISGKKNT

SEQ ID NO: 188428 - protein, 449 aa, Zea Mays
MDKSAMKIGPTGNKIRIRLPLSLRKRLAEGLQTMSTGLPEDTTKHAAKEVPEYTDDTAKANFIVPDLNLTIAAGTQDKRESICPVRKGSCEERHTDIMSNGLPPDSSETTKKQACVGAMDNTQSMEPSITGVQSEVEKNNSIKKPCEPASENILSKKLLYETNSNTSRKRVTEEAKINNPSKNLKTSAVKCGEANDCFLTRRSADQSNDKKFSKKLCSSAVQATDSCQNISGMKLPTSVGVAVEQSTSTAFSEATKVYKEFEKQVKRTVYLDNLSCLATDGVITTALNQFGSVKHVSFLTNYTVPFDIPKSALVEMETEKDADSVVKILDEFPFMISGMPRPVRAKHATAEMFNDRPCKPGIKLEFRWVGPTDPDYHNVRKFKFLSKRHELENLALIKNELREEQLLARHQQDNLNFHYMKLETVDSMITSGCINRLTHIYNLRFADMY

SEQ ID NO: 188429 - protein, 108 aa, Zea Mays
MEEVPGSCWARVYGVIGIPGSWQLGDGPASRSEPPIRGTARVPFSPRVVPKSTRRLINLPLNVYYARFCTFFIRRSRPRPYQSNRSPRLLLLQNRSDLRFPRSRTLPT

SEQ ID NO: 188430 - protein, 638 aa, Zea Mays
MNMEHAVFLFLVWLNTAAITTLCAGGGQTRFSYSGFAGANLTVDGNATVTPDGLLVLTSSKTNLQGHAFYHTPLQLSTSPGGKVASFAAAFVFAIVSDYTDFSAHGMAFVVAPNKGFPGALPAGYLALLNVQNNGNASNHLLAVELDTTQNTDFKDINANHVWVEYDGDAGRIDVTLAPIRVGNNKPARPLVSAICNLSTVLKEQSYVGFSSATGGINSRHYVLGWSFAMNGPAPAIDIARLPKLPPFGPKPRSKVLAIVLPIATAAAIVAVGSLATLLVLRKLRYAEVLEEWELEFGPHRFSFKDLYHATSGFKSKHLLGAGGFGQVYKGVLGSSKSVCTEVAVKRISHESRQGMKEFIAEVVSIGRLRHRNLAQLLGYCRRKGELLLVYEYMPNGSLDKYLYYREEENKPVLDWAQRFHIIKGVASALLYIHDKWEKVVIHRDVKASNVLLDSEMNGRLGDFGLARLYDHGTDPQTTHIVGTMGYLAPELIRTGRASKLTDVFAFGAFLLEITCGRRPVSIDDDAAQEMLVDWVLEHLREEGSLAHTVDVSLRGQYDVDEVFLVLKLGLLCSHPYTNIRPDMQQVMQYLDGSTPLPDLQPTDMTFSAMALMQNEGFDSYAMSIQSIGTISFISGGR

SEQ ID NO: 188431 - protein, 389 aa, Zea Mays
MQNDEFQDINDNHVGVDVNSLHSVQSYYAGYYGGGGGSGGFRNLTLISGEAMQVWVDYDAEVAQINVTMAPLSMAKPARPLVSARYNLSTILTDDGPAFVGFSAATGGTLKSRHYVLGWSFSIDRPAPAIDLSKLPKLPRVSAKDRTRTLEIVLPVATAAFLLAAGMAILLLVRRHRRYAELHEDWELEFGPHRFSYKDLFHATDGFKNSNLLGIGGFGRVYKGVLPASRTEIAVKRVSHESKQGMKEFISEIVSLGRLQHRNLVQLLGYCRRKGELLLVYDYMPNGSLDKCLHDREGQHTLDWALRVQIIKGVASGLSYLHLDWEKVVVHRDIKASNVLLDGDMNGRLGDFGLARLYDHGGADGPKTTHVVGTIGYIAPELGRTGRRQ

SEQ ID NO: 188432 - protein, 251 aa, Zea Mays
MAADAAQQGPGVHRRRGGAAPRAWCCSFAGVPDSPDLRPIPSSAASPAAASRKLPPKSPSAASFYGSPTSSRLAGLGGLIDPRRILSPGRVSPIDPDGAVPLPPPTPPPPPPAEFPAAVGTAEQPAPVLASALPSAAAAPQVVSVREEADAHAAGVLDLKLFLRGRDGRCVLMELDSRVLCGCSDFFAAMAPHEDAAATAAGAGAAGKTIEVDGVDNLDAFRAAVELMYDPDPMRGLAAAGVSRAIDVLEA

SEQ ID NO: 188433 - protein, 545 aa, Zea Mays
MAADAAQQGPGVHRRRGGAAPRAWCCSFAGVPDSPDLRPIPSSAASPAAASRKLPPKSPSAASFYGSPTSSRLAGLGGLIDPRRILSPGRVSPIDPDGAVPLPPPTPPPPPPAEFPAAVGTAEQPAPVLASALPSAAAAPQVVSVREEADAHAAGVLDLKLFLRGRDGRCVLMELDSRVLCGCSDFFAAMAPHEDAAATAAGAGAAGKTIEVDGVDNLDAFRAAVELMYDPDPMRGLAAAGVSRAIDVLEVCSSIMFSKGIKTCLTYIEAVPWNENEEEKLKNLFARFTFDEAISQDILARLRPHNWKSSDDLAVQLIQSVTNSTSTMARKDMQSLVNGLLSKSSVYQKDSSGLNKESLYQICYSCLESLVDLFEEAIEPTYYTGQAVVVRGSKPLIERISTQTENLNWLLDILVNIDIAEEFVELWAKQGRLIRMHEQASAIVRYELSRISAGVFIALGKGKVQCRGDVRSLLFHGWFSTMLLDFGWLQRCPKGLDLRSLEENLGRGLLTLPLRQQQCLFEEWFQFYATKGPECPNLIRAFQDY

SEQ ID NO: 188434 - protein, 332 aa, Zea Mays
MFSKGIKTCLTYIEAVPWNENEEEKLKNLFARFTFDEAISQDILARLRPHNWKSSDDLAVQLIQSVTNSTSTMARKDMQSLVNGLLSKSSVYQKDSSGLNKESLYQICYSCLESLVDLFEEAIEPTYYTGQAVVVRGSKPLIERISTQTENLNWLLDILVNIDIAEEFVELWAKQGRLIRMHEQASAIVRYELSRISAGVFIALGKGKVQCRGDVRSLLFHGWFSTMLLDFGWLQRCPKGLDLRSLEENLGRGLLTLPLRQQQCLFEEWFQFYATKGPECPNLIRAFQFFPLYVNSWMNLLEDNICGVEYVITQPSHMSNFCTFCSMTVNSV

SEQ ID NO: 188435 - protein, 62 aa, Zea Mays
MRSEQQRTEDILRYIQSATGVAPPPSLFTPNPPPSQFSTPNQSAASNDPHVLPTEPNCVRRL

SEQ ID NO: 188436 - protein, 447 aa, Zea Mays
MSTRREVVLYHPLPAPGVTNNLKDGIQSKVMETVGNAINSFDPNALPRHIEGALGTAGNLINSFEPKWSGKNEFDLNGEADFLDGYECPDEYWGSAPVKAHKPVNIKNLLGGVIAIIGRNLGNTEAEQPKDTKTSVSFLGSADDGNTFLHSSVYMPSAPPVLDEEALNYNIYRAVLEAEPPEWLPDSYASACMQCAALFTALTRGRHHCRFCGGIFCRACSKGRSLLPAKFRERNPQRVCDACYDRLDPLQNLLINSVSNASQTAKHDVMDWTCARGWLNFPIGLTMEHEIYKAANTLTSYSQVARINPEKSIPHAVLSGASGLAILTVVKAGAILTYKLGTGLVVARRSDGSWSAPSAILSAGFGWGAQVGGELMDFIIVLRGPEAVQTFCSRMHFSLGAGVSAAAGPVGRVAEADLRAGDKGSGVCYTYSCSKGNCCLTLYLSTF

SEQ ID NO: 188437 - protein, 447 aa, Zea Mays
METVGNAINSFDPNALPRHIEGALGTAGNLINSFEPKWSGKNEFDLNGEADFLDGYECPDEYWGSAPVKAHKPVNIKNLLGGVIAIIGRNLGNTEAEQPKDTKTSVSFLGSADDGNTFLHSSVYMPSAPPVLDEEALNYNIYRAVLEAEPPEWLPDSYASACMQCAALFTALTRGRHHCRFCGGIFCRACSKGRSLLPAKFRERNPQRVCDACYDRLDPLQNLLINSVSNASQTAKHDVMDWTCARGWLNFPIGLTMEHEIYKAANTLTSYSQVARINPEKSIPHAVLSGASGLAILTVVKAGAILTYKLGTGLVVARRSDGSWSAPSAILSAGFGWGAQVGGELMDFIIVLRGPEAVQTFCSRMHFSLGAGVSAAAGPVGRVAEADLRAGDKGSGVCYTYSCSKATFSRGMWNSQMLPNFFTLHWIIYTQGWIGSVHMYFEFFFRL

SEQ ID NO: 188438 - protein, 1553 aa, Zea Mays
MDATASDPSSGRRRQLQGPRPPRLAVNVESLKIKKPAVTRRLKTTEVIEVQLADFKAAVQRLTGLGAAVAATDYMDMKYTGPGPSMVSSPRVEFSDGSTAGCSSPPPSEKTVEEEGKKRGRRGEGRKRKEEEEEGRGRKRKKEEEERKKESPRPRLWLLSPTTTAVSASARARLAATERAIWPLSLPRPPTDYGEDADSLAAVLSLPGRPGILSPAALPPAAFSGQFSALPFDPSCLSWLKELTPFLPSASRCVEELECLFTLKRSTLLLPGMPCPATVSTFELFRDVLEIKSGNGEGAPAGHVGDAEQSLKAEPVGDPQVGVYSPSISRLFQQLVHVRTIISSFNGKLPSDAWFNHVKNLTSDAEESLEYLHYKMMLAKLGVGIEFKKVMPNVSGTCSKTTALSFMHLLASQELVFLPVTDKLEGLRPGSPGLTGVVLGNYSEILSLSSSVMRCILLCRGILGIINIVNMRLKKDSLELPAFAFDDLTYAGQNKGTGMNAHRVPAHMTDPIYLLPMFIRSLLCLDLSNCSGLTQLPASIGNLSNLVALNLSHCYSLHTLPASVGRLKNLQILVLSCCHELRILPVSLCELSKLRLLDLAGCSGLQNLPASLVNLCNLEILNLSYCKELKELPQPFGNLQELKYLNLSGSHRVDLDVECLYTLANLKSLTLSPLTNIQGFPGSFKDLANRLDSLRLWKNQIHPQCGPKAVSLHSYRCYEQSIIDMLLSDEADNSSNQIVTSACIVGESGMGKTELVHRIYNNRMILDTFDLRIWLHMCDKKRLLGKIVELTTFASCGDASISVLEEIVIEELASKRLLLVLDDSEIKDQYFWGYLWKLLNVCAKGSAVIVTTKSMVDANQTGAMQTFYLSPLSKEECFMIFKEHVLEDLVVNNYCQLESIGWKFAEKCGGNPMCIKALSGLLCHSEVGLSEIDMIVDGILPALRLCYDLLPAHLQQCFKFCSLFPKDYIFVKHHIIRLWIAEGLVFCEEGTKPEDTALHYFDQLFCRSFFQRSPFHSDHKDSFVMHELFHDLAHSVSKNECFRCEEPFCSLAENVSHLSLVLSDFKTTALSNEVRNLQSFLVVRRCFPVVRIFTLDDIFVKHRFLRALNLSYTDILELPISIGNMKHLRLLALNNTKIKSLPIEIGQVNSLQTLELKDCCHLIDLPGSISNLAKLRHLDVQKESGNIIVGMPHGIGYLTDLQTLTMFNIGNDMLHCSISELNNLNGLRGHVHVTRLENIMTANDAREANMMGKHLLEALTLEWSYQDEGMDDDMGKEIASEILQNLQPNSNIMELIIRNYAGDLFPVWMQDNYLCKLTSVTLDNCHGCSELPYLGDLPSLKSLFIQRINVVERFGIETSSLATEVKYPTRFPSLEVLNICEMYDLQFWVSTREEDFPRLFRLSISRCPKLTKLPRLISLVHVSFHYGVELPTFSELPSLESLKIEGFQKIRSISFPHQLTTLNKLEIIDCKELLSINAYSLSVSNFKVVRCLKLDLVGSSMEDHISHKVVNGRNILTRKHMVLKTLTHTNLLDDGSKWEKFGEKNIFGYIFPR

SEQ ID NO: 188439 - protein, 1276 aa, Zea Mays
MACRRKAPSPSVRGKSGNGEGAPAGHVGDAEQSLKAEPVGDPQVGVYSPSISRLFQQLVHVRTIISSFNGKLPSDAWFNHVKNLTSDAEESLEYLHYKMMLAKLGVGIEFKKVMPNVSGTCSKTTALSFMHLLASQELVFLPVTDKLEGLRPGSPGLTGVVLGNYSEILSLSSSVMRCILLCRGILGIINIVNMRLKKDSLELPAFAFDDLTYAGQNKGTGMNAHRVPAHMTDPIYLLPMFIRSLLCLDLSNCSGLTQLPASIGNLSNLVALNLSHCYSLHTLPASVGRLKNLQILVLSCCHELRILPVSLCELSKLRLLDLAGCSGLQNLPASLVNLCNLEILNLSYCKELKELPQPFGNLQELKYLNLSGSHRVDLDVECLYTLANLKSLTLSPLTNIQGFPGSFKDLANRLDSLRLWKNQIHPQCGPKAVSLHSYRCYEQSIIDMLLSDEADNSSNQIVTSACIVGESGMGKTELVHRIYNNRMILDTFDLRIWLHMCDKKRLLGKIVELTTFASCGDASISVLEEIVIEELASKRLLLVLDDSEIKDQYFWGYLWKLLNVCAKGSAVIVTTKSMVDANQTGAMQTFYLSPLSKEECFMIFKEHVLEDLVVNNYCQLESIGWKFAEKCGGNPMCIKALSGLLCHSEVGLSEIDMIVDGILPALRLCYDLLPAHLQQCFKFCSLFPKDYIFVKHHIIRLWIAEGLVFCEEGTKPEDTALHYFDQLFCRSFFQRSPFHSDHKDSFVMHELFHDLAHSVSKNECFRCEEPFCSLAENVSHLSLVLSDFKTTALSNEVRNLQSFLVVRRCFPVVRIFTLDDIFVKHRFLRALNLSYTDILELPISIGNMKHLRLLALNNTKIKSLPIEIGQVNSLQTLELKDCCHLIDLPGSISNLAKLRHLDVQKESGNIIVGMPHGIGYLTDLQTLTMFNIGNDMLHCSISELNNLNGLRGHVHVTRLENIMTANDAREANMMGKHLLEALTLEWSYQDEGMDDDMGKEIASEILQNLQPNSNIMELIIRNYAGDLFPVWMQDNYLCKLTSVTLDNCHGCSELPYLGDLPSLKSLFIQRINVVERFGIETSSLATEVKYPTRFPSLEVLNICEMYDLQFWVSTREEDFPRLFRLSISRCPKLTKLPRLISLVHVSFHYGVELPTFSELPSLESLKIEGFQKIRSISFPHQLTTLNKLEIIDCKELLSINAYSLSVSNFKVVRCLKLDLVGSSMEDHISHKVVNGRNILTRKHMVLKTLTHTNLLDDGSKWEKFGEKNIFGYIFPR

SEQ ID NO: 188440 - protein, 83 aa, Zea Mays
MGIFVDICILLPTFLYFKTTPNYNIERRKRKQYSISLTFLLLYSPPLCPCRRLVLDLKSKTFFPIHIDRTKSSHSQITCHHKL

SEQ ID NO: 188441 - protein, 155 aa, Zea Mays
MLDLQPSSTVNAASCRPRAPDAISAFSSISRTPFSSRCRAAGRAPDPHPSFACVHRAQPACAQVFAADVVEFAVLCVAGKLCEFARRRSARSNPGHGSRHALCRYAGPTLSSFFILVFASTSRGARPYTVAGRRRPCELSSHPSCSPPYDGWRGW

SEQ ID NO: 188442 - protein, 493 aa, Zea Mays
MPGLAARCARHQGRWSSGTRHDSVLFLRKRGRAHMESFLSVALGELVTRSINFIINKFSKPPTLAMEESLQRTLLRAQVIDEEAMGRHIPNQAMIQQLGMLRDAMHRGSYALDAFRYKPHYGEDDSVQVVSGFMSLSKLPFAKDPYFFSRTAQSREQLQEALDRLGSMIVDLNELVMFLASYPRLHRQPYSMHILLGNCMFGRQVEAELVINFLLHTQPHSSEELEVLPIIGPCRVGKSTLVAHVCKDERVQDHFSEILWLNDLAFTDDERAFRQGYAMEHQNQVSNWNKDKRSLVVIELSGNLHEDAWNRFYLACKRSFCSGSKIVVTSSSDRAAKFGTAQALALKHLSHEAYWYFFKTLAFGSMDPETHPRLAQVLRFFRVFVQKHVSRFGTHPYDLLNQNRPIRISRMGTASEYFTIHRQYHCSSQEEVPKIRVHDVVYGSMKTCRKFEVLSWRSPIPPYYSYANTYEIQERRTTSAKRKRSTEDGVTFC

SEQ ID NO: 188443 - protein, 459 aa, Zea Mays
MESFLSVALGELVTRSINFIINKFSKPPTLAMEESLQRTLLRAQVIDEEAMGRHIPNQAMIQQLGMLRDAMHRGSYALDAFRYKPHYGEDDSVQVVSGFMSLSKLPFAKDPYFFSRTAQSREQLQEALDRLGSMIVDLNELVMFLASYPRLHRQPYSMHILLGNCMFGRQVEAELVINFLLHTQPHSSEELEVLPIIGPCRVGKSTLVAHVCKDERVQDHFSEILWLNDLAFTDDERAFRQGYAMEHQNQVSNWNKDKRSLVVIELSGNLHEDAWNRFYLACKRSFCSGSKIVVTSSSDRAAKFGTAQALALKHLSHEAYWYFFKTLAFGSMDPETHPRLAQVLRFFRVFVQKHVSRFGTHPYDLLNQNRPIRISRMGTASEYFTIHRQYHCSSQEEVPKIRVHDVVYGSMKTCRKFEVLSWRSPIPPYYSYANTYEIQERRTTSAKRKRSTEDGVTFC

SEQ ID NO: 188444 - protein, 420 aa, Zea Mays
MPWTRTEGARVCYVVVAPASGGVSCSGWGNMMKQIFGRRKASKTADKEFTGGRTFSQLSGSGVADLSGQPPILSSTGHAYGSGNRTGFQDSRINDNLFSSNFRPLPSFKDVPNTEKQNLLIKKLDVCCTLFDFTDASKNMKEKEIKTLMLLEIDEYVRTANVKFPEIVVEAITKMISVNLFRTLISPPREKKALQAFDLEEDEPLMDPAWPHLYHVYELLLTFVQSPQNDAKLAKRYIDYSFILRLLDLFDSEDARERDRLKMVLHRIYGKFMVYRPFIRKAINNIFYQFIYETEKHNGIAELLEIFGSIINGFALPLKEEHKLFLVRTLIPLHKPRCTTMYHQQLSYCITQFVEKDCKLADSVIRGLIKYWPITNSTKEVLFLGELEEVLDATQPGEFQKCMVPLSHQIARCSNSPHFQ

SEQ ID NO: 188445 - protein, 65 aa, Zea Mays
MSRWRAVSLNDKSYKLFLSHIVLIQFVMVVNASESYQIPENAVTRWSHVWGFFYFIPRKKYFNFH

SEQ ID NO: 188446 - protein, 109 aa, Zea Mays
MAQRGELGRQLPLRGPLKALEADIHHANAMADAIQRNYGGACVQMRLSFSSLAPLFLYFIQWLDCGCCYALPSYLGLFHILICKVYADGDSSVSTYERRASLREFYGSL

SEQ ID NO: 188447 - protein, 54 aa, Zea Mays
MVTPSWRITRGDGGVRSGCVVTAGEDDQQCSRADDSWALVGSNYSPKSVESVRD

SEQ ID NO: 188448 - protein, 50 aa, Zea Mays
MMLHKVEVMAEVAYQDSKDLNHQTGNNFSSLVGGVHYCTSIATLVCRSIS

SEQ ID NO: 188449 - protein, 82 aa, Zea Mays
MILKALKRLYLWLKARTIKDVSAGSDLFEVEPTKWFPDRAASCMLCTILFRLKFLHLPSLLILWLFSKGRSLMPTGKILYIY

SEQ ID NO: 188450 - protein, 88 aa, Zea Mays
MDTPSPPDVFTDVPVCLLASRWDLDGLGLDADVILLSAHLFGVFYNYGGAEGRPSTWGTLRKPPLPLYRIMRRPFRDPAVSLTTPPPS

SEQ ID NO: 188451 - protein, 107 aa, Zea Mays
MVVGAHEGCSSSCIRRRRSRPRTPRQRTSSPRPLEISPLGESQQATVPISPVPWSWRRRGASGREKECGLATRARRRGGSCRRMWKDLSGSVLTETACGCIADQRRQ

SEQ ID NO: 188452 - protein, 318 aa, Zea Mays
MDKKFLEKVEAVRRSALEKKKAEENKDYQAIDYDAPIESDKSTIGFGTRVGIGVAVVIFGLVFAFGDFLPYGSVSPSKESAVVKQKLSQEEEEKFKNALQGFQATLSKSPNDPTALEGAAVSLSELGEYEKASTFLEKLIKVIPDKAEAYRLLGEVKFELKDYEGSSSSYRSALSSSDNIDFEVLRGLTNSLLAAKKPDEAVDIILLCRRKLNEKSQTGLADLEATNDNGRQKPQDIDPIQVDLLLGKAYSDWGHISDAISVYDKLITDHPEDFRGYLAKGIILKENGKAGDAERMFIQAKFFAPEAAKALVDRYAQR

SEQ ID NO: 188453 - protein, 371 aa, Zea Mays
MNIHQGWLQQFGHSVGISGSKMVLHMTHNVFSFRCFAANGRGFSADSTNKRKIKSKKRRKDVALESRSALEKKKAEENKDYQAIDYDAPIESDKSTIGFGTRVGIGVAVVIFGLVFAFGDFLPYGSVSPSKESAVVKQKLSQEEEEKFKNALQGFQATLSKSPNDPTALEGAAVSLSELGEYEKASTFLEKLIKVIPDKAEAYRLLGEVKFELKDYEGSSSSYRSALSSSDNIDFEVLRGLTNSLLAAKKPDEAVDIILLCRRKLNEKSQTGLADLEATNDNGRQKPQDIDPIQVDLLLGKAYSDWGHISDAISVYDKLITDHPEDFRGYLAKGIILKENGKAGDAERMFIQAKFFAPEAAKALVDRYAQR

SEQ ID NO: 188454 - protein, 298 aa, Zea Mays
MNIHQGWLQQFGHSVGISGSKMVLHMTHNVFSFRCFAANGRGFSADSTNKRKIKSKKRRKDVALESSEVISGNPRNRDQWVPELRTESENKSGKKVMDKKFLEKVEAVRRSALEKKKAEENKDYQAIDYDAPIESDKSTIGFGTRVGIGVAVVIFGLVFAFGDFLPYGSVSPSKESAVVKQKLSQEEEEKFKNALQGFQATLSKSPNDPTALEGAAVSLSELGEYEKASTFLEKLIKVIPDKAEAYRLLGEVKFELKDYEGSSSSYRSALSSSDNIDFEVLRGLTNSLLAAKKPDELI

SEQ ID NO: 188455 - protein, 281 aa, Zea Mays
MNIHQGWLQQFGHSVGISGSKMVLHMTHNVFSFRCFAANGRGFSADSTNKRKIKSKKRRKDVALESSEVISGNPRNRDQWVPELRTESENKSGKKVMDKKFLEKVEAVRRSALEKKKAEENKDYQAIDYDAPIESDKSTIGFGTRVGIGVAVVIFGLVFAFGDFLPYGSVSPSKESAVVKQKLSQEEEEKFKNALQGFQATLSKSPNDPTALEGAAVSLSELGEYEKASTFLEKLIKVIPDKAEAYRLLGEVKFELKDYEGSSSSYRSALSIILILKFSVD

SEQ ID NO: 188456 - protein, 165 aa, Zea Mays
MSALEKKKAEENKDYQAIDYDAPIESDKSTIGFGTRVGIGVAVVIFGLVFAFGDFLPYGSVSPSKESAVVKQKLSQEEEEKFKNALQGFQATLSKSPNDPTALEGAAVSLSELGEYEKASTFLEKLIKVIPDKAEAYRLLGEVKFELKDYEGSSSSYRSALSTNN

SEQ ID NO: 188457 - protein, 274 aa, Zea Mays
MNIHQGWLQQFGHSVGISGSKMVLHMTHNVFSFRCFAANGRGFSADSTNKRKIKSKKRRKDVALESSEVISGNPRNRDQWVPELRTESENKSGKKVMDKKFLEKVEAVRRSALEKKKAEENKDYQAIDYDAPIESDKSTIGFGTRVGIGVAVVIFGLVFAFGDFLPYGSVSPSKESAVVKQKLSQEEEEKFKNALQGFQATLSKSPNDPTALEGAAVSLSELGEYEKASTFLEKLIKVIPDKAEAYRLLGEVKFELKDYEGSSSSYRSALSTNN

SEQ ID NO: 188458 - protein, 213 aa, Zea Mays
MNIHQGWLQQFGHSVGISGSKMVLHMTHNVFSFRCFAANGRGFSADSTNKRKIKSKKRRKDVALESSEVISGNPRNRDQWVPELRTESENKSGKKVMDKKFLEKVEAVRRSALEKKKAEENKDYQAIDYDAPIESDKSTIGFGTRVGIGVAVVIFGLVFAFGDFLPYGSVSPSKESAVVKQKLSQEEEEKFKNALQGFQATLTLLRFREKKQH

SEQ ID NO: 188459 - protein, 169 aa, Zea Mays
MNIHQGWLQQFGHSVGISGSKMVLHMTHNVFSFRCFAANGRGFSADSTNKRKIKSKKRRKDVALESRSALEKKKAEENKDYQAIDYDAPIESDKSTIGFGTRVGIGVAVVIFGLVFAFGDFLPYGSVSPSKESAVVKQKLSQEEEEKFKNALQGFQATLRCSSIVVRTR

SEQ ID NO: 188460 - protein, 386 aa, Zea Mays
MGSTAADQYLQHHDVAASPRHHRLDPRLWGLQPHHPDVREVISGNPRNRDQWVPELRTESENKSGKKVMDKKFLEKVEAVRRSALEKKKAEENKDYQAIDYDAPIESDKSTIGFGTRVGIGVAVVIFGLVFAFGDFLPYGSVSPSKESAVVKQKLSQEEEEKFKNALQGFQATLSKSPNDPTALEGAAVSLSELGEYEKASTFLEKLIKVIPDKAEAYRLLGEVKFELKDYEGSSSSYRSALSSSDNIDFEVLRGLTNSLLAAKKPDEAVDIILLCRRKLNEKSQTGLADLEATNDNGRQKPQDIDPIQVDLLLGKAYSDWGHISDAISVYDKLITDHPEDFRGYLAKGIILKENGKAGDAERMFIQAKFFAPEAAKALVDRYAQR

SEQ ID NO: 188461 - protein, 50 aa, Zea Mays
MNRVRNLRTGDPKVENAPNKPTLVSGINKCCMVRGLVPRLSGRGLVCWLC

SEQ ID NO: 188462 - protein, 742 aa, Zea Mays
MAASPLPRWAPTPSPTRPLRVSSAGGQTAVSSSSWSWAFCRSFIGSAVVYPPWRRSTPPPPPPPAPAGDPAAANAAADDGRRHGRFCSHPLDCVGARDCSLPEDAGGGREVFLTWEDLSVTASSSTGGKAKPAVILDKISGYARPGEVLAVMGPSGCGKTTLLDALAGRLGSDKRRTAGNILINGRREKLAFGTSNNVTSSGGWCTMHTCLLIALKAYVTQETLLMATLTVTEAVHYSAQLQLPDSVPPADKRERADRAIKQMGLAAVAGHRIGGRVCKGISGGQRRRVSICVELLASPALVFLDEPTSGLDSAASFHVMSRIAGLARAERVTVVATMHQPSSEVFQLFHGLCLMAYGRMVYFGPASDAIQFFDSNGYPCPMRRNPSDHFLMMINKDFEELEEEGSTALLLPSATEVIETLVDSLMSQRSLAIRNEALFMMKQGAAFTKKRQATFLTKCVVLTKRSVINMHRDMGYYWLRFGIYIAICVSIGTIFFNVGYGFASIQARASMLMFTSTLLTMMSIGGFPSFVEDMKVFRKEQLNGHYGATAFVIANTVSSTLYLGIISIIPGAVCYYLTGLQRRLDHFLYFAAVLWACTMLVEGLMMIVAALVPDFLLGIITGSGIQGLLMLNAGFFRLPHDLPKPLWKYPTYYISYHKYATQGLYKNEFLGLVFDDGVLGKGLTVSGDYILRTSLQVEMGYSKWVDLAILLAMVFIYRVLFLVTIKVGEAVKPMIKCMSIKV

SEQ ID NO: 188463 - protein, 318 aa, Zea Mays
MSQRSLAIRNEALFMMKQQGAAFTKKRQATFLTKCVVLTKRSVINMHRDMGYYWLRFGIYIAICVSIGTIFFNVGYGFASIQARASMLMFTSTLLTMMSIGGFPSFVEDMKVFRKEQLNGHYGATAFVIANTVSSTLYLGIISIIPGAVCYYLTGLQRRLDHFLYFAAVLWACTMLVEGLMMIVAALVPDFLLGIITGSGIQGLLMLNAGFFRLPHDLPKPLWKYPTYYISYHKYATQGLYKNEFLGLVFDDGVLGKGLTVSGDYILRTSLQVEMGYSKWVDLAILLAMVFIYRVLFLVTIKVGEAVKPMIKCMSIKV

SEQ ID NO: 188464 - protein, 261 aa, Zea Mays
MPFRFQFPWLKNPTTNGGTSNIDTNPSPRFPNPFLPIQAHVTSFLSSFPRALPPPPPWARITSPASTSGALPTSEIEERLAGVPVYALANAAQEFVLVSSTRVGGQGGESVSPTQALGLLCFRKEDADALLEQMDGDMRAGSGVVPVALNKVIQMKSDGVAFRFLPDSSQVANAIKLMQDEGLYAGEGFPGVPVFQSRSLVLMSDNKRYRPVFFRKEDLDNSLHRTSRDQQKPNPAVRFGDTQVSSLEDIIKSMKLLLKMG

SEQ ID NO: 188465 - protein, 96 aa, Zea Mays
MECRGHQSEREKKICRCGVGAVKDRRARWPSATSLRLYWLAGESPKLVYLGSAWVVTIGYPGRVATLSDSIFADVVRPPPRLGHSATGFTREVSRI

SEQ ID NO: 188466 - protein, 232 aa, Zea Mays
MTRRMTSAAPAPRRPQGLQQTSASRPWRPLRPALRASQTSSPSQSHLCYSHRSSVSFFGGTRWTTHTRLADDARHTRATRCAKSKLRRVLLCQSPTACSAEFTMEVGDELVRLDKQRRVRRWRIHFRRGRAGSRQLGVKHRGMEEPFCSMVTVDACLELLKLERIAKEQRASCYNTTILITSLGILFLRSPEIGTPRFQKTRWKGAAVDSSTGGAGTQVTGSCRPLPRSLKG

SEQ ID NO: 188467 - protein, 50 aa, Zea Mays
MAAGASDYLTVEYHSRDSPLSPPTTREPPAAAASSYTTVGTVGDLLMKWW

SEQ ID NO: 188468 - protein, 159 aa, Zea Mays
MGGGGNGESCDLLQVLFEGALAGGAAGVVVETALYPIDTIKTRLQAAQGGSKIQWKGMYDGLAGNIVGVLPASAIFVGVYEPAKRKLLELFPKNLSAIAHLTAGAIGGAASSLIRVPTEVVKQRMQMSQYKTAPDAVRLILAQEGIKGLWFLSPARSAI

SEQ ID NO: 188469 - protein, 101 aa, Zea Mays
MQMSQYKTAPDAVRLILAQEGIKGLYAGYGSFLLRDLPFDAIQFCIYEQLRIGYRLTAKRELHDTETAIIGAFAGAITGALTTPLDVMKTRLMIQVDLETA

SEQ ID NO: 188470 - protein, 481 aa, Zea Mays
MGRNLPAEQVEAPRSSKMDKKRKKDKKRKLAAEAEEEAAVTATVETVKSSKKKRVENEPGAGAVEAENGAEKTVAVTGKGSEDPKYAPLRSFSAAELPSQVLECCSAFARPSPIQAHAWPFLLDGRDFIGIAATGSGKTIAFGVPALMHIRKKVGGKAGKKAVPRCLVLSPTRELAQQIADVLSEAGAPCGIKSVCLYGGTKKEPQISALKSGVVLDEADRMLDLGFEPEVRAILSQTSSVRQMVMFSATWPLAVHKLAQEFMDPNPIKVVIGSEDLAANHDVMQIVEVLDDRTRDSRLLALLDKYHQAQSNRVLVFVLYKKEAARVETMLQRRGWKAVSVHGDKAQHDRTKALSLFKEGKCPLMIATDVASRGLDIPDVEVVINYSYPLTTEDYVHRIGRTGRAGKKGVAHTFFTQANKALAGELVNVLREADQVVPPALMKFGTHVKKKESKIYGSHFKELTADAPKSTKITFGDSDED

SEQ ID NO: 188471 - protein, 445 aa, Zea Mays
MGRNLPAEQVEAPRSSKMDKKRKKDKKRKLAAEAEEEAAVTATVETVKSSKKKRVENEPGAGAVEAENGAEKTVAVTGKGSEDPKYAPLRSFSAAELPSQVLECCSAFARPSPIQAHAWPFLLDGRDFIGIAATGSGKTIAFGVPALMHIRKKVGGKAGKKAVPRCLVLSPTRELAQQVLDEADRMLDLGFEPEVRAILSQTSSVRQMVMFSATWPLAVHKLAQEFMDPNPIKVVIGSEDLAANHDVMQIVEVLDDRTRDSRLLALLDKYHQAQSNRVLVFVLYKKEAARVETMLQRRGWKAVSVHGDKAQHDRTKALSLFKEGKCPLMIATDVASRGLDIPDVEVVINYSYPLTTEDYVHRIGRTGRAGKKGVAHTFFTQANKALAGELVNVLREADQVVPPALMKFGTHVKKKESKIYGSHFKELTADAPKSTKITFGDSDED

SEQ ID NO: 188472 - protein, 409 aa, Zea Mays
MVRTRPRRCSTTGPCRPSCWCTASSASAKAGWAGCRTSPARRRRTTGCWCRTWARSPASTTGGQVDYGEEHSREYGHSRFGRTYARGHYPAWDEEHPVHLVGHSAGAQVIRLLQQMLHDREFEGHGDTSERWVLSVTSLSGALNGTTRAYIDGMRAEKEGGGRWLRPVCLLQICRVGSVLYHWLDLPWLKRYYDFGFDHFGMSRRVVGVAGLAEILLDAGSGGGRRGPFATGDWILPDLTIQGAARINARVRTFPATFYFSYASRRTARSPPGSAGATVPSGVTRIHPLLFIRVLQMCRWRYPAGADPPYQGYRDEDWEDNDGALNTFSMTHPRIPVEHPSVQVEKDEDCRPLRPGIWYYKIVEADHMTFVINRRRGGVQFDLVYDSIFDNCRKHVFRTAPPPTLPVQS

SEQ ID NO: 188473 - protein, 390 aa, Zea Mays
MVEQASEQTLAFCCRSIRIQNLQPGQIIMDIDFRWGGNPSIILAVDAVVASLPIQLKDLQVYTVIRVIFQLSEDIPCISAVVVALLADPEPKIQYTLKAIGGSLTAVPGLSDMIDDTVDSIVSDMLLWPHRHVVKLGVNVDTSDLELKPQGRLSVTVVKATSLRNKEMIGKSDPYVKLYVRPMFKVKTKVIDDDLNPEWNETFDLIVEDKETQSVIFEVYDEDKLQQDKRLGVAKLAVNTLESEITQDATLKLLHSLDPIKNKDTKDRGTLHLKVKYHPFTKEEQLEALEMEKQAIEERKRLKEAGIIGSTMDAVGSGVGFVGTGIGAGLGFVGSGIGAGAGLVTSGIGAVSSGLGKAGKFMGRTVTGPFSMSRKNGSSSTAPQHDQPSA

SEQ ID NO: 188474 - protein, 103 aa, Zea Mays
MTEIDMQEVRAKNKSGSHLNKLGYNNVMLKFKERTGKTYNKLQFKNKWDKLKKDYSNWKQLGKDTGCGWDPNKKLYVAPDWWWKKANIALASLKTSHSKMQKN

SEQ ID NO: 188475 - protein, 736 aa, Zea Mays
MEKEEQQANDYTDEDTDYTDDEEEDYNDDEDYTPEPETASKRQKRHTLEQIRELRAAYQRCDHPDAPTRRALGAKIGLEGRQVQYWFQNQRSQTQAKALAQNNRVVQQENAALMAENASLRHAILTGSCLACGGATTAAAPAELPPESRRLVAENARLRGEYARATALLNQILLSAPAPPGPAAAAVVVSSSSVARPVADRAARLRGHAEAAMDQFLLLATKGEPLWLPTTPDGEALNYQLGYKHKKALPVHHGLCPDEFVMEASRATGVVRASATYLVATLTDARRWSEMFPSVVASVTARRDAAISGGVFGSHIQLMNAELQVHSPRLLNRSINFLRYTKRVAEGRWAVMDVSVDGILGPPGSRVADAAAAAAAANGVTLVPAWYTGCRLLPSGCLVEDMRNGYCKVTWVVHAEYDETTVPTMFRPLFRSGKALGAHRWLASLQRQCEFLAVLHSSQVSRGGDNTAAAISSMGKRGVLELAQRMVADFYSAVSGPVTQPSSSIDEWYGSAGAGARRTDTAVRMVTSKKAGTVADLVLSASTTVWLPNTPPQLVFRYLRDDQRRGEWDAFFASSAAVTELCSVPTGHLNGNAVSVLYSNVTDGTDRKKTLILQEACTDASCSMVVYAPVEEDSMRAVMNGGDHASVFLLPSGFAVLPDGHGRARHAPSSSSSTPVGCDDTTAGSLLTVACQALVPGSSPSDNRAAPGAFDDVGKLLCRALEKIKAAVKTDIVTPA

SEQ ID NO: 188476 - protein, 102 aa, Zea Mays
MMEEGGILVDYHGCDFFPERWFDLVVVLQTDNSILHDRLTGRGYMGSKLANNIECEIFQVLLEEARESYREDIVMPLRSDNVEDISRNVGALTDWVNNWRPS

SEQ ID NO: 188477 - protein, 73 aa, Zea Mays
MRFTFVVVGCGVLHMTHGSLIMCLANFSYFPVPPKDKYYLVDSKYPNRAGYLAPFKGTTYHISEFRHHRGCPP

SEQ ID NO: 188478 - protein, 56 aa, Zea Mays
MGRHALETFPFNLTPPLLPRISAHTIIHRLALRINLTNIFNSCRHLRQTQLDDPQI

SEQ ID NO: 188479 - protein, 274 aa, Zea Mays
MACPCLRMVRFLCMEDDNEVTGESPVADEWDMLSLTSSIYASPLFRRGFDPINLPGYGNVINIQEGTQTGLVMSDGFVFPPSEHENLPIEPEHEDLPIEPGHDESNTNSVEKESSCAGNNDDDWCHVSPEEIDDVSNENLADNSDLPTASEATVPDSQPTEINAKREKDHRTCKADHTCERWWKKKTTYLFHHIKGVTTLCSVVAAGAVVGFVVMGQRWQQDHWHLHQFKFSVSGESMNRVIGAFSRLKDGLPGSEQLRSMLPTRVLPQQPLSA

SEQ ID NO: 188480 - protein, 240 aa, Zea Mays
MEDDNEVTGESPVADEWDMLSLTSSIYASPLFRRGFDPINLPGYGNVINIQEGTQTGLVMSDGFVFPPSEHENLPIEPEHEDLPIEPGHDESNTNSVEKESSCAGNNDDDWCHVSPEEIDDVSNENLADNSDLPTASEATVPDSQPTEINAKREKDHRTCKADHTCERWWKKKTTYLFHHIKGVTTLCSVVAAGAVVGFVVMGQRWQQDHWHLHQFKFSVSEHESSHWSIQSFEGWASWE

SEQ ID NO: 188481 - protein, 941 aa, Zea Mays
MASKVRFTVGSQVWVEDAEVAWIDGLVEEVQGDELIINCTSGKKVTANVSSVYPKDAEAKRCGVEDMTRLAYLNEPGVLQNLKSRYGMNEIYTYTGNILIAVNPFQRLPHLYNNHMMGIYKGAEFGELSPHPFAIADHAYRLMMNCGKSQAILVSGESGAGKTESTKSLMQYLAFMGGKAQSGGRSVQQQVLESNPVLEAFGNAKTVRNNNSSRFGKFVEIQFDKNGKISGAAIRTYLLERSRVCQISDPERNYHCFYMLCNAPAEDRERYKLGDAASFHYLNQSSCIKLDAMDDASEYIITRRAMDIVGISSDEQDAIFRVVAAILHLGNVEFSEGSEADSSVPKDDKSQFHLRTAAELFMCDEKALEESLCKRVMVTRGESIVKNLDARAAALSRDALARIVYSRLFDWLVTKINTSIGQDLSSKLLIGVLDIYGFESFKTNSFEQFCINLTNEKLQQHFNQHVFKMEQEEYTKEEIDWSYIQFVDNQEILDLIEKKPGGIIALLDETCMLRNSTHEIFAEKLYQKFKGNLHFSRPKFSRSDFTIHHYAGNVTYQTDLFLDKNIDYAVNEHQVLLHASRCSFVSSLFPHEVSAKSTKFTSIGSSFKQQLQALLETLSATEPHYIRCIKPNNVLKPAIFENSNVLQQLRCGGVLEAIRISCLGYPTRRRFDEFVDRFGVLLPEVLGESYDEVTATNMLLDKVNLTGYQIGKTKVFLRAGQMAELDAMRTEVLGCSASKIQRKVRSYLARKKFIQLRISATHLQAICRGQIARHYYDDLRREAASLTIQTCYRMYFARKNYINLCTASTTIQSGLRGMAARKKLQFRQHTKAAVTIQSFWRSYVARSRFMSLKKAAIATQCAWRGRVARKELRKLKMAAKETGALQAAKNKLEKQVEELTWRLQLEKRMREYNMLISTDDQEVIWEIRYISQPENHVNREI

SEQ ID NO: 188482 - protein, 473 aa, Zea Mays
MEQEEYTKEEIDWSYIQFVDNQEILDLIEKKPGGIIALLDETCMLRNSTHEIFAEKLYQKFKGNLHFSRPKFSRSDFTIHHYAGNVTYQTDLFLDKNIDYAVNEHQVLLHASRCSFVSSLFPHEVSAKSTKFTSIGSSFKQQLQALLETLSATEPHYIRCIKPNNVLKPAIFENSNVLQQLRCGGVLEAIRISCLGYPTRRRFDEFVDRFGVLLPEVLGESYDEVTATNMLLDKVNLTGYQIGKTKVFLRAGQMAELDAMRTEVLGCSASKIQRKVRSYLARKKFIQLRISATHLQAICRGQIARHYYDDLRREAASLTIQTCYRMYFARKNYINLCTASTTIQSGLRGMAARKKLQFRQHTKAAVTIQSFWRSYVARSRFMSLKKAAIATQCAWRGRVARKELRKLKMAAKETGALQAAKNKLEKQVEELTWRLQLEKRMREYNMLISTDDQEVIWEIRYISQPENHVNREI

SEQ ID NO: 188483 - protein, 582 aa, Zea Mays
MASKVRFTVGSQVWVEDAEVAWIDGLVEEVQGDELIINCTSGKKVTANVSSVYPKDAEAKRCGVEDMTRLAYLNEPGVLQNLKSRYGMNEIYTYTGNILIAVNPFQRLPHLYNNHMMGIYKGAEFGELSPHPFAIADHAYRLMMNCGKSQAILVSGESGAGKTESTKSLMQYLAFMGGKAQSGGRSVQQQVLESNPVLEAFGNAKTVRNNNSSRFGKFVEIQFDKNGKISGAAIRTYLLERSRVCQISDPERNYHCFYMLCNAPAEDRERYKLGDAASFHYLNQSSCIKLDAMDDASEYIITRRAMDIVGISSDEQDAIFRVVAAILHLGNVEFSEGSEADSSVPKDDKSQFHLRTAAELFMCDEKALEESLCKRVMVTRGESIVKNLDARAAALSRDALARIVYSRLFDWLVTKINTSIGQDLSSKLLIGVLDIYGFESFKTNSFEQFCINLTNEKLQQHFNQHVFKMEQEEYTKEEIDWSYIQFVDNQEILDLIEKKPGGIIALLDETCMLRNSTHEIFAEKLYQKFKGNLHFSRPKFSRSDFTIHHYAGNDCRSYRGCYEGCMDERWEDGNDYDTEIRG

SEQ ID NO: 188484 - protein, 655 aa, Zea Mays
MASKVRFTVGSQVWVEDAEVAWIDGLVEEVQGDELIINCTSGKKVTANVSSVYPKDAEAKRCGVEDMTRLAYLNEPGVLQNLKSRYGMNEIYTYTGNILIAVNPFQRLPHLYNNHMMGIYKGAEFGELSPHPFAIADHAYRLMMNCGKSQAILVSGESGAGKTESTKSLMQYLAFMGGKAQSGGRSVQQQVLESNPVLEAFGNAKTVRNNNSSRFGKFVEIQFDKNGKISGAAIRTYLLERSRVCQISDPERNYHCFYMLCNAPAEDRERYKLGDAASFHYLNQSSCIKLDAMDDASEYIITRRAMDIVGISSDEQDAIFRVVAAILHLGNVEFSEGSEADSSVPKDDKSQFHLRTAAELFMCDEKALEESLCKRVMVTRGESIVKNLDARAAALSRDALARIVYSRLFDWLVTKINTSIGQDLSSKLLIGVLDIYGFESFKTNSFEQFCINLTNEKLQQHFNQHVFKMEQEEYTKEEIDWSYIQFVDNQEILDLIEKKPGGIIALLDETCMLRNSTHEIFAEKLYQKFKGNLHFSRPKFSRSDFTIHHYAGNVTYQTDLFLDKNIDYAVNEHQVLLHASRCSFVSSLFPHEVSAKSTKFTSIGSSFKQQLQALLETLSATEPHYIRCIKPNNVLKPAIFENSNVLQQLRCGVIL

SEQ ID NO: 188485 - protein, 456 aa, Zea Mays
MASKVRFTVGSQVWVEDAEVAWIDGLVEEVQGDELIINCTSGKKVTANVSSVYPKDAEAKRCGVEDMTRLAYLNEPGVLQNLKSRYGMNEIYTYTGNILIAVNPFQRLPHLYNNHMMGIYKGAEFGELSPHPFAIADHAYRLMMNCGKSQAILVSGESGAGKTESTKSLMQYLAFMGGKAQSGGRSVQQQVLESNPVLEAFGNAKTVRNNNSSRFGKFVEIQFDKNGKISGAAIRTYLLERSRVCQISDPERNYHCFYMLCNAPAEDRERYKLGDAASFHYLNQSSCIKLDAMDDASEYIITRRAMDIVGISSDEQDAIFRVVAAILHLGNVEFSEGSEADSSVPKDDKSQFHLRTAAELFMCDEKALEESLCKRVMVTRGESIVKNLDARAAALSRDALARIVYSRLFDWLVTKINTSIGQDLSSKLLIGVLDIYGFESFKTNRCLTVSSSFAST

SEQ ID NO: 188486 - protein, 507 aa, Zea Mays
MASKVRFTVGSQVWVEDAEVAWIDGLVEEVQGDELIINCTSGKKVTANVSSVYPKDAEAKRCGVEDMTRLAYLNEPGVLQNLKSRYGMNEIYTYTGNILIAVNPFQRLPHLYNNHMMGIYKGAEFGELSPHPFAIADHAYRLMMNCGKSQAILVSGESGAGKTESTKSLMQYLAFMGGKAQSGGRSVQQQVLESNPVLEAFGNAKTVRNNNSSRFGKFVEIQFDKNGKISGAAIRTYLLERSRVCQISDPERNYHCFYMLCNAPAEDRERYKLGDAASFHYLNQSSCIKLDAMDDASEYIITRRAMDIVGISSDEQDAIFRVVAAILHLGNVEFSEGSEADSSVPKDDKSQFHLRTAAELFMCDEKALEESLCKRVMVTRGESIVKNLDARAAALSRDALARIVYSRLFDWLVTKINTSIGQDLSSKLLIGVLDIYGFESFKTNSFEQFCINLTNEKLQQHFNQHVFKMEQEEYTKEEIDWSYIQFVDNQEILDLIEKVNNIRNLGV

SEQ ID NO: 188487 - protein, 370 aa, Zea Mays
MEQEEYTKEEIDWSYIQFVDNQEILDLIEKKPGGIIALLDETCMLRNSTHEIFAEKLYQKFKGNLHFSRPKFSRSDFTIHHYAGNVTYQTDLFLDKNIDYAVNEHQVLLHASRCSFVSSLFPHEVSAKSTKFTSIGSSFKQQLQALLETLSATEPHYIRCIKPNNVLKPAIFENSNVLQQLRCGGVLEAIRISCLGYPTRRRFDEFVDRFGVLLPEVLGESYDEVTATNMLLDKVNLTGYQIGKTKVFLRAGQMAELDAMRTEVLGCSASKIQRKVRSYLARKKFIQLRISATHLQAICRGQIARHYYDDLRREAASLTIQTCYRMYFARKNYINLCTASTTIQSGLRGMAARKKLQFRQHTKAAVTIQV

SEQ ID NO: 188488 - protein, 291 aa, Zea Mays
MAGVLEAIRISCLGYPTRRRFDEFVDRFGVLLPEVLGESYDEVTATNMLLDKVNLTGYQIGKTKVFLRAGQMAELDAMRTEVLGCSASKIQRKVRSYLARKKFIQLRISATHLQAICRGQIARHYYDDLRREAASLTIQTCYRMYFARKNYINLCTASTTIQSGLRGMAARKKLQFRQHTKAAVTIQSFWRSYVARSRFMSLKKAAIATQCAWRGRVARKELRKLKMAAKETGALQAAKNKLEKQVEELTWRLQLEKRMREYNMLISTDDQEVIWEIRYISQPENHVNREI

SEQ ID NO: 188489 - protein, 516 aa, Zea Mays
MALMGSLETKIDETEQKFEEMKRAREEWLKKATDAESKINELTNTVLSFQEKVTNMEAENQLLRQQALLRTPVRTIPENTSPKSNLTNGSPRIDEQKTPHGTPAPKDYGSFGQPRASFFERQHESVDALINCVSENIGFSEGKPVAAITIYKCLVHWKIFETEKTSVFDRLIQIFGSAMQKHDSNEDLAYWLSNSSTLLIMLQKSLKAAGSTGISPQKRPQTQSSFLGRMVFRSSNITVDMDLVRQIEAKYPAFLFKQQLTAFVEGLYGMIRDNVKKDLSSLLAYAIQVPRTVKASMVRGRSFGSSSLPRGRSFSTQGSYWQAIVDNLSELLKILQDNCVPSIFIQKIFTQVFSFINAQLFNSNGEYVKQGLAQLEVWCGEVKPEYAGSALDELKHIRQAVGFLVIFKKFRISYDEIVNDLCPVLSVQQLYKICTQYWDDKYNTESVSEEVLEEMRTLMTKESSDETLGNTFLLDDEISLPISLEEIADSMDAKEFQNIAPPQELTAIPAFQFLKS

SEQ ID NO: 188490 - protein, 508 aa, Zea Mays
MALMGSLETKIDETEQKFEEMKRAREEWLKKATDAESKINELTNTVLSFQEKVTNMEAENQLLRQQALLRTPVRTIPENTSPKSNLTNGSPRIDEQKTPHGTPAPKDYGSFGQPRASFFERQHESVDALINCVSENIGFSEGKPVAAITIYKCLVHWKIFETEKTSVFDRLIQIFGSAMQKHDSNEDLAYWLSNSSTLLIMLQKSLKAAGSTGISPQKRPQTQSSFLGRMVFRSSNITVDMDLVRQIEAKYPAFLFKQQLTAFVEGLYGMIRDNVKKDLSSLLAYAIQVPRTVKASMVRGRSFGSSSLPRGRSFSTQGSYWQAIVDNLSELLKILQDNCVPSIFIQKIFTQVFSFINAQLFNSLLVRHECCSFSNGEYVKQGLAQLEVWCGEVKPEVIFKKFRISYDEIVNDLCPVLSVQQLYKICTQYWDDKYNTESVSEEVLEEMRTLMTKESSDETLGNTFLLDDEISLPISLEEIADSMDAKEFQNIAPPQELTAIPAFQFLKS

SEQ ID NO: 188491 - protein, 466 aa, Zea Mays
MTSLSHAIGTVSMPPKWSVGYHQCRYSYDSSEKVLKVVRTFREKGIPCDVVWMDIDYMDGFRCFTFDSIRFPDPKSLVDDLHSIGCKAVWMLDPGIKKEKGFFVFDSGSKNDVWVQKADGSPFVGEVWPGDCVFPDFTSEKARAWWASLVKDFISNGVDGIWNDMNEPAVSKTVTKTMPESNIHRGDADIGGVQNHSYYHNVYGMLMTRSTYKGMEMANAAKRPFVLTRAGFIGSQRYAATWTGDNLSTWEHLHMSLPMILQLGLSGQPLSGPDIGGFGGNATPKLFGRWMGLGALFPFSRGHTETGSIDHEPWSFGEECEEVCRLALLRRYRLLPHIYTLFYHSHTKGIPVAAPVFFADPQDPELRKVETSFLLGPLLVCASTLPNKGAHECAHKLPKGIWLPFDFADSHPDLPLLYLQGGAILPVGLPIKHVGEASLEDDLSLIIALNENALVTVTVTRDSKAE

SEQ ID NO: 188492 - protein, 784 aa, Zea Mays
MVVRTFREKGIPCDVVWMDIDYMDGFRCFTFDSIRFPDPKSLVDDLHSIGCKAVWMLDPGIKKEKGFFVFDSGSKNDVWVQKADGSPFVGGYVSYSLHSGEVWPGDCVFPDFTSEKARAWWASLVKDFISNGVDGIWNDMNEPAVSKTVTKTMPESNIHRGDADIGGVQNHSYYHNVYGMLMTRSTYKGMEMANAAKRPFVLTRAGFIGSQRYAATWTGDNLSTWEHLHMSLPMILQLGLSGQPLSGPDIGGFGGNATPKLFGRWMGLGALFPFSRGHTETGSIDHEPWSFGEECEEVCRLALLRRYRLLPHIYTLFYHSHTKGIPVAAPVFFADPQDPELRKVETSFLLGPLLVCASTLPNKGAHECAHKLPKGIWLPFDFADSHPDLPLLYLQGGAILPVGLPIKHVGEASLEDDLSLIIALNENGKAEGVLFEDAGDGYAFTQGDYLLTYYIAELHSSVVTVKVFKSEGSWKRPKRNLKINILLGGGAMISTNGIDGEEIHLTMPSESEVSNLVATSEFEHKKRMEMIHPIPDIEESLRQERAELSKIPVDMKSGDWFLKIVPWIGGRIISMTHLPSDSQWLHSRIEIHGYEEYSGTEYRSAGCTEQYKVIRCVEQSGEEESICMEGDIGGGLVLQRQISILKDNPKIVQIDSSIQARSVGAGSGGFSRLVCLRVHPTFTLLHPTEVVVAFTAINGSKQEISPEAGEITFEGDLRPNGEWMLVDKCVGLSLVNRFNPREVSKCFVHWGTANVKMELWSEERPVSNDTPLRICHQYEVWQTS

SEQ ID NO: 188493 - protein, 1195 aa, Zea Mays
MAPKSRRGKAKGEKKKKDEKVLPVAIDITVNLPDQSHVILKGISTDRIIDVRRLLCVNTATCAITNYSLTHEMRDGALKDAADIATLKPCTLTLVEEEYSEESAVEHVRRLLDIVACTTCFGPAPPPPPPPSPKDADAAKETSSSSSTSKAVASASSGGRRTASPPPASPSSAAAKESSAAKEAAAKESAAAVELEAEMSGACPRLGAFYEFFSLANLTPPLQFVRRVLQPRQEEQPSDDHLFFLEAKLCSGKFLVVEARRKGFFSLGKQRVLCHNLVDLLRHLSRAFDNAYEDLMKAFLERNKFGNFPYGFRANTWLVPPIAAQSPSTFPPLPAEDETWGGSGGGWGRDGKSDMVPWADEFLYLTSMPCKTAEERELRDRRAFLLHSLFVDVAIFRAIAAVRHVMEGTELSASTNIDEVLYSETVGHFSITVTRDSSDASCKMDTKIDGNRATGMDSKDLAERNLLKGITADENTAAHDVDSLGIINLRYCGYVAVAKVDNIDKTKVNASIKPMNIADQPEGGAHALNINSLRMLLNEATSTGEKKISNLSQNHRQEELIAAQTFVEKLLKESLQKLEEEENVKHSFMRWELGACWVQHLQDQKNSDKDKKQGGEKDKKKTLDKSKEPKIEGLGKPLKALKNAKNVDSADLGSSAGPKSSAESQKDKPSDVKLPQGESSASENENLLKDLLPESAFTRLKESETGLHQKSPPELIEMALKYYDEVALPKLVADFGSLELSPVDGRTLTDFMHTRGLQMRSLGRVVKLSEKLSHVQSLCVHEMIVRAFKHIVRSVIAAISDIRQLALTIAAALNLLLGVPESDVSGSSPNVHPLVWRWLVIFLKKRYEFELTEKHYHDVRKYAVLRGLCHKVGIDFAPRDFIMDCSFPFHKQDIISLVPVHKQVACSSADGRQLLESSKTALDKGKLEDAVNYGTKALSKLITVCGPYHRMTAGAYSLLAVVLYHTGDFNQATIYQQKALDINERELGLDHPDTMKSYGDLAVFYYRLQHTELALKYVKRALYLLHLTCGPSHPNTAATYINVAMMEEGLGNVHVALRYLHKALKCNQKLLGPDHIQTAASYHAIAIALSLMEAYSLSVQHEQTTLQILRAKLGPDDLRTQDAAAWLEYFESKVIEQQEAARNGTRKPDASIASKGHLSVSDLLDYINPDQESKGRDSEFGKRRYSSIKFKWSKP

SEQ ID NO: 188494 - protein, 983 aa, Zea Mays
MAPKSRRGKAKGEKKKKDEKVLPVAIDITVNLPDQSHVILKGISTDRIIDVRRLLCVNTATCAITNYSLTHEMRDGALKDAADIATLKPCTLTLVEEEYSEESAVEHVRRLLDIVACTTCFGPAPPPPPPPSPKDADAAKETSSSSSTSKAVASASSGGRRTASPPPASPSSAAAKESSAAKEAAAKESAAAVELEAEMSGACPRLGAFYEFFSLANLTPPLQFVRRVLQPRQEEQPSDDHLFFLEAKLCSGKFLVVEARRKGFFSLGKQRVLCHNLVDLLRHLSRAFDNAYEDLMKAFLERNKFGNFPYGFRANTWLVPPIAAQSPSTFPPLPAEDETWGGSGGGWGRDGKSDMVPWADEFLYLTSMPCKTAEERELRDRRAFLLHSLFVDVAIFRAIAAVRHVMEGTELSASTNIDEVLYSETVGHFSITVTRDSSDASCKMDTKIDGNRATGMDSKDLAERNLLKGITADENTAAHDVDSLGIINLRYCGYVAVAKVDNIDKTKVNASIKPMNIADQPEGGAHALNINSLRMLLNEATSTGEKKISNLSQNHRQEELIAAQTFVEKLLKESLQKLEEEENVKHSFMRWELGACWVQHLQDQKNSDKDKKQGGEKDKKKTLDKSKEPKIEGLGKPLKALKNAKNVDSADLGSSAGPKSSAESQKDKPSDVKLPQGESSASENENLLKDLLPESAFTRLKESETGLHQKSPPELIEMALKYYDEVALPKLVADFGSLELSPVDGRTLTDFMHTRGLQMRSLGRVVKLSEKLSHVQSLCVHEMIVRAFKHIVRSVIAAISDIRQLALTIAAALNLLLGVPESDVSGSSPNVHPLVWRWLVIFLKKRYEFELTEKHYHDVRKYAVLRGLCHKVGIDFAPRDFIMDCSFPFHKQDIISLVPVHKQVACSSADGRQLLESSKTALDKGKLEDAVNYGTKALSKLITVCGPYHRMTAGAYSLLAVVLYHTGDFNQKYCRLLFISKRP

SEQ ID NO: 188495 - protein, 734 aa, Zea Mays
MAPKSRRGKAKGEKKKKDEKVLPVAIDITVNLPDQSHVILKGISTDRIIDVRRLLCVNTATCAITNYSLTHEMRDGALKDAADIATLKPCTLTLVEEEYSEESAVEHVRRLLDIVACTTCFGPAPPPPPPPSPKDADAAKETSSSSSTSKAVASASSGGRRTASPPPASPSSAAAKESSAAKEAAAKESAAAVELEAEMSGACPRLGAFYEFFSLANLTPPLQFVRRVLQPRQEEQPSDDHLFFLEAKLCSGKFLVVEARRKGFFSLGKQRVLCHNLVDLLRHLSRAFDNAYEDLMKAFLERNKFGNFPYGFRANTWLVPPIAAQSPSTFPPLPAEDETWGGSGGGWGRDGKSDMVPWADEFLYLTSMPCKTAEERELRDRRAFLLHSLFVDVAIFRAIAAVRHVMEGTELSASTNIDEVLYSETVGHFSITVTRDSSDASCKMDTKIDGNRATGMDSKDLAERNLLKGITADENTAAHDVDSLGIINLRYCGYVAVAKVDNIDKTKVNASIKPMNIADQPEGGAHALNINSLRMLLNEATSTGEKKISNLSQNHRQEELIAAQTFVEKLLKESLQKLEEEENVKHSFMRWELGACWVQHLQDQKNSDKDKKQGGEKDKKKTLDKSKEPKIEGLGKPLKALKNAKNVDSADLGSSAGPKSSAESQKDKPSDVKLPQGESSASENENLLKDLLPESAFTRLKESETGLHQKSPPELIEMALKYYDEVALPKLDFD

SEQ ID NO: 188496 - protein, 970 aa, Zea Mays
MTAGAYSLLAVVLYHTGDFNQATIYQQKALDINERELGLDHPDTMKSYGDLAVFYYRLQHTELALKYVKRALYLLHLTCGPSHPNTAATYINVAMMEEGLGNVHVALRYLHKALKCNQKLLGPDHIQTAASYHAIAIALSLMEAYSLSVQHEQTTLQILRAKLGPDDLRTQDAAAWLEYFESKVIEQQEAARNGTRKPDASIASKGHLSVSDLLDYINPDQESKGRDSEFGKRRYSSIKVLSHSNESSNGASPEISPRDSNPIIDEEQQVKEPSKDDSTKSISEAEVKQTPESFEHPAPSEPQLEIVEANINAPKEVIEVENSEPEDGWQPVQRPKSAGGSGKQMKHYRPTTRKVYDPDSHDPTYTSQYKARNSYSNNRYYFLRKRTVVPTTYTDPQQHVKVQTFGARFGRKIYKAVTYRVKPATATTEVLDTFKSTEQMSGKAESQVANSQAHNPTSTDHKGSESHGTLVASSGNAPSYKDVALARPGTIAKTQIQKPRDDVPQNQPSLGQIIAQEMKDSLVDSLQVEQGPVSANTNNSKEETNVLGKLQKLEETKFSEGELEIENLCKDRVQDLPIPKAEESGIGSEPVNSKKDANVLSNTSQELSSSSNDGAAIEFSESTGSVKTEQTEKSDTDFFEALPRSIENISVSASTTNTGSLGGDGSEKSKPNLVLSNIDLREMPNKKLSASAPPFNPSPPSVLSPLSGNVGLPPPGAIPGVAPWPVNVSLHPGHSTMVPSGPPLCTSPHHLYPPAPRSPNLMHPVPFIYPPYSQPQVVPNTTFPMNTNIFRPNHYGWQPYMGPAPSEFVPMSAWSSSHTIDFIPTPHVVDPISQSLADKHIQSDAAVVSIGPSLDSSAVVAKEEMETPAVAVSGNLISNKHDDQDKQLKDATRIELSPEMQEDNKHDEGSFRIYVKGKSRRKQTLRIPISLLNKTYGSRSFKLVYNKVVRENDIFRPSSVSFAEVVSSGN

SEQ ID NO: 188497 - protein, 147 aa, Zea Mays
MAGIGRNMVAPLLVLNLIMYIIVIGFASWNLNHFINGQTNYPGVAGNGATFYFLVFASLATNAASSLIAWAITALAFGLACKEIHIGGHRGWRLRVLEAFVIILAFTQLLYVLMLHTGPRGSPGSEDSDRCSSYMCHHIRRCWSVMT

SEQ ID NO: 188498 - protein, 101 aa, Zea Mays
MAGIGRNMVAPLLVLNLIMYIIVIGFASWNLNHFINGQTNYPGVAGNGATFYFLVFAILAGVVGAASKLAGVHHVRAWRHDSLATNAASSLIAWPKGVTRV

SEQ ID NO: 188499 - protein, 74 aa, Zea Mays
MGGLVAKESSLVLMCLWHLRSRIVTTLALKRIALPYVLRSQAIWTSANLRSKEDILRYLTALAILTMLIGVARR

SEQ ID NO: 188500 - protein, 488 aa, Zea Mays
MLCLSLCAPHLHLHLPRSPTARPAAATCRNARCIGVTLCLRMPTTPEERRQKRGLAQFLDLSAAPTLTPPAPTPVHLTPAAKRRGALREMRRVWWVCGVGYWVQGFRCFPWLALNFHLTRGMGLSPAGLQLLQNAGSLPLVAKPLFGVLSDAVYIGRAHRIPYISLGAHCLGSTCNHSSYRGCVSNSNGMHSHWKSRSICHRSRSLLGNLSGGYILLKTQEPKIMFTAFSVLLGFQLALSLSTKETLPSSRGNSRNRLVKSSLAANFRKQFSNLMTAIREERILYPLAWIMTSFAVVPVLSGTMFCFQTQYLNLDPSVIGLSKVVGQVMVLSLTVLYNRYLKRIPLRCLTTGLQILYALAVLSDLILVKQVNLVLGIPNEIHVLCFSALAEALAQFKVLPFSVLLSSLCPPGCEGSLFAFFTSGLVLSAILSGVFGVGLSTLIGVSSVDYSSLPLGILLQSLAALLPLGWISFVPEKWTADDTVVIKR

SEQ ID NO: 188501 - protein, 76 aa, Zea Mays
MRRELCDQWPSSLSAIRIMRERESFREQSGLRRGRKGRVLEPWCSGAGYWTSPANPWSTSVTNVVNHRVPRSSLIS

SEQ ID NO: 188502 - protein, 122 aa, Zea Mays
MASTNMASATSRFMLAAGVPTGSSGGRVNFASAPNRLGRRLVARADNEAAAAEAAEGEGAVATKPKAEKPPPIGPKRGAKVKILRRESYWYNGIGNVVTVDQVNYAGVSTNNYALDEVSEVK

SEQ ID NO: 188503 - protein, 60 aa, Zea Mays
MCSQVAPGGPSLLLCSARPGVSRRRWQAHAVTAPLRLFRHESLCNGMSIKKKIYVVRSGH

SEQ ID NO: 188504 - protein, 96 aa, Zea Mays
MCSQVAPGGPSLLLCSARPGVSRRRWQAHAVTAPLRLFRHESLCNDLCALRVERASAHRHAQKLNDCSTSKARDVGIEGRPAGDSWWEAQQAGGGV

SEQ ID NO: 188505 - protein, 61 aa, Zea Mays
MIAALARLAMSASRADQRGTHGGRRNKPVGESDDTDGGQHAGGQASGGMTTGGRRGINVGG

SEQ ID NO: 188506 - protein, 60 aa, Zea Mays
MTALARLAMSASRADQRGTHGGRRNKPVGESDDTDGGQHAGGQASGGMTTGGRRGINVGG

SEQ ID NO: 188507 - protein, 485 aa, Zea Mays
MRPLPASVASRLAAVLADPVGVPLPVFNSLLSALAASVDPSHGHLPLYLFRRRLLPFRRPDAFTLSVLTSALPSAAVTLHALALRLGLLHADPVLANSLLRLYICPPVPCQGLARRLFEEMPARTASSYNTLISHSHDDVWGLVRRMVADGCAPDRFTMSAVLPVCTSARWGRELHCYAVRDWMCGDDDFHVSSGLVSMYCRVGHPDSARTVFNRMARRNVVCWTAMVGGYIENGMFDDAVDCFRAMWLIDAIPPNRITLITVLSAIEALSSLAEGKQVHGFAVRMMMHAEMSLNNALIDTYAKCGALHYARRIFDDTSWCKDVISWGAMILGYGIHGMGVEAVALFDQMLSSGVKPDSIIGLGVLSACCHAGLVLKGLNTYSSMVNDHGVHPTEEMCACMVDLLGRSGNVYHALDFVKSMSVEPGSSVWGALLDASVKYDNKEIQDLASRSLLRLEQGKPSNLVAVSNLNASSERWNIVKQIGF

SEQ ID NO: 188508 - protein, 474 aa, Zea Mays
MRPLPASVASRLAAVLADPVGVPLPVFNSLLSALAASVDPSHGHLPLYLFRRRLLPFRRPDAFTLSVLTSALPSAAVTLHALALRLGLLHADPVLANSLLRLYICPPVPCQGLARRLFEEMPARTASSYNTLISHSHDDVWGLVRRMVADGCAPDRFTMSAVLPVCTSARWGRELHCYAVRDWMCGDDDFHVSSGLVSMYCRVGHPDSARTVFNRMARRNVVCWTAMVGGYIENGMFDDAVDCFRAMWLIDAIPPNRITLITVLSAIEALSSLAEGKQVHGFAVRMMMHAEMSLNNALIDTYAKCGALHYARRIFDDTSWCKDVISWGAMILGYGIHACCHAGLVLKGLNTYSSMVNDHGVHPTEEMCACMVDLLGRSGNVYHALDFVKSMSVEPGSSVWGALLDASVKYDNKEIQDLASRSLLRLEQGKPSNLVAVSNLNASSERWNIVKQVRDTINQGSLKKKTGCSWVNPI

SEQ ID NO: 188509 - protein, 235 aa, Zea Mays
MAPWSPSSADGREDALGLPLLGRLPPPAPAPLCAVDLAPLPKSGCLVLSSSRPARLYVAVVAFRCFCACGREAPCSVRLRRLVVRAKLLAVHIKSVMCALDTMKCCVSCVVHPRSSSSRRSPSHYVRQHRRFPCLVLAWFPARRCALSARLALILIVSSIPPVSVVRHCVACVALYTSPSCVAVVPRVSKKSQEAGEDGASSVVFTKCATKISDILRDSSSTRQNYSVEKKIFSN

SEQ ID NO: 188510 - protein, 292 aa, Zea Mays
MERLSTNQLYSSGVPVTVPTSLPCIPVSLDESFPRLPDAQSVLMERELRSTPLPPHQTTVAPIRGLFHSNTGSVGPLCSPPSVRFSSHSNPEQYPNHNSYNSQVPSTASSSTLNYGSQYGGFEPSITDFPRDIEPTWCPDPVESILGYSGDVPAGNNLTGTTSIGASDDLTKQTEWWTEFMNEDWKDMVDNPTSTETQPVGQPVQSSNSVHQSATQQTVSSQSVEPLAVVAPSPTAGSNTGKARMRWTPELHERFVDAVNILGGSERCPEANEGRQFDHLSCKKSSSEIQNS

SEQ ID NO: 188511 - protein, 158 aa, Zea Mays
MERELRSTPLPPHQTTVAPIRGLFHSNTGSVGPLCSPPSVRFSSHSNPEQYPNHNSYNSQVPSTASSSTLNYGSQYGGFEPSITDFPRDIEPTWCPDPVESILGYSGDVPAGNNLTGTTSIGASDDLTKQTEWWTEFMNEDWKDMVDNPTSTETQPVR

SEQ ID NO: 188512 - protein, 248 aa, Zea Mays
MGSKGVALALLLCLSGAAVGAWARPVATKDAAADEKFLWLKKHFGKGGGGLGGGGGGGGGLGGGVGHGFGKGGGLGGGIGHGLGGGYGKGGGIDHGISGGYGKGGGLGGGYGKGGGLGGDIGHGMGGGHGKGGGIGHGMGGGFGKGGGGLGGGSGYGAGGGGGLGGGSGHGMGAGFSKGGGLGGGDGLGGGSGHGMGAGFGKGGGLGGGGGGGGGGGFGKGFGFGFGKGSGFGGGGGGGGGGGIGDHH

SEQ ID NO: 188513 - protein, 146 aa, Zea Mays
MEVAGACCHAGEERKVAVPIGNDAEVEPCVIAVDDSSVDRAIVTALLRRSKYRVTAVDSGKRALEILGSEPNVSMIITDYWMPEMTGYDLLKKESSKLKRIPVVIMSSENVPTRITRCLEEGAEDFLLKPVRPSDISRITTRMLLH

SEQ ID NO: 188514 - protein, 996 aa, Zea Mays
MDHGRYAPQHGWENNSAPNGYGVINEPDFRSGGSYNARRSVDEGFPRDSYGRGAFYHDTHDRNMYASPPSAGGMWSQPRRNHDEDYATARDHRSHRDFGADRSKRIGSRERAEFHGEFEDRYRSSHQSREDSYERDHEYGRYGYDSDYERGKRDSSWRRRDSCDSERERSGLSREREESPYTRHSRSRSHGRDDRSRSRSRSRSPRPRSHGRNQRDGLYYDNRFDRRREYDWDDRGHGDSVAPSATVVVKGLSLKTNDDDLYKILAQWGPLRSVRVIRERNSGMSRGFAFIDFPTVEAARRMMEATGENGLEIDGRNVFFQYSSKPTGGMGGPSLGQENFTRPTYGHRTAAAPCDWICTICGCMNFARRTSCFQCNEPRTEDALPADATGSASHFGRRGSELGPTHVLVVRGLDENADEEMLRYEFAKHAPIKDIRLVRDKFTHVSRGFAFVHFHSVEDATKALEATNGITLEKNGQVLRVAYAKSTHGPASGGSQSNSLAAAAIEAASFAQQYDAIGWAPKEYNPDDKQNNNSESQKDGSTAQSGFVWDEKSGYYYDSASGFYYDGTTGLYYDSNSGVWYSYDQQTQQYVPCNDQSNTKAAGEAASENTKTSDSNSGKKVVISAPAATIKQSEKTSLPDAVQAAANAALAAEKREKEKAKEIKLASKNSLIANKKMSNVLAMWKQRNQEGQAARIVLDDKEPANSDDKFSHSRSGTGFSLKSKPNSDLENAMGNSLGQGMTSTQTLDSVVKPRPVSNSLGTTVMGVIRGSARGVIKSDTTFHALSDAGSTDSRTTITTRASGLMTSSEALITPAPFKTDVSALVSNTPSGVSGSGKRRFSEAPGQSQYRDRAAERRNLYGSSHGTDTVGLDSTGDYPSRKGSSEIGSMPFPPGVGERSSGEIGNSENYEVITADRAIDESNVGNRILRNMGWQEGLGLGKDASGIKEPVLAKSVDARAGLGSQQRKPDPSLEAQAGDSYKTIIQKKAMARFKEMS

SEQ ID NO: 188515 - protein, 875 aa, Zea Mays
MDHGRYAPQHGWENNSAPNGYGVINEPDFRSGGSYNARRSVDEGFPRDSYGRGAFYHDTHDRNMYASPPSAGGMWSQPRRNHDEDYATARDHRSHRDFGADRSKRIGSRERAEFHGEFEDRYRSSHQSREDSYERDHEYGRYGYDSDYERGKRDSSWRRRDSCDSERERSGLSREREESPYTRHSRSRSHGRDDRSRSRSRSRSPRPRSHGRNQRDGLYYDNRFDRRREYDWDDRGHGDSVAPSATVVVKGLSLKTNDDDLYKILAQWGPLRSVRVIRERNSGMSRGFAFIDFPTVEAARRMMEATGENGLEIDGRNVFFQYSSKPTGGMGGPSLGQENFTRPTYGHRTAAAPCDWICTICGCMNFARRTSCFQCNEPRTEDALPADATGSASHFGRRGSELGPTHVLVVRGLDENADEEMLRYEFAKHAPIKDIRLVRDKFTHVSRGFAFVHFHSVEDATKALEATNGITLEKNGQVLRVAYAKSTHGPASGGSQSNSLAAAAIEAASFAQQYDAIGWAPKEYNPDDKQNNNSESQKDGSTAQSGFVWDEKSGYYYDSASGFYYDGTTGLYYDSNSGVWYSYDQQTQQYVPCNDQSNTKAAGEAASENTKTSDSNSGKKVVISAPAATIKQSEKTSLPDAVQAAANAALAAEKREKEKAKEIKLASKNSLIANKKMSNVLAMWKQRNQEGQAARIVLDDKEPANSDDKFSHSRSGTGFSLKSKPNSDLENAMGNSLGQGMTSTQTLDSVVKPRPVSNSLGTTVMGVIRGSARGVIKSDTTFHALSDAGSTDSRTTITTRASGLMTSSEALITPAPFKTDVSALVSNTPSGVSGSGKRRFSEAPGQSQYRDRAAERRNLYGSSHGTDTVGLDSMR

SEQ ID NO: 188516 - protein, 933 aa, Zea Mays
MDHGRYAPQHGWENNSAPNGYGVINEPDFRSGGSYNARRSVDEGFPRDSYGRGAFYHDTHDRNMYASPPSAGGMWSQPRRNHDEDYATARDHRRHDTDYRNDGKHHEFDSYRGVDRLHDNYRATDNYYESGSHRDFGADRSKRIGSRERAEFHGEFEDRYRSSHQSREDSYERDHEYGRYGYDSDYERGKRDSSWRRRDSCDSERERSGLSREREESPYTRHSRSRSHGRDDRSRSRSRSRSPRPRSHGRNQRDGLYYDNRFDRRREYDWDDRGHGDSVAPSATVVVKGLSLKTNDDDLYKILAQWGPLRSVRVIRERNSGMSRGFAFIDFPTVEAARRMMEATGENGLEIDGRNVFFQYSSKPTGGMGGPSLGQENFTRPTYGHRTAAAPCDWICTICGCMNFARRTSCFQCNEPRTEDALPADATGSASHFGRRGSELGPTHVLVVRGLDENADEEMLRYEFAKHAPIKDIRLVRDKFTHVSRGFAFVHFHSVEDATKALEATNGITLEKNGQVLRVAYAKSTHGPASGGSQSNSLAAAAIEAASFAQQYDAIGWAPKEYNPDDKQNNNSESQKDGSTAQSGFVWDEKSGYYYDSASGFYYDGTTGLYYDSNSGVWYSYDQQTQQYVPCNDQSNTKAAGEAASENTKTSDSNSGKKVVISAPAATIKQSEKTSLPDAVQAAANAALAAEKREKEKAKEIKLASKNSLIANKKMSNVLAMWKQRNQEGQAARIVLDDKEPANSDDKFSHSRSGTGFSLKSKPNSDLENAMGNSLGQGMTSTQTLDSVVKPRPVSNSLGTTVMGVIRGSARGVIKSDTTFHALSDAGSTDSRTTITTRASGLMTSSEALITPAPFKTDVSALVSNTPSGVSGSGKRRFSEAPGQSQYRDRAAERRNLYGSSHGTDTVGLDSRIFLLPLECILDPTYSLGMMFS

SEQ ID NO: 188517 - protein, 989 aa, Zea Mays
MDHGRYAPQHGWENNSAPNGYGVINEPDFRSGGSYNARRSVDEGFPRDSYGRGAFYHDTHDRNMYASPPSAGGMWSQPRRNHDEDYATARDHRSHRDFGADRSKRIGSRERAEFHGEFEDRYRSSHQSREDSYERDHEYGRYGYDSDYERGKRDSSWRRRDSCDSERERSGLSREREESPYTRHSRSRSHGRDDRSRSRSRSRSPRPRSHGRNQRDGLYYDNRFDRRREYDWDDRGHGDSVAPSATVVVKGLSLKTNDDDLYKILAQWGPLRSVRVIRERNSGMSRGFAFIDFPTVEAARRMMEATGENGLEIDGRNVFFQYSSKPTGGMGGPSLGQENFTRPTYGHRTAAAPCDWICTICGCMNFARRTSCFQCNEPRTEDALPADATGSASHFGRRGSELGPTHVLVVRGLDENADEEMLRYEFAKHAPIKDIRLVRDKFTHVSRGFAFVHFHSVEDATKALEATNGITLEKNGQVLRVAYAKSTHGPASGGSQSNSLAAAAIEAASFAQQYDAIGWAPKEYNPDDKQNNNSESQKDGSTAQSGFVWDEKSGYYYDSASGFYYDGTTGLYYDSNSGVWYSYDQQTQQYVPCNDQSNTKAAGEAASENTKTSDSNSGKKVVISAPAATIKQSEKTSLPDAVQAAANAALAAEKREKEKAKEIKLASKNSLIANKKMSNVLAMWKQRNQEGQAARIVLDDKEPANSDDKFSHSRSGTGFSLKSKPNSDLENAMGNSLGQGMTSTQTLDSVVKPRPVSNSLGTTVMGVIRGSARGVIKSDTTFHALSDAGSTDSRTTITTRASGLMTSSEALITPAPFKTDVSALVSNTPSGVSGSGKRRFSEAPGQSQYRDRAAERRNLYGSSHGTDTVGLDSTGDYPSRKGSSEIGSMPFPPGVGERSSGEIGNSENYEVITADRAIDESNVGNRILRNMGWQEGLVRSSPTYFSISLRCSGLIAFSLQYIMHLITSVYALLFLVLLQMLRRKGLRNG

SEQ ID NO: 188518 - protein, 294 aa, Zea Mays
MYASPPSAGGMWSQPRRNHDEDYATARDHRRHDTDYRNDGKHHEFDSYRGVDRLHDNYRATDNYYESGSHRDFGADRSKRIGSRERAEFHGEFEDRYRSSHQSREDSYERDHEYGRYGYDSDYERGKRDSSWRRRDSCDSERERSGLSREREESPYTRHSRSRSHGRDDRSRSRSRSRSPRPRSHGRNQRDGLYYDNRFDRRREYDWDDRGHGDSVAPSATVVVKGLSLKTNDDDLYKILVQVPLHHLLHRLKVYFLVQFNHFVCSLVGSVGTSTQCACDQGTEFWHVSWICFY

SEQ ID NO: 188519 - protein, 200 aa, Zea Mays
MSNVLAMWKQRNQEGQAARIVLDDKEPANSDDKFSHSRSGTGFSLKSKPNSDLENAMGNSLGQGMTSTQTLDSVVKPRPVSNSLGTTVMGVIRGSARGVIKSDTTFHALSDAGSTDSRTTITTRASGLMTSSEALITPAPFKTDVSALVSNTPSGVSGSGKRRFSEAPGQSQYRDRAAERRNLYGSSHGTDTVGLDSRFK

SEQ ID NO: 188520 - protein, 84 aa, Zea Mays
MESSNVNVPKTKKTYCKNKECRKHTLHKVTQYKKGKDSLSAQGKRRYDRKQSGYGGQTKPVFHKKRCKHFEIGGDKKGKGTSLF

SEQ ID NO: 188521 - protein, 104 aa, Zea Mays
MNIPSCSSMLNPLVSCSKSPLLRKFDVALNISFSILNSDLHQLSCPSRIYLTFLALVREDVWMGLFSSERYGIIAGRTTKNSSSSSSSSSNKNCLTCSSQEPII

SEQ ID NO: 188522 - protein, 152 aa, Zea Mays
MELHGMRFSGFMVQLWPRDRVKSAAPTPLLPLSSPIKGSIPFCTPSQRSSNLLVNLYSSPPLRCSRRRHITPIGAADAVCRRRGRPEADTVLPSTFLRAVLCSSPSFESSEANCVVEDSNLIEDNPQDMLEQGKWILPLHILFVPINAYNNV

SEQ ID NO: 188523 - protein, 180 aa, Zea Mays
MAAAVSSWLPATTTSPRSPAKSLLQPRGRARTAPMLGSLSSPSLRPLHVHPPLRYVLRRHPPTCRPPHRASHLLIARADAPAAPPTSSFSRRRCRQHPLPGPTQTPARLDTPRRPPPSSPSLDPSLPRPSRPDPRCCVLLGSIRHPFGRIAVFMAGFVAAVAFPAGSTDTPSTLQRARTP

SEQ ID NO: 188524 - protein, 124 aa, Zea Mays
MRCCSSSSGVSTPSSSTTFTTPSLLAHAREGIGGRGQHVGGSVGQKATRGRWILRGKKVVPREVEPPRWEPGNHANWEGGASGVRMMRRHWTSTLLYETEKIICRNCKVEATSRTSRMRVEGEI

SEQ ID NO: 188525 - protein, 291 aa, Zea Mays
MWRGSDWKSSLPPLENSYEVTKVQESFSGKESNEKVTHSGNVLAQIELVSAATSHKNWNLDEGQEKFKDSTDSDMVLNSAKDVPALFHSTGISRTEPSADIPLEYSPLNPVCDIMDPSLNCRSIPTNNCESRALVEKSEHCPDDYNLEMKRKRNDGTKGTVVLNSGSKVEGLLCLLEQAIHSGRALVLSEDELADSDLVYEKSVAFTKSIPRRLVFENTRRKSSARRNVPDNHARTKTHLVENKMLSSPVENKFIVNGGSAMQTIDHGQEFLSDVVHQGTLRVDELAKLLA

SEQ ID NO: 188526 - protein, 70 aa, Zea Mays
MQDLPMEVQRHGSMARRWIYTAQTLTPSGQPARERFFYASYFVAACGQAGEFAEQLATNAARKIDLGTSL

SEQ ID NO: 188527 - protein, 125 aa, Zea Mays
MGGPSRKRRPDRTARPSSSGFIVRDPLGISLRYEPTTTRVGRGSVRTLPSAKSRPSRPNGSSNFRICGRDKRTRLRPSGQSGLATQVAQDGGERRGPVCGQRTRLCGKLYKTISTQLSLQACFKC

SEQ ID NO: 188528 - protein, 378 aa, Zea Mays
MSFRSIEQLLRRNSKTKISRNIVDRNHDQKEEQLVQSLRELLLASKQLPDKFDDYYVLLRFLKMRGFNILKAKEMFLNMLKWREDCSVDAIANDFKFEEYDAVKRCYPHGFHGVDRFGRPLYIERVGSVDLSKLMQVTTIDRYVKYHISEQEKTISLRYPVCSLVAKKHIASTTAIFDVKGLGLNNFSKSAREMFAEIQKIDSNYYPETLNQLYIINAGTGFRALWKVLKTFMEARTLAKIQVLGTNYLNTVLEAVDPSNLPEFLGGTCTCPTGGCLLQDKGPWTDPEMIRASKEAFGKGQKSFNELAATIACESFTGCQVGFDTGENILRKQVDEQILEKIRELEHCAAKSGETLQILICKQQELTGHIEQLRKILQ

SEQ ID NO: 188529 - protein, 328 aa, Zea Mays
MSFRSIEQLLRRNSKTKISRNIVDRNHDQKEEQLVQSLRELLLASKQLPDKFDDYYVLLRFLKMRGFNILKAKEMFLNMLKWREDCSVDAIANDFKFEEYDAVKRCYPHGFHGVDRFGRPLYIERVGSVDLSKLMQVTTIDRYVKYHISEQEKTISLRYPVCSLVAKKHIASTTAIFDVKGLGLNNFSKSAREMFAEIQKIDSNYYPETLNQLYIINAGTGFRALWKVLKTFMEARTLAKIQVLGTNYLNTVLEAVDPSNLPEFLGGTCTCPTGGCLLQDKGPWTDPEMIRASKVRKHSVKVRSLSMNWLPQLPVKALQVVRSLPQNK

SEQ ID NO: 188530 - protein, 403 aa, Zea Mays
MSFRSIEQLLRRNSKTKISRNIVDRNHDQKEEQLVQSLRELLLASKQLPDKFDDYYVLLRFLKMRGFNILKAKEMFLNMLKWREDCSVDAIANDFKFEEYDAVKRCYPHGFHGVDRFGRPLYIERVGSVDLSKLMQVTTIDRYVKYHISEQEKTISLRYPVCSLVAKKHIASTTAIFDVKGLGLNNFSKSAREMFAEIQKIDSNYYPETLNQLYIINAGTGFRALWKVLKTFMEARTLAKIQVLGTNYLNTVLEAVDPSNLPEFLGGTCTCPTGGCLLQDKGPWTDPEMIRASKEAFGKGQKSFNELAATIACESFTGCQEPSAKQVDSTSRKRRTLGMLFKDDQVGFDTGENILRKQVDEQILEKIRELEHCAAKSGETLQILICKQQELTGHIEQLRKILQ

SEQ ID NO: 188531 - protein, 360 aa, Zea Mays
MSFRSIEQLLRRNSKTKISRNIVDRNHDQKEEQLVQSLRELLLASKQLPDKFDDYYVLLRFLKMRGFNILKAKEMFLNMLKWREDCSVDAIANDFKFEEYDAVKRCYPHGFHGVDRFGRPLYIERVGSVDLSKLMQVTTIDRYVKYHISEQEKTISLRYPVCSLVAKKHIASTTAIFDVKGLGLNNFSKSAREMFAEIQKIDSNYYPETLNQLYIINAGTGFRALWKVLKTFMEARTLAKIQVLGTNYLNTVLEAVDPSNLPEFLGGTCTCPTGGCLLQDKGPWTDPEMIRASKVRKHSVKVRSLSMNWLPQLPVKALQVVRLDLIQVKIFYGNKSMNRSWRRSENLNTALLRVGRPCRY

SEQ ID NO: 188532 - protein, 213 aa, Zea Mays
MRGFNILKAKEMFLNMLKWREDCSVDAIANDFKFEEYDAVKRCYPHGFHGVDRFGRPLYIERVGSVDLSKLMQVTTIDRYVKYHISEQEKTISLRYPVCSLVAKKHIASTTAIFDVKGLGLNNFSKSAREMFAEIQKIDSNYYPETLNQLYIINAGTGFRALWKVLKTFMEARTLAKIQVLGTNYLNTVLEAVDPRIFRRNLHLSNRRMLTPR

SEQ ID NO: 188533 - protein, 330 aa, Zea Mays
MSFRSIEQLLRRNSKTKISRNIVDRNHDQKEEQLVQSLRELLLASKQLPDKFDDYYVLLRFLKMRGFNILKAKEMFLNMLKWREDCSVDAIANDFKFEEYDAVKRCYPHGFHGVDRFGRPLYIERVGSVDLSKLMQVTTIDRYVKYHISEQEKTISLRYPVCSLVAKKHIASTTAIFDVKGLGLNNFSKSAREMFAEIQKIDSNYYPETLNQLYIINAGTGFRALWKVLKTFMEARTLAKIQVLGTNYLNTVLEAVDPSNLPEFLGGTCTCPTGGCLLQDKGPWTDPEMIRASKVRKHSVKVRSLSMNWLPQLPVKALQVVRLSLSHPDF

SEQ ID NO: 188534 - protein, 158 aa, Zea Mays
MADSRTLSPPAKETSCASPGPADPPARLVLDLMPRRPPASNLYMKASFYMKEHRTSIQAEFHLEVIMSLSSILVLTSLVPLNCLGAHGIPAVTDGSRNRVAQISFLPRGLICSFFIGGNCTCFSGLVATTFFFFLFYRSAPLSCRARPNCKLHTKFIG

SEQ ID NO: 188535 - protein, 440 aa, Zea Mays
MADSRTLSPPAKETSCASPGPADPPARLVLDLMPRRPPASNLYMKASFYMKEHRTSIQAEFHLEVYWHLVQVQSKKLITKMSFRSIEQLLRRNSKTKISRNIVDRNHDQKEEQLVQSLRELLLASKQLPDKFDDYYVLLRFLKMRGFNILKAKEMFLNMLKWREDCSVDAIANDFKFEEYDAVKRCYPHGFHGVDRFGRPLYIERVGSVDLSKLMQVTTIDRYVKYHISEQEKTISLRYPVCSLVAKKHIASTTAIFDVKGLGLNNFSKSAREMFAEIQKIDSNYYPETLNQLYIINAGTGFRALWKVLKTFMEARTLAKIQVLGTNYLNTVLEAVDPSNLPEFLGGTCTCPTGGCLLQDKGPWTDPEMIRASKVRKHSVKVRSLSMNWLPQLPVKALQVVRLDLIQVKIFYGNKSMNRSWRRSENLNTALLRVGRPCRY

SEQ ID NO: 188536 - protein, 265 aa, Zea Mays
MSFRSIEQLLRRNSKTKISRNIVDRNHDQKEEQLVQSLRELLLASKQLPDKFDDYYVLLRFLKMRGFNILKAKEMFLNMLKWREDCSVDAIANDFKFEEYDAVKRCYPHGFHGVDRFGRPLYIERVGSVDLSKLMQVTTIDRYVKYHISEQEKTISLRYPVCSLVAKKHIASTTAIFDVKGLGLNNFSKSAREMFAEIQKIDSNYYPETLNQLYIINAGTGFRALWKVLKTFMEARTLAKIQVLGTNYLNTVLEAVDPRRMLTPR

SEQ ID NO: 188537 - protein, 296 aa, Zea Mays
MSFRSIEQLLRRNSKTKISRNIVDRNHDQKEEQLVQSLRELLLASKQLPDKFDDYYVLLRFLKMRGFNILKAKEMFLNMLKWREDCSVDAIANDFKFEEYDAVKRCYPHGFHGVDRFEQEKTISLRYPVCSLVAKKHIASTTAIFDVKGLGLNNFSKSAREMFAEIQKIDSNYYPETLNQLYIINAGTGFRALWKVLKTFMEARTLAKIQVLGTNYLNTVLEAVDPSNLPEFLGGTCTCPTGGCLLQDKGPWTDPEMIRASKVRKHSVKVRSLSMNWLPQLPVKALQVVRSLPQNK

SEQ ID NO: 188538 - protein, 353 aa, Zea Mays
MSFRSIEQLLRRNSKTKISRNIVDRNHDQKEEQLVQSLRELLLASKQLPDKFDDYYVLLRFLKMRGFNILKAKEMFLNMLKWREDCSVDAIANDFKFEEYDAVKRCYPHGFHGVDRFGRPLYIERVGSVDLSKLMQVTTIDRYVKYHISEQEKTISLRYPVCSLVAKKHIASTTAIFDVKGLGLNNFSKSAREMFAEIQKIDSNYYPETLNQLYIINAGTGFRALWKVLKTFMEARTLAKIQVLGTNYLNTVLEAVDPSNLPEFLGGTCTCPTGGCLLQDKGPWTDPEMIRASKVVGFDTGENILRKQVDEQILEKIRELEHCAAKSGETLQILICKQQELTGHIEQLRKILQ

SEQ ID NO: 188539 - protein, 1122 aa, Zea Mays
MTLTCSTSSSFPPSPAGSSLPIDGANRRVLYFSIVPPPSQLAEHRHVAASVSRGRRSCREAIDKHSASEEVVMDNILPNSDFSEGLHLWQSNSCHAFVAVEGSGYHYGVRPHSGSTYAVLTHRTQSWQGLEQDITEKVTLGTEYFVAAYVRVHGEVHEPIGVQVTLKLEEDGSSTNYLSIARILASQERWEKVEGSFNLTTLPRRLVFYLEGPPPGVDLLIDSVTISYKKTASSVGGTENIILNYDFSKGLHPWNPIRCHAYVASQWSGFLDGIRGNSGENYAVVSKRTEHWQGLEQDITNQVSTGTVYVVSAFVRVDGIVQGQVEVKATLRLQNADGSTHYNPVGSVVASKEKWNKLEGSFSLTNMPKNVVFYLEGPPAGVDLVIDSVTVACSRHKQSKEVKVPSGVETIIKNPHFEDGLKNWSGRGCNICRHEFSAYGNVRPLNGSYFASATGRVHNWNGIQQEITGRVQRKVLYEISSAVRIFGSANDTEVRATLWVQEYGRERYVGLAKNQTSDQQWTHLKGKFLLHAPFTKAVIFIEGPPAGIDILVDGLVLSPARKLQAAPCPKIENVLYGTNLLHNNGFTRGLSGWSPMGSCRLSIQTEAPHMLPSILKDRASQKHISGHYILATNRTDVWMGPSQVITDKLRLHVTYRVSAWVRVGSGGHGRHHVNVCLAVDKNQWVNGGQVDADGDQWYEIKGAFKLEKQPSKVTAYVQGPPAGVDIRVMDFQIYAVDRKARFEYLKEKTDKVRKRDVVLKFQGSNAVNLLGSSLRIQQTENSFPFGSCIARHNIENEDLAEFFVKNFNWAVFENELKWYHTEAEQGRLNYKDSDELLEFCEKHKIQVRGHCLFWEVEDAVQPWVQSLQGHHLMAAIQNRLQSLLSRYKGRFRHHDVNNEMLHGSFYEDRLGRDIRAYMFREAHKLDPSAVLFVNDYNVEDGCDTKSTPEKLVEQVVDLQDRGAPVGGIGVQGHISHPVGEIICDSLDKLAILGLPIWITELDVTAENEHIRADDLEVFLREAFAHPAVGGIILWGFWEMFMFREHAHLVDADGTINEAGRRYLALKQEWLTRMNGSVDHQGEFKFRGYHGSYTVEVNTPSGKVARSFVVDKDSPVQVIALNV

SEQ ID NO: 188540 - protein, 1099 aa, Zea Mays
MRRRCSWLSSLFRPRRADRSLPQPDPQGPDSEPKAEQAIDKHSASEEVVMDNILPNSDFSEGLHLWQSNSCHAFVAVEGSGYHYGVRPHSGSTYAVLTHRTQSWQGLEQDITEKVTLGTEYFVAAYVRVHGEVHEPIGVQVTLKLEEDGSSTNYLSIARILASQERWEKVEGSFNLTTLPRRLVFYLEGPPPGVDLLIDSVTISYKKTASSVGGTENIILNYDFSKGLHPWNPIRCHAYVASQWSGFLDGIRGNSGENYAVVSKRTEHWQGLEQDITNQVSTGTVYVVSAFVRVDGIVQGQVEVKATLRLQNADGSTHYNPVGSVVASKEKWNKLEGSFSLTNMPKNVVFYLEGPPAGVDLVIDSVTVACSRHKQSKEVKVPSGVETIIKNPHFEDGLKNWSGRGCNICRHEFSAYGNVRPLNGSYFASATGRVHNWNGIQQEITGRVQRKVLYEISSAVRIFGSANDTEVRATLWVQEYGRERYVGLAKNQTSDQQWTHLKGKFLLHAPFTKAVIFIEGPPAGIDILVDGLVLSPARKLQAAPCPKIENVLYGTNLLHNNGFTRGLSGWSPMGSCRLSIQTEAPHMLPSILKDRASQKHISGHYILATNRTDVWMGPSQVITDKLRLHVTYRVSAWVRVGSGGHGRHHVNVCLAVDKNQWVNGGQVDADGDQWYEIKGAFKLEKQPSKVTAYVQGPPAGVDIRVMDFQIYAVDRKARFEYLKEKTDKVRKRDVVLKFQGSNAVNLLGSSLRIQQTENSFPFGSCIARHNIENEDLAEFFVKNFNWAVFENELKWYHTEAEQGRLNYKDSDELLEFCEKHKIQVRGHCLFWEVEDAVQPWVQSLQGHHLMAAIQNRLQSLLSRYKGRFRHHDVNNEMLHGSFYEDRLGRDIRAYMFREAHKLDPSAVLFVNDYNVEDGCDTKSTPEKLVEQVVDLQDRGAPVGGIGVQGHISHPVGEIICDSLDKLAILGLPIWITELDVTAENEHIRADDLEVFLREAFAHPAVGGIILWGFWEMFMFREHAHLVDADGTINEAGRRYLALKQEWLTRMNGSVDHQGEFKFRGYHGSYTVEVNTPSGKVARSFVVDKDSPVQVIALNV

SEQ ID NO: 188541 - protein, 308 aa, Zea Mays
MEEVQNCVMKLRSNPRRHRDKVYVGCGAGFGGDRLMAAYKLLQRVKELNYLVLECLAERTLADRYRIMVSGGKGYDPRVKEWMSLLLPLAFERKVCIITNMGAMDPLGAQKEVLNLASVLGLEITVAVAYESSFETQGSPVLSDESTGGRGGCSTYLGAASIVHCLENYKPHVVITSRVADASLFLAPMIYELGWNWNDTQLAQGTLASHLLECGCQLTGGYFMHPGDAYRDFPFEQLLDLSLPFAEVSCRGEVIVSKVDGSGGLLSPHTCAEQLLYEVGDPANYITPDMVKSKPITVTIVASSLLKH

SEQ ID NO: 188542 - protein, 113 aa, Zea Mays
MEEVQNCVMKLRSNPRRHRDKVYVGCGAGFGGDRLMAAYKLLQRVKELNYLVLECLAERTLADRYRIMVSGGKGYDPRVKEWMSLLLPLAFERKVCIITNMGASKILLAMVQL

SEQ ID NO: 188543 - protein, 452 aa, Zea Mays
MIYELGWNWNDTQLAQGTLASHLLECGCQLTGGYFMHPGDAYRDFPFEQLLDLSLPFAEVSCRGEVIVSKVDGSGGLLSPHTCAEQLLYEVGDPANYITPDMVVDFCNVQFHQISKDKVSCDGAKPSNACCPEKLLQLSPTESGWKGWGEISYGGHQCLKRAQAAEYLVRSWIGERYPGINEKIVSYVMGYDSLKAIGGDEDSYLAKQVLDVRLRMDGLFELEEHAVQFVEEFIALYTNGPAGGGGISTGHRKEIILQKMLVDRENIFWRSHAKKASIPCLHNQATYSETGQARISQAQRNPTCRTMAIQHFEASTETPASPAPALPGKRVALYHVAHSRAGDKGNDMNFSVIPHSPADIGRLRSVITPDWVKNAVSPLLGSSSFPDERDVQHRNKLLELVTVEIYYVPGISSLNVVVRNILDGGVNCSRRIDRHGKTLSDVILCQQVILPP

SEQ ID NO: 188544 - protein, 370 aa, Zea Mays
MKIRRGWGRNFMEKFSCGGAKKDTEPEAKLTAATKISGGRPVESSNKLVNAAPTRCSSQRARQETAGSGNLSEELDKKKQQEWDKETTEGHAVSQHEAGAELDMTMIVQSMKRGKRSARRRRQSSAQLLGFNVRNMAKAGRNDQAIGSKKMKRTRRGTRSLCVHNRGAKEKKCVGGESDASHQSTPANLVKAQDSPADTDAVEHLSVPKSDTSLEPKEPCGIDADEFASNQSGVPVPADGTIMTNIWTDFKESEDAVADGLMATTDVISLYEAKENHTKLDPKIIPGLDLNDGAEKFDTSTAQSALASLLPTVSAPDPCIEFAVKLLKDETPLAAYVPQADEIIGKMVCRQKSTAVGTSKSAQGRKEKKD

SEQ ID NO: 188545 - protein, 447 aa, Zea Mays
MAGEKAPRAFSIEELPGHLIGEVLTSGGLAAADLARLEATCRALRPLAEYAASKLCAARAAFAAMGPAARGELLERCGGSWKRVLRFLQSVEQSSGTVETSSGSMQVATGRYHTLLVHDSSVYSCGSSLCGVLGHGPDTTQCAAFSRVSFPSLSRVINISASHNHAAFVTESGEVFTCGDNSSLCCGHGEVGRTIFRPMQVEALKGIPCKQVATGLSFTVILTRDGQVYTCGSNTHGQLGHGDTIDRATPKLIELFEGPTQVVQIAAGASYTFAVTDDGTVHSFGSCTNFCLGHGDQHDELLPRAIQSFKRRNIHVVRVSAGDEHAVALDALGHVCARKRKTFVLTDEGSVVAFGWMGFGSLGFLDRGTSDKVMRPRVLESLQDHYVSQISTGLYHTVAVTNKGIVFGFGDNERAQLGQEYIRGCLKPTEIMFQKSIEDIPIAAPSG

SEQ ID NO: 188546 - protein, 155 aa, Zea Mays
MAGEKAPRAFSIEELPGHLIGEVLTSGGLAAADLARLEATCRALRPLAEYAASKLCAARAAFAAMGPAARGELLERCGGSWKRVLRFLQSVEQSSGTVETSSGSLVWCVRSWPRYYTMCSIQSGFLPITFPCYKHLCFTQPCCFCYGVWGGFHLW

SEQ ID NO: 188547 - protein, 323 aa, Zea Mays
MALKPLFFKFPNCFVFTCGDNSSLCCGHGEVGRTIFRPMQVEALKGIPCKQVATGLSFTVILTRDGQVYTCGSNTHGQLGHGDTIDRATPKLIELFEGPTQVVQIAAGASYTFAVTDDGTVHSFGSCTNFCLGHGDQHDELLPRAIQSFKRRNIHVVRVSAGDEHAVALDALGHVYTWGRGYCGALGHGDENDKTSPELIGSLKGQVAVQVCARKRKTFVLTDEGSVVAFGWMGFGSLGFLDRGTSDKVMRPRVLESLQDHYVSQISTGLYHTVAVTNKGIVFGFGDNERAQLGQEYIRGCLKPTEIMFQKSIEDIPIAAPSG

SEQ ID NO: 188548 - protein, 191 aa, Zea Mays
MASTSPRRSSGGDSASPSAPLIPSPPTSPASGPSGGPLGRLTSLRGAARFIRRTGSRRLMREPSVAVRETAAEHLEERQTDWAYSKPVVVLDMLWNLAFVAVAAAVLAASVGERPTVPLRVWIVGYVLQCLLHVLSVTVEYRRRRRNADQEGAGDEDLKLSIVKHLESANTMFSFIWWIVGFYWVSAGGSI

SEQ ID NO: 188549 - protein, 186 aa, Zea Mays
MFSFIWWIVGFYWVSAGGKALSHDAPQLYWLSIVFLAFDVFFVVFCVALACVIGIAVCCCLPCIIAILYAVTDQQEGASEDDINNLSKFKFQTMSDADKLAAGIAAPVGGVMTECGTNPPVEHILSAEDAECCICLCPYEDGVELRELPCNHHFHCSCIDKWLHINATCPLCKFDIIKSNRDIEEV

SEQ ID NO: 188550 - protein, 449 aa, Zea Mays
MVSVSVLVAIFKRSTVPTFKSYGIVQARISDCASETFSAIRTVRSFGGEKRQISLFDNLAHAYQNNGTKLGVLKSANESLTRVVVYVSLMALYILGGRKVNAGKLSVGTMVSFIGYTFTLTFAVQGAVNTLGDLRGTLASVERINSILSAKDIDDSLAYGLAKELDGKEFDDSNGVYENGSVNKHFMSELKSSSSCSNLAWSGDIRLKEVHFSYPLRSNVEILNGLDLTIECGKVTALVGPSGAGKSTVVQLLARYYEPTQGSITVAGEDIRVFDKREWSRVVSLVNQDPVLFSVSVGENIAYGLPDDVVSKDEIIKAAKAANAHEFIISLPQGYDTLVGERGSLLSGGQRQRIAIARALLKNAPILILDEATSALDATSERLVQEALNHLMKGRTSLVIAHRLSTVQNAHRIAVCSEGRITELGTHRELVAKGGSYASLVGTQRLAFE

SEQ ID NO: 188551 - protein, 308 aa, Zea Mays
MVSVSVLVAIFKRSTVPTFKSYGIVQARISDCASETFSAIRTVRSFGGEKRQISLFDNLAHAYQNNGTKLGVLKSANESLTRVVVYVSLMALYILGGRKVNAGKLSVGTMVSFIGYTFTLTFAVQGAVNTLGDLRGTLASVERINSILSAKDIDDSLAYGLAKELDGKEFDDSNGVYENGSVNKHFMSELKSSSSCSNLAWSGDIRLKEVHFSYPLRSNVEILNGLDLTIECGKVTALVGPSGAGKSTVVQLLARYYEPTQGSITVAGEDIRVFDKREWSRVVSLVNQEKYIQRLLDRVSLTDHGTVE

SEQ ID NO: 188552 - protein, 349 aa, Zea Mays
MAISTWSARLLLTPASSRATLSPPRPPTTNPLSSFFPRNRLHFVRPRPRPPCAYISAPAPGPEAAYAPPSLDATAAAADVAAAISSSDAVTWAGVWALLSRHRARIAVCIAALVACTTCTLSMPLFSGRFFETLIGRGNEPLWRLLSKIAILYTLEPIFTIIFVINITIIWEQVMARLRSQIFRRILIQKMLFFDRHKVGELTGLLTSDLGSLKSVVSDNISRDRGLRALSEIIGTLCILFTLSTELAPVLGLLMVSVSVLVAIFKRSTVPTFKSYGIVQARISDCASETFSAIRTVRSFGGEKRQISLFDNLRAAGTTTSPFQLLLQQGQHLLFSFWRTTDCCSLSFD

SEQ ID NO: 188553 - protein, 371 aa, Zea Mays
MAISTWSARLLLTPASSRATLSPPRPPTTNPLSSFFPRNRLHFVRPRPRPPCAYISAPAPGPEAAYAPPSLDATAAAADVAAAISSSDAVTWAGVWALLSRHRARIAVCIAALVACTTCTLSMPLFSGRFFETLIGRGNEPLWRLLSKIAILYTLEPIFTIIFVINITIIWEQVMARLRSQIFRRILIQKMLFFDRHKVGELTGLLTSDLGSLKSVVSDNISRDRGLRALSEIIGTLCILFTLSTELAPVLGLLMVSVSVLVAIFKRSTVPTFKSYGIVQARISDCASETFSAIRTVRSFGGEKRQISLFDNLAHAYQNNGTKLGVLKSANESLTRVVVYVSLMALYILGGRKVNAELLIPLVICVAHWLP

SEQ ID NO: 188554 - protein, 360 aa, Zea Mays
MALYILGGRKVNAGKLSVGTMVSFIGYTFTLTFAVQGAVNTLGDLRGTLASVERINSILSAKDIDDSLAYGLAKELDGKEFDDSNGVYENGSVNKHFMSELKSSSSCSNLAWSGDIRLKEVHFSYPLRSNVEILNGLDLTIECGKVTALVGPSGAGKSTVVQLLARYYEPTQGSITVAGEDIRVFDKREWSRVVSLVNQDPVLFSVSVGENIAYGLPDDVVSKDEIIKAAKAANAHEFIISLPQGYDTLVGERGSLLSGGQRQRIAIARALLKNAPILILDEATSALDATSERLVQEALNHLMKGRTSLVIAHRLSTVQNAHRIAVCSEGRITELGTHRELVAKGGSYASLVGTQRLAFE

SEQ ID NO: 188555 - protein, 76 aa, Zea Mays
MVSFIGYTFTLTFAVQGAVNTLGDLRGTLASVERINSILSAKDIDDSLAYGLAKELDGKEFDDSNGVSPFLLSIEI

SEQ ID NO: 188556 - protein, 58 aa, Zea Mays
MKGRTSLVIAHRLSTVQNAHRIAVCSEGRITELGTHRELVAKGGSYASLVGTQRLAFE

SEQ ID NO: 188557 - protein, 182 aa, Zea Mays
MNVDFQHLLDEMSKRFDGYDAKLTQRLSDYGVKLQQRMLDRNLELERRMADLDTRMDDKLASLSTANETRLSQLESVAISFDGWHPCMEGSVDDIRLHVSKLTNLYERSAVEHPTVMTGVLVPAPSPAVRPSAAASTDAQPDRHRLNPSIRDDGCGVVTILDHHPAKEEPVDEESGVQQGSC

SEQ ID NO: 188558 - protein, 1374 aa, Zea Mays
MESLFVGLSHNKPKKSVATAIVREVLSHDWLLLDYICTQGDLALIDFIKEIPCEPRVEVVLIDDAFVERKWMECLFQPSAYLGDEVFIPINIRETHWYLAVIHARNMEIQVLDSLGTSQDRKDLTDFIKGLQRQIDMISQRKELKDHRWPDLQVASWPLREIDMGYAKQTDSSSCGLFLLNYIEYWTGDELSDSFTQDDMSHFRKKMAAILLSSDLNKRRGCLLYKNEKEVDSGSPSDVEILENPTDSNKRKLLHVLDDSEVVFEDEEGPITQADLQRWFVDDWDKRAPVKVSNDGCTSDFLMVGLSTKDMPVTKADSIDVLCDYIMAIEDDATLERTWVRSFNPFKIEISVKDLQNILTTTQDMILRCFDMAVRLLANKESRKPKEEIINNRKHYMDMRFWRMVGFGKLPKYHQDPTTEELAKTLDCWPSMNYYITGCRYVLMPWKFNGCHALFVIDHVKKHVTFIDFTPTQDWCKHMPYKRFNTSYLVLQAMAMWGNDRRLKFVGDNIGVFVDQNGKLIQDGRIIWLDTPASVVIHKPYAVARLPRHVEFYANNVTIDYGEFELSILRARLLLQLLVVMVVVAPFLEELGPPLLKCLNDYGSEISKCQFYLDMLNECRRGGVCLSFSSNWDYSWHEQEFCNVGDDACLILWDARTGIAPPVKLAGTNPAALERKACRPVLCLLLLPPAGLEEGREGGVHLRGGFGVWRGSEGRRGAMARKHGWQLPAHTLQIVAITVFFLLLVAFYVFFAPFLGKQVLEYIAIGVYTPVALAVFILYIRCTSINPADPGIMSKFEDGLIKIPTNGSGIEGMNLPQKANNATGTNSPTSTCRSSLDGHSNQRGSSIGEANMNLGSQLPKKRSSCWLLGGLLCAIFVKEDCRKTDDSELQANGEEALFCTLCNAEWLNNCVGRKNYFTFLALMAISLIWLAIEFGAGIAVIVLCFVDKNASRNIQDKLGNGLTRAPFAVIVGITTYDYVVAMRAMSEAAPEDEEGANIIYSPSNSATTGFSVGSSLGLHHKGAWCTPPRIFIDQDEMIPHLEPGMVPSTVDPDAAGYAERANRAKKAVKISARSLAKLDKNEVMKAAAKARASSSVLRPIDARRGHEADVISSDNASVRSGMSGDYSGTKESNIEMKLSPLQNSYPQSLASQDEYDTGTPTASSLSSPVYIHKLASHSQFSAAPRPAPPERFVPAMVRPPVPTTQITNPGIPRPAVPTTQITNPMFQSATSYVRENRRASVIWDQEAGRYVSVPAQTRMGSGVDLPARNPRFLTNPSGEPSSHVRSVVPGNASSSAMPSGQPSERLTYSGQSIFFGGPMLSTPGVGANRNEADARARPEGSRDPNALCEKARTGSGSSPIFAPGAFQRNPPFDK

SEQ ID NO: 188559 - protein, 170 aa, Zea Mays
MMAVILPRTVRRAAEAALSLHSVPPRAACHFARSLGGVSSACSMEFVSWQNGGGILHRAASVDPTAVVEAGAVVHSGAVLGKEVVVGSGAVVGPSVSIGQSTRVGYNVVLSNCSVGEFCIIHNGSSIGQDGFGFFVDEAGQVKKKPQQPAEGSHHVLYNLRPSEKKKKRT

SEQ ID NO: 188560 - protein, 185 aa, Zea Mays
MDPPLVKMVLAFLWMRLDKLRRNHSSLPKGAIMSSIISAPPKKRKRELKAQLMLCARIGDHVEIGANTCIDRGSWRETTVGNHTKIDNLVQIGHNVVIGKCCMICGQVGIAGSATLGDYVTLGGRVAIRDHVSVASKVRLAANSLVTKDIQEPGDYGGFPAVPINEWRRQIANLRLFSKKASVKR

SEQ ID NO: 188561 - protein, 263 aa, Zea Mays
MMAVILPRTVRRAAEAALSLHSVPPRAACHFARSLGGVSSACSMEFVSWQNGGGILHRAASVDPTAVVEAGAVVHSGAVLGKEVVVGSGAVVGPSVSIGQSTRVGYNVVLSNCSVGEFCIIHNGSSIGQDGFGFFVDEAGQVKKKPQMLCARIGDHVEIGANTCIDRGSWRETTVGNHTKIDNLVQIGHNVVIGKCCMICGQVGIAGSATLGDYVTLGGRVAIRDHVSVASKIRSPPRAPETESLRAALVPCRRHPSVSSVLL

SEQ ID NO: 188562 - protein, 187 aa, Zea Mays
MPARRSFFSNCFCSAFIFDTSILCFRYENSSLPEDRIGKLVTETLAAVGLKGVEDRMPSELSGGMKKRVALARSIIFDDTKDVVEPEVLLYDEPTAGLDPIASTVVEDLIRSVHMTGRDALGKPGKIASYVVVTHQHSTIRRAVDRLLFLHEGKVVWEGMTHEFTTSANPIVQQFASGSLDGPIKYF

SEQ ID NO: 188563 - protein, 166 aa, Zea Mays
MPARRYENSSLPEDRIGKLVTETLAAVGLKGVEDRMPSELSGGMKKRVALARSIIFDDTKDVVEPEVLLYDEPTAGLDPIASTVVEDLIRSVHMTGRDALGKPGKIASYVVVTHQHSTIRRAVDRLLFLHEGKVVWEGMTHEFTTSANPIVQQFASGSLDGPIKYF

SEQ ID NO: 188564 - protein, 367 aa, Zea Mays
MERGKAPRISCRPGPSPPYVHSIRTQSRRLTPQNPLAVADRSSLPLLSLSLLPFLPSTPPPSATMASSVAVSLRALAAAPLPKSSPATSCPFFVLLAPALPRRLLRLRSARRLPLAPLAASDSAFESSVGVNYAEPDDSEKDKEVELFGSGDDEGAGELVDDHSVEVSAAVEDEVEEEVGEYVEPPEEAKVYVGNLPYDVDSERLAQLFDQAGVVEVAEVIYNRETDQSRGFGFVTMSTVEEAEKAVEMFHRYDVNGRLLTVNKAAPRGSRVDRPPRQSGPSLRIYVGNLPWQVDDSRLVELFSEHGKVVDARVVYDRETGRSRGFGFVTMASQDELDDAIAALDGQSLDGRALRVNVAEERPRRGF

SEQ ID NO: 188565 - protein, 233 aa, Zea Mays
MSAAGGDLPETVEVTLRAVGPSRPTTLRLPPLLSVAELRGCIARERRLAGTEEVRLRLILRGKTLPHQDDSHVTLRDGDTLIVAVAPKPPVNHLLDDDVEDEEEDELKFRIPQTTTLWKRKFFMFLRDKLRLPDIILMALFSLSMKAWIIIAMWFLLAPIAQKYDIGPLYIIGTGFLIILINLGRRQQVHTPYSTKILGSCQEHLMQIALMQTSGQVNFKPLLGIAEIGTMVC

SEQ ID NO: 188566 - protein, 101 aa, Zea Mays
MSAAGGDLPETVEVTLRAVGPSRPTTLRLPPLLSVAELRGCIARERRLAGTEEVRLRLILRGKTLPHQDDSHVTLRDGGGCPKSEPLMSSLAIYSYSRRGT

SEQ ID NO: 188567 - protein, 266 aa, Zea Mays
MSAAGGDLPETVEVTLRAVGPSRPTTLRLPPLLSVAELRGCIARERRLAGTEEVRLRLILRGKTLPHQDDSHVTLRDGDTLIVAVAPKPPVNHLLDDDVEDEEEDELKFRIPQTTTLWKRKFFMFLRDKLRLPDIILMALFSLSMKAWIIIAMWFLLAPIAQKYDIGPLYIIGTGFLIILINLGRRQQGDVSSSLSGPVTSGGAKGWSVCPSPKPSKLWVLVHTPYSTKILGSCQEHLMQIALMQTSGQVNFKPLLGIAEIGTMVC

SEQ ID NO: 188568 - protein, 165 aa, Zea Mays
MSLSAMGVGALNLNPLCLHWRYTLIVAVAPKPPVNHLLDDDVEDEEEDELKFRIPQTTTLWKRKFFMFLRDKLRLPDIILMALFSLSMKAWIIIAMWFLLAPIAQKYDIGPLYIIGTGFLIILINLGRRQQGDVSAYSIFNEDFRELPGTLNADRIDADIRAGQF

SEQ ID NO: 188569 - protein, 223 aa, Zea Mays
MSAAGGDLPETVEVTLRAVGPSRPTTLRLPPLLSVAELRGCIARERRLAGTEEVRLRLILRGKTLPHQDDSHVTLRDGDTLIVAVAPKPPVNHLLDDDVEDEEEDELKFRIPQTTTLWKRKFFMFLRDKLRLPGNVHAWCSSIFCMKAWIIIAMWFLLAPIAQKYDIGPLYIIGTGFLIILINLGRRQQGDVSAYSIFNEDFRELPGTLNADRIDADIRAGQF

SEQ ID NO: 188570 - protein, 144 aa, Zea Mays
MSAAGGDLPETVEVTLRAVGPSRPTTLRLPPLLSVAELRGCIARERRLAGTEEVRLRLILRGKTLPHQDDSHVTLRDGDTLIVAVAPKPPVNHLLDDDVEDEEEDELYESMDYHCNVVPIGTDCSEVRHWTFIYNWYWFLDHTY

SEQ ID NO: 188571 - protein, 99 aa, Zea Mays
MFLRDKLRLPDIILMALFSLSMKAWIIIAMWFLLAPIAQKYDIGPLYIIGTGFLIILINLGRRQQGDVSAYSIFNEDFRELPGTLNADRIDADIRAGQF

SEQ ID NO: 188572 - protein, 159 aa, Zea Mays
MDEERVRRSDNEHARKRQREPAASTSAERWQTQRTRPRSRADVDRTTAADELEHHRVADVGEQSRQDAERHGELENDLAWELDAPWRAENFTHTIEGFDTSSTGKPGAREIREEGAEDGRAAMGEDWGVTAQRVGRHGRGQSSASSKEMGRSKEGARMV

SEQ ID NO: 188573 - protein, 307 aa, Zea Mays
MECRRENLPIEFLDVFSKKYSELRHDLIRTERHLLKEMGFICHVEHPHKFISNYLATLEAPPELTQEAWNLANDSLRTTLCVRFKSEVVACGVVYAAARRHRVPLPEDPPWWTVFDADEAGIQEVCRVLAHLYSLPKAQYIPVYKDNDSFTVKRISDLQASKESPARAVASDKGTPVPSSSSQEKDPVAKTILNKVKEKSDDEGKPLPAEFDGKENPVANSKNDKSDSGVDRSRERERSRGRERDARGRDSDRDSRGRESDRERDRRRCSRERSSADKEKSRRHSSRDRADYYNSHSSREKDRHRHH

SEQ ID NO: 188574 - protein, 335 aa, Zea Mays
MATAQVLFHRFYCKKSFVRFSAKRVAASCVWLAGKLEESPRKSRHIIFVFHRMECRRENLPIEFLDVFSKKYSELRHDLIRTERHLLKEMGFICHVEHPHKFISNYLATLEAPPELTQEAWNLANDSLRTTLCVRFKSEVVACGVVYAAARRHRVPLPEDPPWWTVFDADEAGIQEVCRVLAHLYSLPKAQYIPVYKDNDSFTVKRISDLQASKESPARAVASDKGTPVPSSSSQEKDPVAKTILNKVKEKSDDEGKPLPAEFDGKENPVANSKNDKSDSGVDRSRERERSRGRERDARGRDSDRDSRGRESDRERDRRRCSRERSSDDSLVIAI

SEQ ID NO: 188575 - protein, 289 aa, Zea Mays
MATAQVLFHRFYCKKSFVRFSAKRVAASCVWLAGKLEESPRKSRHIIFVFHRMECRRENLPIEFLDVFSKKYSELRHDLIRTERHLLKEMGFICHVEHPHKFISNYLATLEAPPELTQEAWNLANDSLRTTLCVRFKSEVVACGVVYAAARRHRVPLPEDPPWWTVFDADEAGIQEVCRVLAHLYSLPKAQYIPVYKDNDSFTVKRISDLQASKESPARAVASDKGTPVPSSSSQEKDPVAKTILNKVKEKSDDEGHSDKEKSRRHSSRDRADYYNSHSSREKDRHRHH

SEQ ID NO: 188576 - protein, 236 aa, Zea Mays
MSLRTTLCVRFKSEVVACGVVYAAARRHRVPLPEDPPWWTVFDADEAGIQEVCRVLAHLYSLPKAQYIPVYKDNDSFTVKRISDLQASKESPARAVASDKGTPVPSSSSQEKDPVAKTILNKVKEKSDDEGKPLPAEFDGKENPVANSKNDKSDSGVDRSRERERSRGRERDARGRDSDRDSRGRESDRERDRRRCSRERSSGHSDKEKSRRHSSRDRADYYNSHSSREKDRHRHH

SEQ ID NO: 188577 - protein, 610 aa, Zea Mays
MERRRADKEEAEEPLRPEEEEDEEDEEEGWDDWCSDGEDVGGGLLCLFCSSSFDSESSLFEHCAAEHCFDFHMIVKELGLDFYSCIKLINFVRSKVAEKKCWSCGQAFSSNTELCSHLHTVENCLIEGKVPWEDDVYLKPFMEDDSLLHSLSIDDDDEDGDCGVSMEKGQYSAGNEVLAEPWGNKLSSISERNDSDISAQFQQECTIGSTQREVRESLHVAIDGHLKVARASVNSKAIKTVDDNYFGSYSSFGIHREMLGDKVRTDAYRDAILGNPSLISGATVLDVGCGTGILSLFAARAGASRVVAVDGSAKMASVATQVAKNNGLLYDENVEAEQKQGSAQVISVVHTKAEELNQKIQVPQNGFDLLVSEWMGYCLLYESMLSSVIYARDHFLKPGGAILPDTAMILGAGFGKGGTSLPFWENVYGFDMSCIGKEVTSTSARFPVVDVLSSQDIVTETAVLHSFDLASMKESEMDFTASFELMLSESSATVSGVTWCYGIVLWFDTGFTDRFCKEKPVVLSTSPFSTPTHWSQTIFTFEEPIAMAKEESTLGSSALAGTDECPATALRSRISIVRASEHRSIDISVETTAISSDGRKRSWPVQIFNL

SEQ ID NO: 188578 - protein, 185 aa, Zea Mays
MDLASLLLSQLLLLPVVTVVSGETAAHPGYAHAEEACSGMLEAEAEKATVLVPAPERREEFDGGRIVDISHYYREDMPEWESSEGSGEFLQLARSMRNGSDIANFSELRLTAHSGTHVDAPGHVFEHYYDTGFDVDTLDLAVLNGPALLVDVPRDKNITADVMASLNIPKGVRRVLFRTLNTDRS

SEQ ID NO: 188579 - protein, 166 aa, Zea Mays
MRGLKQCLLFCWDMSYCTVTGCKTIDNKDKPLVLKELKRVWNKDEPDLPWGQGEFSPSNTLLVDDSPYKALCNPPNTAIFPEPYNYMNQRDDYSLGPGGDLRVYLQRIAAADNVQNFVRDNPFGQKSITESDPNWNFYVKIVDKMEKQIVDQVETKIVDEVERSLG

SEQ ID NO: 188580 - protein, 488 aa, Zea Mays
MSNLDSATPAAAVAEIGTAERDSTTASVSALNGTHRCKKKKIKKNTTREQQELQLDLDSTLTAEAEGQVEAKGNEVEEQDATDAVASGILMEGTAKYYEEDSKVKVSLMPEKEANTTVVSDVVGASGHADINMDPINGDDLSSAQSKANDADVLLKNKDGNKGDKNCAENSVLLQESSARRKRRRGKRKWGSAGGGPGFSSDNGGVVAEHSLHSSANHGLSCICAPCLVEAHEKKIQNIYSPRGSLVRFQRKKLLILDLNGLLADINQDYHNAHLAHAKVRTKLVFRRPYCDDFLRFCFQNFELGIWSSRKRENVESVVDILMRGLKQCLLFCWDMSYCTVTGCKTIDNKDKPLVLKELKRVWNKDEPDLPWGQGEFSPSNTLLVDDSPYKALCNPPNTAIFPEPYNYMNQRDDYSLGPGGDLRVYLQRIAAADNVQNFVRDNPFGQKSITESDPNWNFYVKIVDKMEKQIVDQVETKIVDEVERSLG

SEQ ID NO: 188581 - protein, 446 aa, Zea Mays
MMEGTAKYYEEDSKVKVSLMPEKEANTTVVSVSESTPKHKKRRKKKNKIQGQLDSAKASSSVVSMDIIAADKSENGCTDVVGASGHADINMDPINGDDLSSAQSKANDADVLLKNKDGNKGDKNCAENSVLLQESSARRKRRRGKRKWGSAGGGPGFSSDNGGVVAEHSLHSSANHGLSCICAPCLVEAHEKKIQNIYSPRGSLVRFQRKKLLILDLNGLLADINQDYHNAHLAHAKVRTKLVFRRPYCDDFLRFCFQNFELGIWSSRKRENVESVVDILMRGLKQCLLFCWDMSYCTVTGCKTIDNKDKPLVLKELKRVWNKDEPDLPWGQGEFSPSNTLLVDDSPYKALCNPPNTAIFPEPYNYMNQRDDYSLGPGGDLRVYLQRIAAADNVQNFVRDNPFGQKSITESDPNWNFYVKIVDKMEKQIVDQVETKIVDEVERSLG

SEQ ID NO: 188582 - protein, 762 aa, Zea Mays
MPAKYLGALAEDRRPDLYRQVGCVTGILQAFDRRHHLASSHKRLLPPTGHAPSNPSKGGECTRYSPQVVLEKNSSKTWADSQRAPATELSQTSYSSSPSSSFSSLDGNRSTQQDLSSTDRMLFPERPFKSSPKLKSSFDSDNGLDYPDDALTKSKNMPIVQSSLPTLGIRNLVKDSIYKDSHELSVRISTEEEVKDHPSNCGDQPMQLNGPHHDSTQGKSKGLMDINESLRVLAKLREASWTPPESVHHARLSYDAPRFSYDGKEATSKLREVPRLSLDIKEGHLWNREIDSRLDPSLSSADRNSNTVTGSNAAFETQQEQPACKRLPSVVAKLMGLEELPEHNQSTASSHACNTVQENKQDAMLNSLSISYQYEHAPQQERNPDSTVRNLPNSKFPVQTAPWKQQERIVLPRKLPKGSKGAHGREPAAPWNQLKDLDFQQPNKDLRALKQILDSAKGLLENKKREEAFMPKLYNGNHDDQEMASANMRLNRNTNNMWMPEESNAESSFKSPIVIMKPSKSANLYSKVDSSVFPLGGSSDLPQPQTSNSTDRRKASTINRTAKGQYAKLSPRVPTSQPLVSCDRRSYGRNDDSSNNQKSSSLLVTESSTRRQQLPRNSSVSMQKNKNSTSPKLLQRKLDPERRARPPIPSAESNKSERQSGDRNNSETVSPRSKFRRKLVRPQGDDGMPIGLNNRTRSLYQHDNDMSIRSDGSISVASELDIISNDRSTGVNISNFEQGIGTPSGRNPQKVVKNFLAIMPSF

SEQ ID NO: 188583 - protein, 225 aa, Zea Mays
MLPTTASKGRGASRSAPPLFGPYLRRIVKWQQMDIEYTFWQMVHLCTSPKVVYQHTKYHKQTKNQWARDDPAFVVILILFLVFATSAYCAAYGESASHAALTITSVVFLHFLFAGIVLATLCWLYAFDVHCNSFFPAFVILYVVQYFLSPLLVAHGFFPALLSNLLFVVAISYYHYLNFLGYDVLPFLDRTTFFLYPIGLVIILSPLMILIGFNPTRYFLSLYFG

SEQ ID NO: 188584 - protein, 52 aa, Zea Mays
MPPHSLVCDLDSLLIETPPAFFGGKTIKALKASPMRSRIWFTMVPSHINWSI

SEQ ID NO: 188585 - protein, 343 aa, Zea Mays
MEGVAPPSSPRSPRHAAPDAAGRYRCLELDHPCKAPWCDGPLGALESNGWVYSAHCSFKLFVADASWWCLDGKWLFFWGDSNHVDTIRNLLTFVLGITDTSAVTRQFDAVFTNPIGGAGTLRITSIFNGHWNMSMNYLGLHSLRNRGFRQLIRSYFMSGDRVPDVMVLNSRLHDGCYWTSVRIYAQAADFAAQFWSGVMDKVRARGHAVPRVFYRTQMPQGGIDAGKNHATPFTELRDEAGVTYSHPQGWVTLQTLPNEVLVVLRKILLVDNTRKEAQGSLTCIAQGSKQLSLHFIWKSLILIRSKFLILYFITDFVIPDLLTSRQIGNNLIVVLLTNSRKKS

SEQ ID NO: 188586 - protein, 271 aa, Zea Mays
MEGVAPPSSPRSPRHAAPDAAGRYRCLELDHPCKAPWCDGPLGALESNGWVYSAHCSFKLFVADASWWCLDGKWLFFWGDSNHVDTIRNLLTFVLGITDTSAVTRQFDAVFTNPIGGAGTLRITSIFNGHWNMSMNYLGLHSLRNRGFRQLIRSYFMSGDRVPDVMVLNSRLHDGCYWTSVRIYAQAADFAAQFWSGVMDKVRARGHAVPRVFYRTQMPQGGIDAGKNHATPFTELRDEAGVTYSHPQGWVTLQTLPNEVLVVLRKVIRFC

SEQ ID NO: 188587 - protein, 415 aa, Zea Mays
MPRPPCSPSRPSRDPPSPLPPSSRPRSIDGRCRPAILASLPATRGASLCRIFYLFTSKVPGTEPSRILEPSRILEISHWHLVTVSGGWASDAAGRYRCLELDHPCKAPWCDGPLGALESNGWVYSAHCSFKLFVADASWWCLDGKWLFFWGDSNHVDTIRNLLTFVLGITDTSAVTRQFDAVFTNPIGGAGTLRITSIFNGHWNMSMNYLGLHSLRNRGFRQLIRSYFMSGDRVPDVMVLNSRLHDGCYWTSVRIYAQAADFAAQFWSGVMDKVRARGHAVPRVFYRTQMPQGGIDAGKNHATPFTELRDEAGVTYSHPQGWVTLQTLPNEVLVVLRKILLVDNTRKEAQGSLTCIAQGSKQLSLHFIWKSLILIRKRKAKTLPSAPTFKGRSLSSFTLHQSFARIKLNFFSLRI

SEQ ID NO: 188588 - protein, 415 aa, Zea Mays
MPRPPCSPSRPSRDPPSPLPPSSRPRSIDGRCRPAILASLPATRGASLCRIFYLFTSKVPGTEPSRILEPSRILEISHWHLVTVSGGWASDAAGRYRCLELDHPCKAPWCDGPLGALESNGWVYSAHCSFKLFVADASWWCLDGKWLFFWGDSNHVDTIRNLLTFVLGITDTSAVTRQFDAVFTNPIGGAGTLRITSIFNGHWNMSMNYLGLHSLRNRGFRQLIRSYFMSGDRVPDVMVLNSRLHDGCYWTSVRIYAQAADFAAQFWSGVMDKVRARGHAVPRVFYRTQMPQGGIDAGKNHATPFTELRDEAGVTYSHPQGWVTLQTLPNEVLVVLRKILLVDNTRKEAQGSLTCIAQGSKQLSLHFIWKSLILIRSKFLILYFITDFVIPDLLTSRQIGNNLIVVLLTNSRKKS

SEQ ID NO: 188589 - protein, 87 aa, Zea Mays
MCPTRPHASTPARQPFPCAHNLNHPRENNRLRASNLLHPADAISSILTSRSHSRARPAAARRTPPQAGSNQHVRSLPHCLEREVIPH

SEQ ID NO: 188590 - protein, 52 aa, Zea Mays
MFHCINRIRELLKTLQIFECIDMTLYSKHAFNLINCWSKLQTFFASKYAIEG

SEQ ID NO: 188591 - protein, 228 aa, Zea Mays
MMTSWLLGRRGPSGFSWSSTADQVTQGISAAGLTAIVTGASSGIGAETARTLALRGAHVIMAVRSLPAAQAVKDAVLAQAPGAKLDVMELDLSSMASVRAFASQFIDRGLPLNILINNAGVMAIPFALSKDGIEMQFATNHVGHFLLTHLLLDTMKRTSHESNLEGRIVNVSSEGHRLAYREGIRFDKINDESVYSSIGAYGQSKLANILHANELARRFEGADQLPYQ

SEQ ID NO: 188592 - protein, 313 aa, Zea Mays
MMTSWLLGRRGPSGFSWSSTADQVTQGISAAGLTAIVTGGIGAETARTLALRGAHVIMAVRSLPAAQAVKDAVLAQAPGAKLDVMELDLSSMASVRAFASQFIDRGLPLNILINNAGVMAIPFALSKDGIEMQFATNHVGHFLLTHLLLDTMKRTSHESNLEGRIVNVSSEGHRLAYREGIRFDKINDESVYSSIGAYGQSKLANILHANELARRFEEDNVNITANSLHPGSIITNLLRYHSILDVLHRTLGKLVLKNAEQGAATTCYLALHPHVKGVSGKYFCDCNLYEPSANAKDMELAKRLWDFGVELIT

SEQ ID NO: 188593 - protein, 195 aa, Zea Mays
MAIPFALSKDGIEMQFATNHVGHFLLTHLLLDTMKRTSHESNLEGRIVNVSSEGHRLAYREGIRFDKINDESVYSSIGAYGQSKLANILHANELARRFEEDNVNITANSLHPGSIITNLLRYHSILDVLHRTLGKLVLKNAEQGAATTCYLALHPHVKGVSGKYFCDCNLYEPSANAKDMELAKRLWDFGVELIT

SEQ ID NO: 188594 - protein, 615 aa, Zea Mays
MVKTQKLHQLDGPMGHQRYHQKNSNHIMLLLLEVRTEQLLFGQQRVHGHCSLLSIFSLKAWLIYLAKELGYKLSDSDLDELKRSRYGDVRGRQSNLAESPAQLLLEEASAKQSASKKGTPIVQQFQAPQKLSADVLNPAPVVQNQKAPEALPEDEKKSSDPAADGMNKVTRLSSPVKQREYRRPDGRKRIIPEAVGFPSNQDNIPSRSQNHVIDFSSLDQRMNGIRPSYCSSSNCNNSGVKDCSGVTARANITESLVIQKASTNASSDGRLTVERTGSVVPGSLNCPALSIHVLDKKDNEDSLPVCLEANPVEHAAGDMNGVGGAFSTKGTEIRCTRGTETLWLDRISAKVTALAGNTNFWAVGCEDGYLQDSLAALVASPDESSANHAGAVKVISAKFSRCGFPLVVLASRHAFLFDMSMKCWLRIADDCFPASNFASSFIFPQAGELGKLQIDVGKFMARKPIWSRVTDDGLQTRAHLETQLAASLALKSPQEYRQCLLSYIRFLAREADESRLREVCESFLGPPMGMLGSESSTDPKSPAWDSDVLGMKKHQLLREDILPSMASNRKVQRLLNEFMDLLSEYEAAKSKVDPMDITPALPQQAPEANANVVTS

SEQ ID NO: 188595 - protein, 667 aa, Zea Mays
MVKTQKLHQLDGPMGHQRYHQKNSNHIMLLLLEVRTEQLLFGQQRVHGHCSLLSIFSLKAWLIYLAKELGYKLSDSDLDELKRSRYGDVRGRQSNLAESPAQLLLEEASAKQSASKKGTPIVQQFQAPQKLSADVLNPAPVVQNQKAPEALPEDEKKSSDPAADGMNKVTRLSSPVKQREYRRPDGRKRIIPEAVGFPSNQDNIPSRSQNHVIDFSSLDQRMNGIRPSYCSSSNCNNSGVKDCSGVTARANITESLVIQKASTNASSDGRLTVERTGSVVPGSLNCPALSIHVLDKKDNEDSLPVCLEANPVEHAAGDMNGVGGAFSTKGTEIRCTRGTETLWLDRISAKVTALAGNTNFWAVGCEDGYLQVYTKCGRRAMPAMMMGSAAVFIDCDDCWKLLLVTRRGLMYIWDLHNRTCILQDSLAALVASPDESSANHAGAVKVISAKFSRCGFPLVVLASRHAFLFDMSMKCWLRIADDCFPASNFASSFIFPQAGELGKLQIDVGKFMARKPIWSRVTDDGLQTRAHLETQLAASLALKSPQEYRQCLLSYIRFLAREADESRLREVCESFLGPPMGMLGSESSTDPKSPAWDSDVLGMKKHQLLREDILPSMASNRKVQRLLNEFMDLLSEYEAAKSKVDPMDITPALPQQAPEANANVVTS

SEQ ID NO: 188596 - protein, 703 aa, Zea Mays
MIAEKPNWIRHEGLQIFSIDIQPGGLRFATGGGDQKVRIWSMKSVDKNNNHNDSSQGLLATMRDHFGSVNCVRWARHGRYLASGSDDQVILIHERKAGSGTSEFGSGEPPDVENWKVIMTLRGHTADVVDLNWSPDDSTLASGSLDNTVHIWNITNGMCTAVLRGHSSLVKGVTWDPIGSFIASQSDDKTVIIWRTSDWSLAHKTEGHWEKSLGSTFFRRLAWSPCGHFITTTHGFQKPRHSAPVLERGEWSATFDFLGHNAPIVVVKFNNSMFRKSFSNGQDTKAAPAGWANGTSKISSKEQQPYNVIAIGSQDRTITVWTTASARPLFVAKHFFSQSVVDLSWSPDGYSLFACSLDGSVANFHFEAKELGYKLSDSDLDELKRSRYGDVRGRQSNLAESPAQLLLEEASAKQSASKKGTPIVQQFQAPQKLSADVLNPAPVVQNQKAPEALPEDEKKSSDPAADGMNKVTRLSSPVKQREYRRPDGRKRIIPEAVGFPSNQDNIPSRSQNHVIDFSSLDQRMNGIRPSYCSSSNCNNSGVKDCSGVTARANITESLVIQKASTNASSDGRLTVERTGSVVPGSLNCPALSIHVLDKKDNEDSLPVCLEANPVEHAAGDMNGVGGAFSTKGTEIRCTRGTETLWLDRISAKVTALAGNTNFWAVGCEDGYLQDSLAALVASPDESSANHAGLQMMVCRHVPI

SEQ ID NO: 188597 - protein, 753 aa, Zea Mays
MIAEKPNWIRHEGLQIFSIDIQPGGLRFATGGGDQKVRIWSMKSVDKNNNHNDSSQGLLATMRDHFGSVNCVRWARHGRYLASGSDDQVILIHERKAGSGTSEFGSGEPPDVENWKVIMTLRGHTADVVDLNWSPDDSTLASGSLDNTVHIWNITNGMCTAVLRGHSSLVKGVTWDPIGSFIASQSDDKTVIIWRTSDWSLAHKTEGHWEKSLGSTFFRRLAWSPCGHFITTTHGFQKPRHSAPVLERGEWSATFDFLGHNAPIVVVKFNNSMFRKSFSNGQDTKAAPAGWANGTSKISSKEQQPYNVIAIGSQDRTITVWTTASARPLFVAKHFFSQSVVDLSWSPDGYSLFACSLDGSVANFHFEAKELGYKLSDSDLDELKRSRYGDVRGRQSNLAESPAQLLLEEASAKQSASKKGTPIVQQFQAPQKLSADVLNPAPVVQNQKAPEALPEDEKKSSDPAADGMNKVTRLSSPVKQREYRRPDGRKRIIPEAVGFPSNQDNIPSRSQNHVIDFSSLDQRMNGIRPSYCSSSNCNNSGVKDCSGVTARANITESLVIQKASTNASSDGRLTVERTGSVVPGSLNCPALSIHVLDKKDNEDSLPVCLEANPVEHAAGDMNGVGGAFSTKGTEIRCTRGTETLWLDRISAKVTALAGNTNFWAVGCEDGYLQVYTKCGRRAMPAMMMGSAAVFIDCDDCWKLLLVTRRGLMYIWDLHNRTCILQDSLAALVASPDESSANHAAHLFFPKLES

SEQ ID NO: 188598 - protein, 812 aa, Zea Mays
MCTAVLRGHSSLVKGVTWDPIGSFIASQSDDKTVIIWRTSDWSLAHKTEGHWEKSLGSTFFRRLAWSPCGHFITTTHGFQKPRHSAPVLERGEWSATFDFLGHNAPIVVVKFNNSMFRKSFSNGQDTKAAPAGWANGTSKISSKEQQPYNVIAIGSQDRTITVWTTASARPLFVAKHFFSQSVVDLSWSPDGYSLFACSLDGSVANFHFEAKELGYKLSDSDLDELKRSRYGDVRGRQSNLAESPAQLLLEEASAKQSASKKGTPIVQQFQAPQKLSADVLNPAPVVQNQKAPEALPEDEKKSSDPAADGMNKVTRLSSPVKQREYRRPDGRKRIIPEAVGFPSNQDNIPSRSQNHVIDFSSLDQRMNGIRPSYCSSSNCNNSGVKDCSGVTARANITESLVIQKASTNASSDGRLTVERTGSVVPGSLNCPALSIHVLDKKDNEDSLPVCLEANPVEHAAGDMNGVGGAFSTKGTEIRCTRGTETLWLDRISAKVTALAGNTNFWAVGCEDGYLQVYTKCGRRAMPAMMMGSAAVFIDCDDCWKLLLVTRRGLMYIWDLHNRTCILQDSLAALVASPDESSANHAGAVKVISAKFSRCGFPLVVLASRHAFLFDMSMKCWLRIADDCFPASNFASSFIFPQAGELGKLQIDVGKFMARKPIWSRVTDDGLQTRAHLETQLAASLALKSPQEYRQCLLSYIRFLAREADESRLREVCESFLGPPMGMLGSESSTDPKSPAWDSDVLGMKKHQLLREDILPSMASNRKVQRLLNEFMDLLSEYEAAKSKVDPMDITPALPQQAPEANANVVTS

SEQ ID NO: 188599 - protein, 701 aa, Zea Mays
MIAEKPNWIRHEGLQIFSIDIQPGGLRFATGGGDQKVRIWSMKSVDKNNNHNDSSQGLLATMRDHFGSVNCVRWARHGRYLASGSDDQVILIHERKAGSGTSEFGSGEPPDVENWKVIMTLRGHTADVVDLNWSPDDSTLASGSLDNTVHIWNITNGMCTAVLRGHSSLVKGVTWDPIGSFIASQSDDKTVIIWRTSDWSLAHKTEGHWEKSLGSTFFRRLAWSPCGHFITTTHGFQKPRHSAPVLERGEWSATFDFLGHNAPIVVVKFNNSMFRKSFSNGQDTKAAPAGWANGTSKISSKEQQPYNVIAIGSQDRTITVWTTASARPLFVAKHFFSQSVVDLSWSPDGYSLFACSLDGSVANFHFEAKELGYKLSDSDLDELKRSRYGDVRGRQSNLAESPAQLLLEEASAKQSASKKGTPIVQQFQAPQKLSADVLNPAPVVQNQKAPEALPEDEKKSSDPAADGMNKVTRLSSPVKQREYRRPDGRKRIIPEAVGFPSNQDNIPSRSQNHVIDFSSLDQRMNGIRPSYCSSSNCNNSGVKDCSGVTARANITESLVIQKASTNASSDGRLTVERTGSVVPGSLNCPALSIHVLDKKDNEDSLPVCLEANPVEHAAGDMNGVGGAFSTKGTEIRCTRGTETLWLDRISAKVTALAGNTNFWAVGCEDGYLQDSLAALVASPDESSANHAAHLFFPKLES

SEQ ID NO: 188600 - protein, 876 aa, Zea Mays
MKSVDKNNNHNDSSQGLLATMRDHFGSVNCVRWARHGRYLASGSDDQVILIHERKAGSGTSEFGSGEPPDVENWKVIMTLRGHTADVVDLNWSPDDSTLASGSLDNTVHIWNITNGMCTAVLRGHSSLVKGVTWDPIGSFIASQSDDKTVIIWRTSDWSLAHKTEGHWEKSLGSTFFRRLAWSPCGHFITTTHGFQKPRHSAPVLERGEWSATFDFLGHNAPIVVVKFNNSMFRKSFSNGQDTKAAPAGWANGTSKISSKEQQPYNVIAIGSQDRTITVWTTASARPLFVAKHFFSQSVVDLSWSPDGYSLFACSLDGSVANFHFEAKELGYKLSDSDLDELKRSRYGDVRGRQSNLAESPAQLLLEEASAKQSASKKGTPIVQQFQAPQKLSADVLNPAPVVQNQKAPEALPEDEKKSSDPAADGMNKVTRLSSPVKQREYRRPDGRKRIIPEAVGFPSNQDNIPSRSQNHVIDFSSLDQRMNGIRPSYCSSSNCNNSGVKDCSGVTARANITESLVIQKASTNASSDGRLTVERTGSVVPGSLNCPALSIHVLDKKDNEDSLPVCLEANPVEHAAGDMNGVGGAFSTKGTEIRCTRGTETLWLDRISAKVTALAGNTNFWAVGCEDGYLQDSLAALVASPDESSANHAGAVKVISAKFSRCGFPLVVLASRHAFLFDMSMKCWLRIADDCFPASNFASSFIFPQAGELGKLQIDVGKFMARKPIWSRVTDDGLQTRAHLETQLAASLALKSPQEYRQCLLSYIRFLAREADESRLREVCESFLGPPMGMLGSESSTDPKSPAWDSDVLGMKKHQLLREDILPSMASNRKVQRLLNEFMDLLSEYEAAKSKVDPMDITPALPQQAPEANANVVTS

SEQ ID NO: 188601 - protein, 84 aa, Zea Mays
MRIACWMQQSLHPLIIERSEGSYVYDINGNKYLDSLAGLWCTALVQSNPPQPRREGLQATISASLKQKHNSNASKVLTQVLLFS

SEQ ID NO: 188602 - protein, 69 aa, Zea Mays
MRIACWMQQSLHPLIIERSEGSYVYDINGNKYLDSLAGLWCTALEQSTTTTTRRTPSYNFCITKTKTQQ

SEQ ID NO: 188603 - protein, 324 aa, Zea Mays
MTSGFESGSPNIAEVFCGSHSQAESQDDLEHERRDWQRFSHAVIGEESERTWRENADNMSSHEGTAVEDDNNDHLPEANEESTSVDHLPEGLEGSITDGSLPEAQEDQHDSDHLPAVLEELHGNNHFQESHGEWRRDDRPVEVYDEWQSDDHLPEVNEEWHNDDESNDTADNWHDNNSDQPIDHDAALIRRANTFIPGDDDNVYSTELRELLSRRSVSNLLHSAFRENLDRLIRSYVERQGRGPLPWDLEGTTPAPPSPVQIQEEQRDDEDQELQRTVNRPPLVIPPPPMPPRQPLWHSELHRTNWIRQNIHRSSSDIAVFIVG

SEQ ID NO: 188604 - protein, 327 aa, Zea Mays
MDPNRPPLGRRAFLSSSVHAATALLSILLLVTLLRLPLSTSPHAASTIADQKPKEQTCDPTSPLDCADPRLFHLMMRSAIEAFPAVHFARFGRPVPGDPPSSSCDMAWRSRSDFDSPSKATTKDYRRFAIGRDPHTCAYSVLSIGDYHSGPNARKPRRGATNATIATPPPPALSRSQFAKGAYLAYLGGGDRCKPMPHYLRSLLCALAEARYLNRTLVLDLTLCLAASYAAPGTGEMPEEGKRLAFYIDVEHLHSQVPIIEERQFWADWDSWGVQGQLRAHLIEDTRLALIKFSKVKDTLIIRKFGDVEPGCNQTLIRSISMPRVRT

SEQ ID NO: 188605 - protein, 136 aa, Zea Mays
MEGSLQPLPSPPQSMDAPALRHAHLESRSLTLLPGPHPSRFPPHPGAPTTPLHGAQAKALWGPFAAWGTNQRGRLASARSSWPRDHAVGCTGSTDCPICVHNQVMKHELYISFQVPSSVTLNILSNGMLIPLLLVL

SEQ ID NO: 188606 - protein, 660 aa, Zea Mays
MQQAGLADDDDEEIWVKEEDDEEEEDGYYMDPRSPAVWTPGGRAGGTSNRRRAREEKERTKMRERQRRAITGRILAGLRQHGNYRLRARADINEVIAALAREAGWVVLPDGTTFPSSSSFAAVAAQPPRPVMVAAASPSATPLALPASSALPLRGIAPVAARPISHRPAPAFALLLPPRAAAASRSPADDVPDGNSSHLLAVPVPVPMDPAAAEDVPVAKQLQVPDVSPRPPERDFAGTPYVPVYVMLPLRVLKASGVDGVMVDCWWGNVEAHKPQEYNWTGYRRLFQMIRELKLKLQVVMSFHECGGNVGDDISIPLPHWVIEIGRSNPDIYFTDRAGRRNTECLSWGVDKERVLQGRTAVEVYFDFMRSFRVEFDEYFEDGIISEIEIGLGACGELRYPSYPAKHGWKYPGIGEFQCYDRYLQKSLRKAAEARGHTIWARGPDNAGHYNSEPNLTGFFCDGGDYDSYYGRFFLSWYSQALVDHADRVLMLARLAFEGTNIAVKVSGVHWWYKTASHAAELTAGFYNPCNRDGYAPIAAVLKKYDAALNFTCVELRTMDQHEVYPEAFADPEGLVWQVLNAAWDAGIQVASENALPCYDRDGFNKILENAKPLNDPDGRHLLGFTYLRLGKDLFERPNFFEFERFIKRMHGEAVLDLQV

SEQ ID NO: 188607 - protein, 455 aa, Zea Mays
MRFEGEEVKALALGAGWVAAVTSLNFLRIFTEGGLQMHILSVSGPVVTAAGYEDQLAIVSHASDCLPSGDQVLDVKVFNISEGTQSMSGRLVLTPLSRLSWFGFSENGQLSSYDSKGILRVFSNQFGGSWLPLFSSVKARKSEDESHWVVGLDANNIFCILCKTPQSYPQVMPKPVLSILELSFPLASSDLGANSLENEFLMRKLQLSQIQNKMEEMAALGLDTTSYDDESFNMEAGLDRCILRLISSCCSGDKLVRASELARLLKLEKSMKGALSLVTRLKLPMLQEKFSSIIEERVLNDKIIAGAGGFCSNATIMTNTPVLTTQATLPSMFMQDGNRSLESSLPKLNIVNQQCNSTEPKKPAGERGIEIKDRTQKDSSASVPFAKVPKNSENQNQEGGIDHTGAKKESTKYCNRAEPQRPVNPFAKSSSSKEQSSSLLDSIKKMKVEKPNARI

SEQ ID NO: 188608 - protein, 184 aa, Zea Mays
MSLLLSCECTSIYKETILYLQKYFAPKYSGRHNRCFARGYKFVYSRQTQMTDLLVHSDTDRAFNFGRPLPSGPPLALVTCMVLSAHANSSFYGYDLRHCSTTTGVYNAVAFNGGCLYIYIYIYIYIYIYISLSRFIKNVSNIFISPNKFIIKYIFIDLSNKLILYYKYFLYIYLVDIGRVCDTL

SEQ ID NO: 188609 - protein, 168 aa, Zea Mays
MSKEGRPGAMGDGARATMTGRTASSPETASRKHQGAGRAQRRHPRLSSSRRRELHGGVGLRNGEVAVRRPMASHGEQEGRGVGYGDELGCGLAGEDVGHRRAERGQAPWLKLGSQGGEGVVSYRRRSRGKVQRVAAEEDRQSSTPGQARQREGLGGEMKAVRRLQPRR

SEQ ID NO: 188610 - protein, 65 aa, Zea Mays
MLPGFPGSTASSSCGIPDVWATELPALFMDLDVHAPGHVLPLGLVAWVASKGSKIIHQGVDDTAS

SEQ ID NO: 188611 - protein, 50 aa, Zea Mays
MVTKLMFSSIASRPIFSKCHVLSSMTKWRCEAWTISWHCSHWWSIQASES

SEQ ID NO: 188612 - protein, 107 aa, Zea Mays
MSWFSVVSGIQNAASTYKEFLDTQPLVFTRAEDLLEAEDWLRTIEQKFGLIHCDGVQKTQFAAQQPRVKLEPGGQNIVRPSLRDIKFLGLSSVRPFRHIIFRRVSWV

SEQ ID NO: 188613 - protein, 101 aa, Zea Mays
MAKSFVNVELVLFLKHSYRFPERERLQAEFDDLEGSALCDSSKNGLLNFIIAGAASPPSQLRRLPLFLLCTGGLLPGKISLFSLVRFAHYWCPDGMGVDCF

SEQ ID NO: 188614 - protein, 52 aa, Zea Mays
MPWESCQGEGGAWEGSVASSKGGGAAAAWGAREREIEREGGSRESGVGRGRE

SEQ ID NO: 188615 - protein, 293 aa, Zea Mays
MVAAPSLFLASTAASLDRSCSPPWRLGGSPSSLKLFPMAPSLGCSLCRGVSCAPSHFFLLPQLAPCSPRALESSLHRTVKLPWRPASLPTGAPWSPCFLSCSACFPCRVLPQLPRRGSCSRACSFPEDFPPWRPCFFFFPARSSFFLCLPRASLSARFSLPPLLSHGAPWSLLLSLSAHPQAASWSLSSSSSTLVQATRSLPRAMELSASRVVLLFSPRSDSVSLRALSDSVSLTHPLPNPWSRSRLAATAAPTTATDLLPCARSASLPSSSLCTEVACSSCPARLLLPVPRV

SEQ ID NO: 188616 - protein, 2564 aa, Zea Mays
MKPLSRNIVRFEIVHLVYNPLVDHYLAVAGYEDCQVLTLNSRGEVTDRLAIELALQGPYIRRLEWVQGSQVQLMVVTNLFVKIYDLSQDNISPMHYFTVADDVIVDATLVPSSMGKLVLLVLSESGVLYRLNVTLEGDIGAKILTETVLVEDVISMHRGLSLYFSSTYRLLFVSHQDGTTFMGRLNADSSSITELSYINEDHDGKSKPAGLYCWRELVAGSGILTCLSKSKSNAPLVALLSPHQLVAQNMRHNTGANSSVVGVAAYKPLSKDKTHCLLLYDDGSLHIYSHTPSGGDGSMNLTAEQTKKLGSSILSSRAYTGTKPEFPLDFFEKTTCLTCDVKFNSETTKSGDSESIKQRLTSDDGYLESLTPAGFKVAISNPNPDIVMVGCRIHVGNTSASNIPSEITIFHRVIKLDEGMRSWIDCIEIYGRAKDEFGWKEKMDAALDMEALGGNATGGRSGKRLQIVKAAPIQEQVLADALRILSRIYLLCQPSCFTDMVDGGMELDNMKCRALLETIFQSDREPLLHSAACRVLQAVFPKKDMYHHVKDTMRLLGVIKSLPAITSRIGVGGAASSWVIKEFIAQIHTVSKVALHRKSNLASFLESHGTELVDGLMQVFWCILDLDRPDTQTINSLVVPCVEFIYSYAECLALHSNEKTSVSVGPAVALLKELLFAPYEAVQTSSSLAISSRFLQVPFPKQTMIANDDAPENQAKASASAMNSTSANSQVMIEEDPVTSSVQYCCDGCSTVPILRQRWHCSICPDFDLCETCYEILDADRLPAPHSKDHPMSAIPIEVDTFGGEGSEIHFSVDELTDSGVLHADRSVQTSPSSIHIFDASESADLPETITDQATVSISASKRAINSLVLNHLIEELRGWMGTTAGTRAIPLMQLFYRLSSAVGGPFMDSSKPENFDLEKFVKWLMDEVNINKQFPAKTRCTFGEVLILVFMFFTLMFRNWHQPGSDNSHSKSSGSSDLTDKGPAQVLGSTTITLPSSSADLDKNEFASQLVRACSALRQQKFLNYLMDILQQLVHIFKSSSINGEAGSSGSGCGSLLTIRRELPAGNFSPFFSDSYAKSHPTDLFMDYYKLLLENTFRLVYSMVRPEKEKSAEKDRCYKVPNTKDLKLDGYQDVLCSYISNPHTAFVRRYARRLFLHLCGSKTHYYSVRDSWQCSHEVKKLNKIINKSGGFRNPVPYERSVKLIKCLSTLCDVATARPKNWQKFCLKHMDLLPFLMDNVYHFSEECVIQTLKLLNLAFYSGKDANHNAQKAETTDLGGSTRTSSQSPDMKKNRKADDGSEGSSEKSCMDMEQVVEMFSDKEGDMLKNFINIFLLEWNSAGVRHEAKCVLFGVWYHAKNRLRETMLSILLQKVIHLPLYGQNIVEYTDLITCLLGKVNDFSAKQNHSELVNKCLTSEVISCIFDTLHSQNELLANHPNSRIYNTLSCLVEFDGYYLESEPCVTCSCPDVPYSRTKLETLKSETKFTDNRIIIKCTGSFTIQSVTMNVYDARKSKSVKVLNLYYNNRPVTDLSELKNNWTLWKRAKSCHLTFNQTELKVEFPIPITACNFMIELDSFYENLQASSLESLQCPRCSRSVTDKHGICSNCHENAYQCRQCRNINYENLDSFLCNECGYSKYGRFEFHFMAKPSFSFDNMENDDDMRKGLAAIESESENAHRRYQQLMGFKKPLIKLVSSIGEQEVDSQQKDAVQQMMVSLPGPTCKVNRKIALLGVLYGEKCKAAFDSVSKSVQTLQGLRRVLMTYLHQKSSSDTNALPAFSIPRSPNSCYGCSTTFVTQCLELLQVLSKHENCRKQLISAGVLSELFENNIHQGPRTARTLARAVLSSFSESDEDAVHELNNLIQKKVMYCLEHHRSMDIAQSTREDLLLLSETCALVDEFWEARLRVTFQLLFSSIKVGAKHPAISEHIILPCLRIISQACTPPKSDCGDKESGLGVSSLTLHSKNDDTTGNTASNNPNTKIQSDISGKIYDGSRRDQDIPLLSYSEWEGGASYLDFVRRQYKVSQAVKGSAQKTRHDSYKSDYLVLKYGLRWKRRACLKSSKSDFSKFALGYWVSDLILSSCSQSIRSEICTLISLLCPSNSPRQFQLLNLLMSLLPRTLSAGESAAEYFELLGTMIDSESSRLFLTVRGCLTTLCSLITKEVSNVESQERSLSIDISQGFILHKLVELLNKFLEVPNIRARFMSDRLLSEVLEAFLVIRGLVVQKTKLINDCNHLLKDLLDSLLLESTENKRQFIRACISGLQRHVKEKKRRTSLFILEQLCNLICPVKPEPVYLLILNKAHTQEEFIRGSMTKNPYSSVDVGPLMRDVKNKICNQLDLIGLLEDDYGMELLVGGSIISLDLSISQVYEQVWRKHHGQTQHCLSNVSAITGASSIRDCPPMTVTYRLQGLDGEATEPMIKELEEEREESQDPEIEFAIAGAVRECGGLEIILSMIQSLHDDEFRSNQEELTSVLNLLKYCCKIRENRCALLCLGALGLLLETARRAFSADAMEPAEVLKRLALVRRPGKLFSCFWREYVILQVPKNQTSNKGMRRWWQGSCRT

SEQ ID NO: 188617 - protein, 2349 aa, Zea Mays
MDAALDMEALGGNATGGRSGKRLQIVKAAPIQEQVLADALRILSRIYLLCQPSCFTDMVDGGMELDNMKCRALLETIFQSDREPLLHSAACRVLQAVFPKKDMYHHVKDTMRLLGVIKSLPAITSRIGVGGAASSWVIKEFIAQIHTVSKVALHRKSNLASFLESHGTELVDGLMQVFWCILDLDRPDTQTINSLVVPCVEFIYSYAECLALHSNEKTSVSVGPAVALLKELLFAPYEAVQTSSSLAISSRFLQVPFPKQTMIANDDAPENQAKASASAMNSTSANSQVMIEEDPVTSSVQYCCDGCSTVPILRQRWHCSICPDFDLCETCYEILDADRLPAPHSKDHPMSAIPIEVDTFGGEGSEIHFSVDELTDSGVLHADRSVQTSPSSIHIFDASESADLPETITDQATVSISASKRAINSLVLNHLIEELRGWMGTTAGTRAIPLMQLFYRLSSAVGGPFMDSSKPENFDLEKFVKWLMDEVNINKQFPAKTRCTFGEVLILVFMFFTLMFRNWHQPGSDNSHSKSSGSSDLTDKGPAQVLGSTTITLPSSSADLDKNEFASQLVRACSALRQQKFLNYLMDILQQLVHIFKSSSINGEAGSSGSGCGSLLTIRRELPAGNFSPFFSDSYAKSHPTDLFMDYYKLLLENTFRLVYSMVRPEKEKSAEKDRCYKVPNTKDLKLDGYQDVLCSYISNPHTAFVRRYARRLFLHLCGSKTHYYSVRDSWQCSHEVKKLNKIINKSGGFRNPVPYERSVKLIKCLSTLCDVATARPKNWQKFCLKHMDLLPFLMDNVYHFSEECVIQTLKLLNLAFYSGKDANHNAQKAETTDLGGSTRTSSQSPDMKKNRKADDGSEGSSEKSCMDMEQVVEMFSDKEGDMLKNFINIFLLEWNSAGVRHEAKCVLFGVWYHAKNRLRETMLSILLQKVIHLPLYGQNIVEYTDLITCLLGKVNDFSAKQNHSELVNKCLTSEVISCIFDTLHSQNELLANHPNSRIYNTLSCLVEFDGYYLESEPCVTCSCPDVPYSRTKLETLKSETKFTDNRIIIKCTGSFTIQSVTMNVYDARKSKSVKVLNLYYNNRPVTDLSELKNNWTLWKRAKSCHLTFNQTELKVEFPIPITACNFMIELDSFYENLQASSLESLQCPRCSRSVTDKHGICSNCHENAYQCRQCRNINYENLDSFLCNECGYSKYGRFEFHFMAKPSFSFDNMENDDDMRKGLAAIESESENAHRRYQQLMGFKKPLIKLVSSIGEQEVDSQQKDAVQQMMVSLPGPTCKVNRKIALLGVLYGEKCKAAFDSVSKSVQTLQGLRRVLMTYLHQKSSSDTNALPAFSIPRSPNSCYGCSTTFVTQCLELLQVLSKHENCRKQLISAGVLSELFENNIHQGPRTARTLARAVLSSFSESDEDAVHELNNLIQKKVMYCLEHHRSMDIAQSTREDLLLLSETCALVDEFWEARLRVTFQLLFSSIKVGAKHPAISEHIILPCLRIISQACTPPKSDCGDKESGLGVSSLTLHSKNDDTTGNTASNNPNTKIQSDISGKIYDGSRRDQDIPLLSYSEWEGGASYLDFVRRQYKVSQAVKGSAQKTRHDSYKSDYLVLKYGLRWKRRACLKSSKSDFSKFALGYWVSDLILSSCSQSIRSEICTLISLLCPSNSPRQFQLLNLLMSLLPRTLSAGESAAEYFELLGTMIDSESSRLFLTVRGCLTTLCSLITKEVSNVESQERSLSIDISQGFILHKLVELLNKFLEVPNIRARFMSDRLLSEVLEAFLVIRGLVVQKTKLINDCNHLLKDLLDSLLLESTENKRQFIRACISGLQRHVKEKKRRTSLFILEQLCNLICPVKPEPVYLLILNKAHTQEEFIRGSMTKNPYSSVDVGPLMRDVKNKICNQLDLIGLLEDDYGMELLVGGSIISLDLSISQVYEQVWRKHHGQTQHCLSNVSAITGASSIRDCPPMTVTYRLQGLDGEATEPMIKELEEEREESQDPEIEFAIAGAVRECGGLEIILSMIQSLHDDEFRSNQEELTSVLNLLKYCCKIRENRCALLCLGALGLLLETARRAFSADAMEPAEGILLIVESLTMEANESDISIAQSVFTTSTEAIGAGEEARKIVLMFLERICHPSGAKKSNKQQRNEEMVARILPYLTYGEPTAMEALIQHFEPYLRDWSEFDQLQKQHEDNPKDDNISQKLSTQRSAIDNFVRVSESLKTSSCGERLKDIILEKGITKAAVEHVKESFASAGQTGFRTSEEWTTGLKLPSIPPILSMLKGLAKGHLPTQKCIDEEGILPLLHALEGVPGENEIGARAENLLDTLANNENNGDGFLGEKIQELRHATRDEMRRRAL

SEQ ID NO: 188618 - protein, 479 aa, Zea Mays
MTKNPYSSVDVGPLMRDVKNKICNQLDLIGLLEDDYGMELLVGGSIISLDLSISQVYEQVWRKHHGQTQHCLSNVSAITGASSIRDCPPMTVTYRLQGLDGEATEPMIKELEEEREESQDPEIEFAIAGAVRECGGLEIILSMIQSLHDDEFRSNQEELTSVLNLLKYCCKIRENRCALLCLGALGLLLETARRAFSADAMEPAEGILLIVESLTMEANESDISIAQSVFTTSTEAIGAGEEARKIVLMFLERICHPSGAKKSNKQQRNEEMVARILPYLTYGEPTAMEALIQHFEPYLRDWSEFDQLQKQHEDNPKDDNISQKLSTQRSAIDNFVRVSESLKTSSCGERLKDIILEKGITKAAVEHVKESFASAGQTGFRTSEEWTTGLKLPSIPPILSMLKGLAKGHLPTQKCIDEEGILPLLHALEGVPGENEIGARAENLLDTLANNENNGDGFLGEKIQELRHATRDEMRRRAL

SEQ ID NO: 188619 - protein, 102 aa, Zea Mays
MWIEWNCVSLNPKQVKLLNFPIPSNPWVTGLIEQGLTVSLTSSHQAMKLRVVGCGALETKLPKNEEPTFSREDTSHKKMINCLPLLITKRTSFWVIKASSTS

SEQ ID NO: 188620 - protein, 192 aa, Zea Mays
MATAISSLVTPPTLHRRCLGPACVSVSVCTPIRISFRPAAAPQVSRRGSALRVSASSAVLEAPEAVAARKLYVGNIPRTVTNDELRDMFAAHGTVERAEVMYDKYTNRSRRFGFVTMSTAEEANAAVEALNGTEVGDRKIKVNVTESFLPNIDRSAPEPEALFVDREYPQCNSLPHSGDLQVKGVWLCHILF

SEQ ID NO: 188621 - protein, 88 aa, Zea Mays
MRMAADCQAGPSREKATAHGPEETHRLAIIRPSENVARTLASMSMAWSSTTAKLRRRSATHKVEEVVSNPHNTKESQRGESSSWRKRV

SEQ ID NO: 188622 - protein, 92 aa, Zea Mays
MVSAPSTPPSWPRSFPWRSTFPSFSVSSFAPEDERKPPMQRLSGVGVVRGPDSAIDFVVSSQIILGLGTLVENHTKQRTRTKAELTTRCRYT

SEQ ID NO: 188623 - protein, 140 aa, Zea Mays
MHSGVGCRRFCHRAHERSFVCSFCRGQFLHASNPCCSHPRALTNFLGRICRAHQCSSSSLSPGLIVLARPSGRRFGALHGFGHTQHYPCRHRTSLRHVQQRRRPCLRLLRRFLCVVVRARRRKETANATLVRCWCCARTG

SEQ ID NO: 188624 - protein, 63 aa, Zea Mays
MSRRKNTVLALVAWIMLLALFITTATASLPCQCCWLVQHPKVTCGHACCGDNCCPPTPPPSTR

SEQ ID NO: 188625 - protein, 239 aa, Zea Mays
MARACPLAGVRLPPRLWCSPRPAAPSSLSLSSPPTSSLHAVESLRTAVPPAPSPWPASSAWPCPRLLPRVTCRSPFPWPRPALAQFLPMVLGSPPTPRIVYPSLFGHNKNAGRSDLTVELPRQCALSARSALIPITPRSSLCPCCVIGSRLPGLCRVCLGAAPVGRLGVKSPSRPGFWHVSSLAVTSSTASDLPFMMFTKCSTKSSNESYCHRLRRMEIVELARRCRRSPSSSTPCPKP

SEQ ID NO: 188626 - protein, 641 aa, Zea Mays
MGGGGGFRGSCRVGAVLLFSAWVALAALSRLLRPVPNGCVMTYMYPTYIPIAATPRNISSDRYGLFLYHEGWKQIDFAKHIRGLRGVPVLFIPGNGGSYKQVRSLAAESFRAYQNGPLEPTFYQEASSSLPGDGLNNFSIPSRYGRMLDWFAVDLEGEHSAMDGQILEEHTEYVVYAIHRILDQYKESHLERSKGGAQSSPDLPSSVILVGHSMGGFVARAAVVHPNLRKSAVETILTLSSPHQYPPIALQPSLGHFFSHVNEEWRKGYKTGVSHAISSKLSNVVVVSVSGGIHDYQIRSRLASLDGIVPSTHGFMVGSSSMKNVWLSMEHQSILWCNQLAVQVAHTLLSIIDPVDRQPFSSTQKRVFVFTKMLQSAVPQSLSSMTHVPASLSRNLPANENQDAGELHKKDSLSCPSSTEWTSDGLEKDLYIQSNSVTVLAMDGRRRWLDIKKLGSNGRGHFVFVTNLAPCSGVRIHLWPEKHHSPVQNELPASKKIVEVTSKMVQIPAGPAPKQVEPGSQTEQPPPSAFLLLSPGEMSGFRFMTISVAPRPTISGRPPPAASMAVGQFFSPEEGASSFSIGTIIRSSFAPKEIFLLEDHPLALNLSFSASLGLLPVTLSLKTAGCGIKNPGDQMEAERNS

SEQ ID NO: 188627 - protein, 1072 aa, Zea Mays
MGGGGGFRGSCRVGAVLLFSAWVALAALSRLLRPVPNGCVMTYMYPTYIPIAATPRNISSDRYGLFLYHEGWKQIDFAKHIRGLRGVPVLFIPGNGGSYKQVRSLAAESFRAYQNGPLEPTFYQEASSSLPGDGLNNFSIPSRYGRMLDWFAVDLEGEHSAMDGQILEEHTEYVVYAIHRILDQYKESHLERSKGGAQSSPDLPSSVILVGHSMGGFVARAAVVHPNLRKSAVETILTLSSPHQYPPIALQPSLGHFFSHVNEEWRKGYKTGVSHAISSKLSNVVVVSVSGGIHDYQIRSRLASLDGIVPSTHGFMVGSSSMKNVWLSMEHQSILWCNQLAVQVAHTLLSIIDPVDRQPFSSTQKRVFVFTKMLQSAVPQSLSSMTHVPASLSRNLPANENQDAGELHKKDSLSCPSSTEWTSDGLEKDLYIQSNSVTVLAMDGRRRWLDIKKLGSNGRGHFVFVTNLAPCSGVRIHLWPEKHHSPVQNELPASKKIVEVTSKMVQIPAGPAPKQVEPGSQTEQPPPSAFLLLSPGEMSGFRFMTISVAPRPTISGRPPPAASMAVGQFFSPEEGASSFSIGTIIRSSFAPKEIFLLEDHPLALNLSFSASLGLLPVTLSLKTAGCGIKNPGDQMEAERNNLCKLRCFPPVALAWDSVSGLHIIPNIYSETVVVDSSPAFWDSPEGTDKTTVLILILGFMVAIMFFGIMRQTSAWECDSSMPSILSAIESNLGLPKAFMFLCFMPILVFCAFFIFTAEQKPPFGTFLLVTLICYIVANGFTILLILSSKLLLYVVAILHVFTKRRWQSWGNGVQSAFLGQFLSFSSFQSVKMLRNNPNIIVAVATLPLVCLVHPAIGLGLLLLSHAFHAHSNLCSFLAASFRSITQKKDLYKSKMGDGSVLLSKSKSDGLQQLLPMDDSPTASKSFTDSQLELFDYRHGVMILHLLSTLMFVPSLVAWLQRIGMGQNFPWFIDSAICVGVILHGLFGSQPNVSCCIFFKLPGRRGREIGLSFLYLVGGYYSFVSSMALAPYRALYAMATIGYICFISRILERRNMVRGDINSRRTRKHSHRH

SEQ ID NO: 188628 - protein, 1064 aa, Zea Mays
MGGGGGFRGSCRVGAVLLFSAWVALAALSRLLRPVPNGCVMTYMYPTYIPIAATPRNISSDRYGLFLYHEGWKQIDFAKHIRGLRGVPVLFIPGNGGSYKQVRSLAAESFRAYQNGPLEPTFYQEASSSLPGDGLNNFSIPSRYGRMLDWFAVDLEGEHSAMDGQILEEHTEYVVYAIHRILDQYKESHLERSKGGAQSSPDLPSSVILVGHSMGGFVARAAVVHPNLRKSAVETILTLSSPHQYPPIALQPSLGHFFSHVNEEWRKGYKTGVSHAISSKLSNVVVVSVSGGIHDYQIRSRLASLDGIVPSTHGFMVGSSSMKNVWLSMEHQSILWCNQLAVQVAHTLLSIIDPVDRQPFSSTQKRVFVFTKMLQSAVPQSLSSMTHVPASLSRNLPANENQDAGELHKKDSLSCPSSTEWTSDGLEKDLYIQSNSVTVLAMDGRRRWLDIKKLGSNGRGHFVFVTNLAPCSGVRIHLWPEKHHSPVQNELPASKKIVEVTSKMVQIPAGPAPKQTISGRPPPAASMAVGQFFSPEEGASSFSIGTIIRSSFAPKEIFLLEDHPLALNLSFSASLGLLPVTLSLKTAGCGIKNPGDQMEAERNNLCKLRCFPPVALAWDSVSGLHIIPNIYSETVVVDSSPAFWDSPEGTDKTTVLILADPHCSYEVTSRASLSDAASRFFLLYSSEILGFMVAIMFFGIMRQTSAWECDSSMPSILSAIESNLGLPKAFMFLCFMPILVFCAFFIFTAEQKPPFGTFLLVTLICYIVANGFTILLILSSKLLLYVVAILHVFTKRRWQSWGNGVQSAFLGQFLSFSSFQSVKMLRNNPNIIVAVATLPLVCLVHPAIGLGLLLLSHAFHAHSNLCSFLAASFRSITQKKDLYKSKMGDGSVLLSKSKSDGLQQLLPMDDSPTASKSFTDSQLELFDYRHGVMILHLLSTLMFVPSLVAWLQRIGMGQNFPWFIDSAICVGVILHGLFGSQPNVSCCIFFKLPGRRGREIGLSFLYLVGGYYSFVSSMALAPYRALYAMATIGYICFISRILERRNMVRGDINSRRTRKHSHRH

SEQ ID NO: 188629 - protein, 652 aa, Zea Mays
MGGGGGFRGSCRVGAVLLFSAWVALAALSRLLRPVPNGCVMTYMYPTYIPIAATPRNISSDRYGLFLYHEGWKQIDFAKHIRGLRGVPVLFIPGNGGSYKQVRSLAAESFRAYQNGPLEPTFYQEASSSLPGDGLNNFSIPSRYGRMLDWFAVDLEGEHSAMDGQILEEHTEYVVYAIHRILDQYKESHLERSKGGAQSSPDLPSSVILVGHSMGGFVARAAVVHPNLRKSAVETILTLSSPHQYPPIALQPSLGHFFSHVNEEWRKGYKTGVSHAISSKLSNVVVVSVSGGIHDYQIRSRLASLDGIVPSTHGFMVGSSSMKNVWLSMEHQSILWCNQLAVQVAHTLLSIIDPVDRQPFSSTQKRVFVFTKMLQSAVPQSLSSMTHVPASLSRNLPANENQDAGELHKKDSLSCPSSTEWTSDGLEKDLYIQSNSVTVLAMDGRRRWLDIKKLGSNGRGHFVFVTNLAPCSGVRIHLWPEKHHSPVQNELPASKKIVEVTSKMVQIPAGPAPKQVEPGSQTEQPPPSAFLLLSPGEMSGFRFMTISVAPRPTISGRPPPAASMAVGQFFSPEEGASSFSIGTIIRSSFAPKEIFLLEDHPLALNLSFSASLGLLPVTLSLKTAGCGIKNPGDQMEAERNSELLLLVCQSFF

SEQ ID NO: 188630 - protein, 663 aa, Zea Mays
MIIRSRLASLDGIVPSTHGFMVGSSSMKNVWLSMEHQSILWCNQLAVQVAHTLLSIIDPVDRQPFSSTQKRVFVFTKMLQSAVPQSLSSMTHVPASLSRNLPANENQDAGELHKKDSLSCPSSTEWTSDGLEKDLYIQSNSVTVLAMDGRRRWLDIKKLGSNGRGHFVFVTNLAPCSGVRIHLWPEKHHSPVQNELPASKKIVEVTSKMVQIPAGPAPKQVEPGSQTEQPPPSAFLLLSPGEMSGFRFMTISVAPRPADPHCSYEVTSRASLSDAASRFFLLYSSEILGFMVAIMFFGIMRQTSAWECDSSMPSILSAIESNLGLPKAFMFLCFMPILVFCAFFIFTAEQKPPFGTFLLVTLICYIVANGFTILLILSSKLLLYVVAILHVFTKRRWQSWGNGVQSAFLGQFLSFSSFQSVKMLRNNPNIIVAVATLPLVCLVHPAIGLGLLLLSHAFHAHSNLCSFLAASFRSITQKKDLYKSKMGDGSVLLSKSKSDGLQQLLPMDDSPTASKSFTDSQLELFDYRHGVMILHLLSTLMFVPSLVAWLQRIGMGQNFPWFIDSAICVGVILHGLFGSQPNVSCCIFFKLPGRRGREIGLSFLYLVGGYYSFVSSMALAPYRALYAMATIGYICFISRILERRNMVRGDINSRRTRKHSHRH

SEQ ID NO: 188631 - protein, 283 aa, Zea Mays
MMMSDDDDAEPQLNAVEGYYFVDSKNEKEPVCFSTLPFWFGDTDDLPDGKKKLVLRGTGDPGVKVYDEVVACRLGLEGKQPEFAVLTAKGRRWIRLIRPLNSYEEMIRTVLITAQMLHFLRRKPHEPEKTLWNHLCKVFNKFDVPPSEDDFRNHCSLMKQFAAKDPVLAKSEILRVFIEGKSRKKFTEVGADHIDVKQPFITDDEGIDEMNVEDVDNESDEDDDEYLFDSICAICDDGGDILWALTCWLYMSPLATHLPNLSGMYINHLSGICGCEFIAYMFI

SEQ ID NO: 188632 - protein, 716 aa, Zea Mays
MFEVRILLYDYMRSSICRVITILGNKVSSLTIKDVTRNCSLPSTHVYSGRLTDKIPLGKIERSVQAVEAALKKLENGGSVNDAKAVCEPEVLRQLARWHIVDRLHWYVETGDMIVDFCCGANDFSRLMKEKLDKVQKKCHFKNYDLIQPQNRFCFEKRDWMTVQPNELPHGSQLIMGLNPPFGVKASLANKFIDKALTFKPKLIVLIVPKETKRLDQRRTPYDLIWEDSECLSGKSFYLPGSVDLNDKIVEGWNASAPPLYLWSHPGWTKKHMQVAEEHGHTCMGKIACHVEESNLSDDLSVRKQSDATNKLNSRSGKETPFNDRMSNLLDDGSARKQARSEEEKRTLGKIEHHVKKANIPDNLPVKKEPEASSKVMSHSGKDRKIGRYNRRRHDNRSSKGTPDHTESLPPEKQVEVAYEETRVIPSKKIAHNEKKSAQYNYEQTAAGMPNMRSRGGDSDMSISPPVSCNARSKPMSYSLTRPIEHLDTNAHLLAEEPSDSVLNRVPNHDSYLAIKEEYCDGFKRKNDPIFSHIDDSSRMRGSSIEEVTKPYITAPNSDPWSKGDGSFYRHPSSEDLNANADVLMPGYSARYGQIGGDSNPQASMVPLATDSRLHGGTVADNYLSARYSLGSSGARVSQPAPTVPPFGLSGASSQRGSVMDRYSYGLSGPTGTQRSVIDRYAPSLDGTNTTRSRSSLPEQYPFGQPGSSGGGWPHH

SEQ ID NO: 188633 - protein, 637 aa, Zea Mays
MAQGTVPLVDILQRWRNLLRIVDRLHWYVETGDMIVDFCCGANDFSRLMKEKLDKVQKKCHFKNYDLIQPQNRFCFEKRDWMTVQPNELPHGSQLIMGLNPPFGVKASLANKFIDKALTFKPKLIVLIVPKETKRLDQRRTPYDLIWEDSECLSGKSFYLPGSVDLNDKIVEGWNASAPPLYLWSHPGWTKKHMQVAEEHGHTCMGKIACHVEESNLSDDLSVRKQSDATNKLNSRSGKETPFNDRMSNLLDDGSARKQARSEEEKRTLGKIEHHVKKANIPDNLPVKKEPEASSKVMSHSGKDRKIGRYNRRRHDNRSSKGTPDHTESLPPEKQVEVAYEETRVIPSKKIAHNEKKSAQYNYEQTAAGMPNMRSRGGDSDMSISPPVSCNARSKPMSYSLTRPIEHLDTNAHLLAEEPSDSVLNRVPNHDSYLAIKEEYCDGFKRKNDPIFSHIDDSSRMRGSSIEEVTKPYITAPNSDPWSKGDGSFYRHPSSEDLNANADVLMPGYSARYGQIGGDSNPQASMVPLATDSRLHGGTVADNYLSARYSLGSSGARVSQPAPTVPPFGLSGASSQRGSVMDRYSYGLSGPTGTQRSVIDRYAPSLDGTNTTRSRSSLPEQYPFGQPGSSGGGWPHH

SEQ ID NO: 188634 - protein, 1033 aa, Zea Mays
MRSFHAKEGSGEDSCCVTLGYTEAEVEAMKLFLCKNCEYKQHQCFICGVLEPSDGEAAKVFLCNNATCGHFYHPKCVAQQLHPINIDEASELEKKITEGFSFTCPIHWCFHCKGLEDRTQEPLQFAVCRRCPKSYHRKCLPSEISFDENEEDDIIIRAWELSKRILIYCLDHEIDSELETPVRDHIKFPKIEKPLQFVKKGSSLLPKKKKRTYSETVLEQSPKDTVKRKSKVHMLEREQNKQDTREVSAKSFTQNLVDTPVKKKAKLKEKIQLPYVAKDHFISSPKSVKEQEQELVPLPLSAIRKSSFPKVDSETEKRVITILGNKVSSLTIKDVTRNCSLPSTHVYSGRLTDKIPLGKIERSVQAVEAALKKLENGGSVNDAKAVCEPEVLRQLARWHSKLRVYISPFIHGTRYSSFGRHFTKVEKLVEIVDFCCGANDFSRLMKEKLDKVQKKCHFKNYDLIQPQNRFCFEKRDWMTVQPNELPHGSQLIMGLNPPFGVKASLANKFIDKALTFKPKLIVLIVPKETKRLDQRRTPYDLIWEDSECLSGKSFYLPGSVDLNDKIVEGWNASAPPLYLWSHPGWTKKHMQVAEEHGHTCMGKIACHVEESNLSDDLSVRKQSDATNKLNSRSGKETPFNDRMSNLLDDGSARKQARSEEEKRTLGKIEHHVKKANIPDNLPVKKEPEASSKVMSHSGKDRKIGRYNRRRHDNRSSKGTPDHTESLPPEKQVEVAYEETRVIPSKKIAHNEKKSAQYNYEQTAAGMPNMRSRGGDSDMSISPPVSCNARSKPMSYSLTRPIEHLDTNAHLLAEEPSDSVLNRVPNHDSYLAIKEEYCDGFKRKNDPIFSHIDDSSRMRGSSIEEVTKPYITAPNSDPWSKGDGSFYRHPSSEDLNANADVLMPGYSARYGQIGGDSNPQASMVPLATDSRLHGGTVADNYLSARYSLGSSGARVSQPAPTVPPFGLSGASSQRGSVMDRYSYGLSGPTGTQRSVIDRYAPSLDGTNTTRSRSSLPEQYPFGQPGSSGGGWPHH

SEQ ID NO: 188635 - protein, 1073 aa, Zea Mays
MSISNFLQYILVLSVDVVIFFCDGPCMRSFHAKEGSGEDSCCVTLGYTEAEVEAMKLFLCKNCEYKQHQCFICGVLEPSDGEAAKVFLCNNATCGHFYHPKCVAQQLHPINIDEASELEKKITEGFSFTCPIHWCFHCKGLEDRTQEPLQFAVCRRCPKSYHRKCLPSEISFDENEEDDIIIRAWELSKRILIYCLDHEIDSELETPVRDHIKFPKIEKPLQFVKKGSSLLPKKKKRTYSETVLEQSPKDTVKRKSKVHMLEREQNKQDTREVSAKSFTQNLVDTPVKKKAKLKEKIQLPYVAKDHFISSPKSVKEQEQELVPLPLSAIRKSSFPKVDSETEKRVITILGNKVSSLTIKDVTRNCSLPSTHVYSGRLTDKIPLGKIERSVQAVEAALKKLENGGSVNDAKAVCEPEVLRQLARWHSKLRVYISPFIHGTRYSSFGRHFTKVEKLVEIVDRLHWYVETGDMIVDFCCGANDFSRLMKEKLDKVQKKCHFKNYDLIQPQNRFCFEKRDWMTVQPNELPHGSQLIMGLNPPFGVKASLANKFIDKALTFKPKLIVLIVPKETKRLDQRRTPYDLIWEDSECLSGKSFYLPGSVDLNDKIVEGWNASAPPLYLWSHPGWTKKHMQVAEEHGHTCMGKIACHVEESNLSDDLSVRKQSDATNKLNSRSGKETPFNDRMSNLLDDGSARKQARSEEEKRTLGKIEHHVKKANIPDNLPVKKEPEASSKVMSHSGKDRKIGRYNRRRHDNRSSKGTPDHTESLPPEKQVEVAYEETRVIPSKKIAHNEKKSAQYNYEQTAAGMPNMRSRGGDSDMSISPPVSCNARSKPMSYSLTRPIEHLDTNAHLLAEEPSDSVLNRVPNHDSYLAIKEEYCDGFKRKNDPIFSHIDDSSRMRGSSIEEVTKPYITAPNSDPWSKGDGSFYRHPSSEDLNANADVLMPGYSARYGQIGGDSNPQASMVPLATDSRLHGGTVADNYLSARYSLGSSGARVSQPAPTVPPFGLSGASSQRGSVMDRYSYGLSGPTGTQRSVIDRYAPSLDGTNTTRSRSSLPEQYPFGQPGSSGGGWPHH

SEQ ID NO: 188636 - protein, 524 aa, Zea Mays
MSISNFLQYILVLSVDVVIFFCDGPCMRSFHAKEGSGEDSCCVTLGYTEAEVEAMKLFLCKNCEYKQHQCFICGVLEPSDGEAAKVFLCNNATCGHFYHPKCVAQQLHPINIDEASELEKKITEGFSFTCPIHWCFHCKGLEDRTQEPLQFAVCRRCPKSYHRKCLPSEISFDENEEDDIIIRAWELSKRILIYCLDHEIDSELETPVRDHIKFPKIEKPLQFVKKGSSLLPKKKKRTYSETVLEQSPKDTVKRKSKVHMLEREQNKQDTREVSAKSFTQNLVDTPVKKKAKLKEKIQLPYVAKDHFISSPKSVKEQEQELVPLPLSAIRKSSFPKVDSETEKRVITILGNKVSSLTIKDVTRNCSLPSTHVYSGRLTDKIPLGKIERSVQAVEAALKKLENGGSVNDAKAVCEPEVLRQLARWHSKLRVYISPFIHGTRYSSFGRHFTKVEKLVEIVDFCCGANDFSRLMKEKLDKVQKKCHFKNYDLIQPQNRFCFEKRDWMTVQPNELPHGSQLVSFWEIV

SEQ ID NO: 188637 - protein, 1036 aa, Zea Mays
MSISNFLQYILVLSVDVVIFFCDGPCMRSFHAKEGSGEDSCCVTLGYTEAEVEAMKLFLCKNCEYKQHQCFICGVLEPSDGEAAKVFLCNNATCGHFYHPKCVAQQLHPINIDEASELEKKITEGFSFTCPIHWCFHCKGLEDRTQEPLQFAVCRRCPKSYHRKCLPSEISFDENEEDDIIIRAWELSKRILIYCLDHEIDSELETPVRDHIKFPKIEKPLQFVKKGSSLLPKKKKRTYSETVLEQSPKDTVKRKSKVHMLEREQNKQDTREVSAKSFTQNLVDTPVKKKAKLKEKIQLPYVAKDHFISSPKSVKEQEQELVPLPLSAIRKSSFPKVDSETEKRVITILGNKVSSLTIKDVTRNCSLPSTHVYSGRLTDKIPLGKIERSVQAVEAALKKLENGGSVNDAKAVCEPEVLRQLARWHSKLRVYISPFIHGTRYSSFGRHFTKVEKLVEIVDRLHWYVETGDMNRFCFEKRDWMTVQPNELPHGSQLIMGLNPPFGVKASLANKFIDKALTFKPKLIVLIVPKETKRLDQRRTPYDLIWEDSECLSGKSFYLPGSVDLNDKIVEGWNASAPPLYLWSHPGWTKKHMQVAEEHGHTCMGKIACHVEESNLSDDLSVRKQSDATNKLNSRSGKETPFNDRMSNLLDDGSARKQARSEEEKRTLGKIEHHVKKANIPDNLPVKKEPEASSKVMSHSGKDRKIGRYNRRRHDNRSSKGTPDHTESLPPEKQVEVAYEETRVIPSKKIAHNEKKSAQYNYEQTAAGMPNMRSRGGDSDMSISPPVSCNARSKPMSYSLTRPIEHLDTNAHLLAEEPSDSVLNRVPNHDSYLAIKEEYCDGFKRKNDPIFSHIDDSSRMRGSSIEEVTKPYITAPNSDPWSKGDGSFYRHPSSEDLNANADVLMPGYSARYGQIGGDSNPQASMVPLATDSRLHGGTVADNYLSARYSLGSSGARVSQPAPTVPPFGLSGASSQRGSVMDRYSYGLSGPTGTQRSVIDRYAPSLDGTNTTRSRSSLPEQYPFGQPGSSGGGWPHH

SEQ ID NO: 188638 - protein, 1042 aa, Zea Mays
MSISNFLQYILVLSVDVVIFFCDGPCMRSFHAKEGSGEDSCCVTLGYTEAEVEAMKLFLCKNCEYKQHQCFICGVLEPSDGEAAKVFLCNNATCGHFYHPKCVAQQLHPINIDEASELEKKITEGFSFTCPIHWCFHCKGLEDRTQEPLQFAVCRRCPKSYHRKCLPSEISFDENEEDDIIIRAWELSKRILIYCLDHEIDSELETPVRDHIKFPKIEKPLQFVKKGSSLLPKKKKRTYSETVLEQSPKDTVKRKSKVHMLEREQNKQDTREVSAKSFTQNLVDTPVKKKAKLKEKIQLPYVAKDHFISSPKSVKEQEQELVPLPLSAIRKSSFPKVDSETEKRVITILGNKVSSLTIKDVTRNCSLPSTHVYSGRLTDKIPLGKIERSVQAVEAALKKLENGGSVNDAKAVCEPEVLRQLARWHIVDRLHWYVETGDMIVDFCCGANDFSRLMKEKLDKVQKKCHFKNYDLIQPQNRFCFEKRDWMTVQPNELPHGSQLIMGLNPPFGVKASLANKFIDKALTFKPKLIVLIVPKETKRLDQRRTPYDLIWEDSECLSGKSFYLPGSVDLNDKIVEGWNASAPPLYLWSHPGWTKKHMQVAEEHGHTCMGKIACHVEESNLSDDLSVRKQSDATNKLNSRSGKETPFNDRMSNLLDDGSARKQARSEEEKRTLGKIEHHVKKANIPDNLPVKKEPEASSKVMSHSGKDRKIGRYNRRRHDNRSSKGTPDHTESLPPEKQVEVAYEETRVIPSKKIAHNEKKSAQYNYEQTAAGMPNMRSRGGDSDMSISPPVSCNARSKPMSYSLTRPIEHLDTNAHLLAEEPSDSVLNRVPNHDSYLAIKEEYCDGFKRKNDPIFSHIDDSSRMRGSSIEEVTKPYITAPNSDPWSKGDGSFYRHPSSEDLNANADVLMPGYSARYGQIGGDSNPQASMVPLATDSRLHGGTVADNYLSARYSLGSSGARVSQPAPTVPPFGLSGASSQRGSVMDRYSYGLSGPTGTQRSVIDRYAPSLDGTNTTRSRSSLPEQYPFGQPGSSGGGWPHH

SEQ ID NO: 188639 - protein, 155 aa, Zea Mays
MTLAWRASSILAFVSSVLRVVHRLHLVVSTTSLRTINISRSLTHAPRTQTRRRSCMALSMARLQGTRRRWAGTLARQRECLSMEEGVRSGLPISCASWAPAIAAMGRRKRHGRRKGCYSWTCVGMGMRRGCCCVLEQREVACGGREGEGVDGGIF

SEQ ID NO: 188640 - protein, 64 aa, Zea Mays
MRKVEKLIGEIRAMHEGDIVGAAAAPEGEGEKARRWSMRREVDGSAGARRADERDGVQDARTTQ

SEQ ID NO: 188641 - protein, 97 aa, Zea Mays
METLVEIADQSPPKRPRYDKEDEELLEKVNSQEVTEMTFRDCLTQHVEQVDYEMALDYAMQSGVSEEPREAIYLNSLEGSYKFVDLQSPVFVFRFVH

SEQ ID NO: 188642 - protein, 188 aa, Zea Mays
MALLLRLAAPSVPPRRSSGLRALPRVVLPEVVSKQSFLRLLVDSTASMPCPIKCSAARCAPSLTEHNDSRNNGIHASSVYGHDLMKSMSDLQEVVFSSFSKACLLSSCIIYGLPPSCIAEPWASLQRQGKYKEAINYHSMVLNISKVTGEDAGVTEAYGAIADCYTELGELEKAGKFYDKYIARLENE

SEQ ID NO: 188643 - protein, 295 aa, Zea Mays
MALLLRLAAPSVPPRRSSGLRALPRVVLPEVVSKQSFLRLLVDSTASMPCPIKCSAARCAPSLTEHNDSRNNGIHASSVYGHDLMKSMSDLQEVVFSSFSKACLLSSCIIYGLPPSCIAEPWLLARQRRGELARLNDQLRQINAALRRQAKIESYAPALSYAPVGSKIPESEVIVDPQKQRLIAYLRTGKNYLRNQAPDKAFPEFKAALDLARSLGDHVEEKKAARGLGASLQRQGKYKEAINYHSMVLNISKVTGEDAGVTEAYGAIADCYTELGELEKAGKFYDKYIARLENE

SEQ ID NO: 188644 - protein, 148 aa, Zea Mays
MALLLRLAAPSVPPRRSSGLRALPRVVLPEVVSKQSFLRLLVDSTASMPCPIKCSAARCAPSLTEHNDSRNNGIHASSVYGHDLMKSMSDLQEVVFSSFSKACLLSSCIIYGLPPSCIAEPCEQEYFLPNMPLLFAIAMVGATVGDIM

SEQ ID NO: 188645 - protein, 86 aa, Zea Mays
MPLHHRVPCCRDLLHRVPRHRESLSEAPCAAPVSLASAIKPAIVAVPCRQLLLACYAVVCRSRSRRHRRSGHLFGAPFSPRKECGR

SEQ ID NO: 188646 - protein, 229 aa, Zea Mays
MGWALRLPWRWFMKTDTSKPWFGLPIQIPARAAALFKMAVEVTIGNGEDTLFWTDKWLQGRCVADLALEIYHAIPKRVAKRRTVSQALSNRCWISDIKGALTVQVLAGYLHIWDLVEGTVLQPNTPDKHVWRLSSTGCYSSKSAYNAMFVGTIKFSPWKRIWKTWAPANCKFLYGWPSITVVGPQIAWPSMVCPIIRHAPSATKHRRRSTTCFPPVCWPRRYGLQCCMG

SEQ ID NO: 188647 - protein, 315 aa, Zea Mays
MNLYSFNKLQRVPSYQFQLLLMKRGGQIIYSGSLGPLSRSLTEYFEAIPGVPSIKDGQNPAAWMLDITSHTMEYTIRVDYSEVYRKSSLHRENMALVDELSKRRVNQKDLHFPPGYWPNFKAQCMACLWKQHCSFWKNPELNVARFLNTFGISMTFGIVFWQIGSTVKEEQDVFNILGIAYASALFLGLVNCSTLQPILAMEKVVFYREKASDMYSSMAYVITQIGIEIPYMIIQVFIFSAIVYPMAGFQLTVTKFFWFVLYMILSFTDYTLYGMMAVALAPSIEIASGLSFLIFMIWNVFSGFIVSRKVFFFLF

SEQ ID NO: 188648 - protein, 438 aa, Zea Mays
MQMTASHLPYTRNGLKFFTKRGGLTSGDVENICDRAAHKYVARKTGVGGGGRGTPPVVMRVDLMSAYAQHLRDIIKQRVAHPTHYDTPLRGFKVVVNAGNGCGGFFTWDVLEKLGADTTGSLHLEPDGRFPNHIPNPEDATAMSLTRGAVLAQGADLGVVFDTDVDRSGVVDAGGAAINGDRLIALMSAIVLGEHPGTMVVTDARASDGLTRFVESRGGRHCLYRVGYRNVIDKGVQLNADGVETHLMMETTGHGALKENYFLDDGAYMVVKIIIEMVRMKLAGVEGGVGSLIRDLQEPAESVLLRMDVMGEPKDAKERATHAVEAFKNYIQEDKLFGWVLDDCGDCSVAEGCLMDTNNDPIDVDAHMYRAKLYDENQRAVGMVHIRQSVHNPNIALNMQSYAPGGCKSMAKDLLERFLLASGLNGFLDISQVEKFVQ

SEQ ID NO: 188649 - protein, 1475 aa, Zea Mays
MCPRAPELVRKEMAGYLKKNARNKKLLLDNEGENVEEGQEDSDAREVPSSGTTGKQVKRKLAQAAINSFMVSGPVKPQTQKQCKSVSSMLCKTPEEVVAERNNSKCSQTTLEHLTKKDKESKQIVDDHVADFLIENGIPFNVINSRSWEIMLESIGQYGPGYRSPTYHDCRDKLLDRTVGRTAELRKKHEESWKEYGCSIMSDGWTSTNHRHIINFLANSPAGTFFLGSVDASSEVANANMLANLLEQHINQVGKENVVQVVTNNGVNFKAAVRILMERIPTLFWTPCAAHCLDLMLEDIGKINNFNTCINHTKKVTRFVYKNGRVLDMMRASQPLLIALRIVDGDETPAMPDIMATMEKAKSSITNSLSKKPQLVRMDRSLLPPPAPSPPAPSPALPDGESPALPGAILPHPSLAAAVQPAVPFSTSRTSSLTPRAAATLQASGRLLLHQDLVHSSHSSGRGKALRWRDSSPSSDSLDVGSPSSFKDILLAGTVSASVSVTSGDIVSHGAQARTLQASVQNSSGDGGRFVRRSSPLRSLVQPRLQKPLVDRDGFTLVESRRTQKQRRRLEKSFGVQALETFKGRCFKCLSPHHRVALCRSIIRCLLCHTPGHTSYTCPRRLQPYRQQPSFPPVCSRMAGRLCAPVHRLPPVHAAQCSVDAEGPLPDVSRGRRRRLESDIAVDAGDDVCTEPQFAPTRIIPWSPSFNQRTEVLDRAIVLTVTVAINEAVEEAILDSFARRLALVHDSLSMCRLGPACLLLILPSLEMADRAFDGGRIVNLSPTTKIHVMRWSRTLNSSAAASLPFQVEIEVSGIPAHAWELETVHALLNEWCWIADLHPDCERQREVFKVTAWCSSPGSIPKEFKLEIVDPVTTDGGMLRRSLVYPIRVSVKVLDRPDMLQSLQPSPPPAEDDPDQGRRRRRRRSRRSSFGINAPGKGSTTAVLPRVSVHQRLGPRVQACGKEGVRVPRLAVHKRLGPLGIFNADKGAVKKMKRVWIPKRKLESSVSIWIPKTSSALVSPLPVAVDDAFLEATSSTVVTEDTLAGSPEVIPVDGGICSEAAIISDAPARFPMVESDLQDVNVLSEGVGLPLVESDLQNIHLMESSLSRKHLMSPSLLVYSRKRHQKLQLIDSIDENGNVGAAADAIISPASATGLAADGTDHVGQGPVIIGDVADAIVSPATAITFTRSEPILSLVEPTAAVADILMSPAGVAPSLLPSPSGEQESLVEPTAAVADILMSPAGVAPSLLPSPSGEQETSQSLQREVFIKSVTRQPSKLLPAPPVILKKKDNKLPSRSVPRRSRRVAGVGVEFNASDLDRRAIKKIMKAVGIIADNVGIDQRAQEEYADLFKTSLSDIHVKALAALFGWQRWDDQMEQKIYGAALFLNPSKFFTLREKDRRSAARLRSMFNDVLWKMVVDEDEQINWWGSYGGNTFELQCLAKKIVSLCCSASDRERSWSAFANVCVPFVCIFCLL

SEQ ID NO: 188650 - protein, 1125 aa, Zea Mays
MPDIMATMEKAKSSITNSLSKKPQLVRMDRSLLPPPAPSPPAPSPALPDGESPALPGAILPHPSLAAAVQPAVPFSTSRTSSLTPRAAATLQASGRLLLHQDLVHSSHSSGRGKALRWRDSSPSSDSLDVGSPSSFKDILLAGTVSASVSVTSGDIVSHGAQARTLQASVQNSSGDGGRFVRRSSPLRSLVQPRLQKPLVDRDGFTLVESRRTQKQRRRLEKSFGVQALETFKGRCFKCLSPHHRVALCRSIIRCLLCHTPGHTSYTCPRRLQPYRQQPSFPPVCSRMAGRLCAPVHRLPPVHAAQCSVDAEGPLPDVSRGRRRRLESDIAVDAGDDVCTEPQFAPTRIIPWSPSFNQRTEVLDRAIVLTVTVAINEAVEEAILDSFARRLALVHDSLSMCRLGPACLLLILPSLEMADRAFDGGRIVNLSPTTKIHVMRWSRTLNSSAAASLPFQVEIEVSGIPAHAWELETVHALLNEWCWIADLHPDCERQREVFKVTAWCSSPGSIPKEFKLEIVDPVTTDGGMLRRSLVYPIRVSVKVLDRPDMLQSLQPSPPPAEDDPDQGRRRRRRRSRRSSFGINAPGKGSTTAVLPRVSVHQRLGPRVQACGKEGVRVPRLAVHKRLGPLGIFNADKGAVKKMKRVWIPKRKLESSVSIWIPKTSSALVSPLPVAVDDAFLEATSSTVVTEDTLAGSPEVIPVDGGICSEAAIISDAPARFPMVESDLQDVNVLSEGVGLPLVESDLQNIHLMESSLSRKHLMSPSLLVYSRKRHQKLQLIDSIDENGNVGAAADAIISPASATGLAADGTDHVGQGPVIIGDVADAIVSPATAITFTRSEPILSLVEPTAAVADILMSPAGVAPSLLPSPSGEQESLVEPTAAVADILMSPAGVAPSLLPSPSGEQETSQSLQREVFIKSVTRQPSKLLPAPPVILKKKDNKLPSRSVPRRSRRVAGVGVEFNASDLDRRAIKKIMKAVGIIADNVGIDQRAQEEYADLFKTSLSDIHVKALAALFGWQRWDDQMEQKIYGAALFLNPSKFFTLREKDRRSAARLRSMFNDVLWKMVVDEDEQINWWGSYGGNTFELQCLAKKIVSLCCSASDRERSWSAFANVCVPFVCIFCLL

SEQ ID NO: 188651 - protein, 363 aa, Zea Mays
MAFWGVEVKPGKPYTHIHHADHGRLRICQATLGNCDAAARTVLQCNVGNKIPIKLCSLNPKLAETCHLEVEFEEVDDVIFSVIGHSSIHLSGYYVCASNRSNVGDDESESYGEDIGHSSTDEEHDTSEDSYESDFIDDREVPLSEKYGSGSIDDSDDECTQRCHRQKAEKTTQNAERRRRLKKHQANGITKKRIIDVKKRKQSSISEDPASSMDMTDANAPSVSKQVDEIKKKSKKKMRNQSGENNEKQSNIRTLDDGLVVEYLSMGNNDAKVASDGCKVYIKYVGMLKDGKIVESNVSEKPYKFKLGAGKVIRGWDVGIHGMRVGEKRKLTVPPSMLSGGKSVGEVPENSSVIYEIELVKVK

SEQ ID NO: 188652 - protein, 429 aa, Zea Mays
MAFWGVEVKPGKPYTHIHHADHGRLRICQATLGNCDAAARTVLQCNVGNKIPIKLCSLNPKLAETCHLEVEFEEVDDVIFSVIGHSSIHLSGYYVCASNRSNVGDDESESYGEDIGHSSTDEEHDTSEDSYESDFIDDREVPLSEKYGSGSIDDSDDECTQRCHRQKAEKTTQNAERRRRLKKHQVGSTDYDDDDTPVMKHVAKRCAPKISDSGDDDTPVTKPVVKRRASIFDSDSDEDDNVPISLALGKKDNAKVAEETEHQNGQANGITKKRIIDVKKRKQSSISEDPASSMDMTDANAPSVSKQVDEIKKKSKKKMRNQSGENNEKQSNIRTLDDGLVVEYLSMGNNDAKVASDGCKVYIKYVGMLKDGKIVESNVLEKLSVDGMLVFMVCVLARKESLQFHLQCSLAVNQWEKYPKILQSYMKSS

SEQ ID NO: 188653 - protein, 379 aa, Zea Mays
MAFWGVEVKPGKPYTHIHHADHGRLRICQATLGNCDAAARTVLQCNVGNKIPIKLCSLNPKLAETCHLEVEFEEVDDVIFSVIGHSSIHLSGYYVCASNRSNVGDDESESYGEDIGHSSTDEEHDTSEDSYESDFIDDREVPLSEKYGSGSIDDSDDECTQRCHRQKAEKTTQNAERRRRLKKHQKDNAKVAEETEHQNGQANGITKKRIIDVKKRKQSSISEDPASSMDMTDANAPSVSKQVDEIKKKSKKKMRNQSGENNEKQSNIRTLDDGLVVEYLSMGNNDAKVASDGCKVYIKYVGMLKDGKIVESNVSEKPYKFKLGAGKVIRGWDVGIHGMRVGEKRKLTVPPSMLSGGKSVGEVPENSSVIYEIELVKVK

SEQ ID NO: 188654 - protein, 151 aa, Zea Mays
MDMTDANAPSVSKQVDEIKKKSKKKMRNQSGENNEKQSNIRTLDDGLVVEYLSMGNNDAKVASDGCKVYIKYVGMLKDGKIVESNVSEKPYKFKLGAGKVIRGWDVGIHGMRVGEKRKLTVPPSMLSGGKSVGEVPENSSVIYEIELVKVK

SEQ ID NO: 188655 - protein, 332 aa, Zea Mays
MAAAGRPWRVIPRPLLETVLHNYALHPRVPQPLLFHGPRGVGKSTLLLHRLLPRWSDQPHAVAFINFLHPSPSSPAAAPWSLLPADPASPHSLHDLRLRLESALEGLARAAVLCGAVGSKDVLAALSRNHGVSTALSRLLIPPATRSSATSVPARRSSSTSVPALWSRAVLAAVHRDDTAFCIGEGEATSCSMEEKAYMQEAMAALRVAKEVLGMQEGWRKEAIREMNRTGRFSRSLANSATDWPCLLLDVLSRAAEEEFFQPKLILNNVDVLRKAICEDETMVPAAMYHDSFIWRVIALGANEKCLPVIMSTSDGFTGYGISNCKTSTLLH

SEQ ID NO: 188656 - protein, 348 aa, Zea Mays
MAAAGRPWRVIPRPLLETVLHNYALHPRVPQPLLFHGPRGVGKSTLLLHRLLPRWSDQPHAVAFINFLHPSPSSPAAAPWSLLPADPASPHSLHDLRLRLESALEGLARAAVLCGAVGSKDVLAALSRNHGVSTALSRLLIPPATRSSATSVPARRSSSTSVPALWSRAVLAAVHRDDTAFCIGEGEATSCSMEEKAYMQEAMAALRVAKEVLGMQEGWRKEAIREMNRTGRFSRSLANSATDWPCLLLDVLSRAAEEEFFQPKLILNNVDVLRKAICEDETMVPAAMYHDSFIWRVIALGANEKCLPVIMSTSDGYYSSQAFVDFGFPNIFISREVYIPELKLMRLR

SEQ ID NO: 188657 - protein, 525 aa, Zea Mays
MAAAGRPWRVIPRPLLETVLHNYALHPRVPQPLLFHGPRGVGKSTLLLHRLLPRWSDQPHAVAFINFLHPSPSSPAAAPWSLLPADPASPHSLHDLRLRLESALEGLARAAVLCGAVGSKDVLAALSRNHGVSTALSRLLIPPATRSSATSVPARRSSSTSVPALWSRAVLAAVHRDDTAFCIGEGEATSCSMEEKAYMQEAMAALRVAKEVLGMQEGWRKEAIREMNRTGRFSRSLANSATDWPCLLLDVLSRAAEEEFFQPKLILNNVDVLRKAICEDETMVPAAMYHDSFIWRVIALGANEKCLPVIMSTSDGYYSSQAFVDFGFPNIFISRETFGWTPQEAKLHMVSEFFSEQEWKVVDEVLGPNPRQLSEIYMLKQKANSPEVLHDRNIEEIIDTYLAHLQVSVVNPAMEKALKMLQEFASDVREGKVPKIRSSFGAPWRHPPRDDNPDLSYKWAKIQLMDFIQSFVNTEFGVNYLADDSLEILDDPAAVAMMEVGLLYQQREPSFMRPITRGIQRCLAR

SEQ ID NO: 188658 - protein, 586 aa, Zea Mays
MAAAGRPWRVIPRPLLETVLHNYALHPRVPQPLLFHGPRGVGKSTLLLHRLLPRWSDQPHAVAFINFLHPSPSSPAAAPWSLLPADPASPHSLHDLRLRLESALEGLARAAVLCGAVGSKDVLAALSRNHGVSTALSRLLIPPATRSSATSVPARRSSSTSVPALWSRAVLAAVHRDDTAFCIGEGEATSCSMEEKAYMQEAMAALRVAKEVLGMQEGWRKEAIREMNRTGRFSRSLANSATDWPCLLLDVLSRAAEEEFFQPKLILNNVDVLRKAICEDETMVPAAMYHDSFIWRVIALGANEKCLPVIMSTSDGYYSSQAFVDFGFPNIFISRETFGWTPQEAKLHMVSEFFSEQEWKVVDEVLGPNPRQLSEIYMLKQKANSPEVLHDRNIEEIIDTYLAHLQVSVVNPAMEKALKMLQEFASDVREGKVPKIRSSFGAPWRHPPRDDNPDLSYKWAKIQLMDFIQSFVNTEFGVNYLADDSLEILDDPAAVAMMEVGLLYQQREPSFMRPITRGIQRCLARWFVLLLKYCDKWLCALILISISSRLAEQRLQLNIQETLAFFWQRLIRGRSYRHLMKEVGYK

SEQ ID NO: 188659 - protein, 331 aa, Zea Mays
MEDKKKGSITKIDLWDESHKKRNGNYVNQNVQTLMGKAFDELENRRKDKGTLSTSDYDDVFENVIRKDLNIRGYYDDTYWSNGTYSHVQSEENKMIRRDLELAISGFRNIRAFLEKKFPEEELLSTILATGSRSTTQVDTKDNENVSLQYDNVERSSYEKSPSPYNEQIYTRDYNIAKVGCSDHSVPNDNIAFRESQVTRSSDLNQELNNGSLSPDKEMSDKETQSKQQQQSKLQQNKQKTVLLYSTRKRKLGQVVAVGNLISRDTTHEIGGTVLGDGYYAVAVHYLNNVEDERLPRPHGDLKTLEDAVGMCVAWPRTHLKRVKPTTEKRT

SEQ ID NO: 188660 - protein, 563 aa, Zea Mays
MAAGTISRIRLENFMCHSSLHIELDKHVNFITGQNGSGKSAILTALCVAFGCRAKNTQRAASLKDFIKTGCSYAAITVDINNHGEDAFKPEVYGDTIILERRITESASSTVLKDQHGRKVAHRKDDLNEIIEHFNIEVENPCVIMSQDKSREFLHSGNDKDKFKFFFKATLLQQVNDLLATIRDNLNIAASIVEELEASIRPALRELDEIQEKIKNMEHIEEIAHEIENLNKKLAWVWVYDVDKKIGGQQEYLEKLKERIPACQERIDRNIAIIEELRKEFIVKKENFKSFLEKTQEARRMKEKMDHDIREAVKLKMDLEKEHARGRQTLNKMNARVVQLEEQVHEFELQHMQQTQAEVSQVEDSIRELQQEINSAHLNATRLSEKEKKSSEELRAIIKNIGDIGKEIEEDGRRINQLRSQIDDIRRRQQNKLTAFGGDRVPSLYKSVERHMSKFKCPPIGPIGYHLQLASDSWSVAIEYALGRLLDAFIVSCHKDSLVLRECAKEVNYRNLQIIIYDFTKPRSFASVNATPNSTFSYSFGNSYYIKCVSGSGPCRETGPSSG

SEQ ID NO: 188661 - protein, 756 aa, Zea Mays
MAAGTISRIRLENFMCHSSLHIELDKHVNFITGQNGSGKSAILTALCVAFGCRAKNTQRAASLKDFIKTGCSYAAITVDINNHGEDAFKPEVYGDTIILERRITESASSTVLKDQHGRKVAHRKDDLNEIIEHFNIEVENPCVIMSQDKSREFLHSGNDKDKFKFFFKATLLQQVNDLLATIRDNLNIAASIVEELEASIRPALRELDEIQEKIKNMEHIEEIAHEIENLNKKLAWVWVYDVDKKIGGQQEYLEKLKERIPACQERIDRNIAIIEELRKEFIVKKENFKSFLEKTQEARRMKEKMDHDIREAVKLKMDLEKEHARGRQTLNKMNARVVQLEEQVHEFELQHMQQTQAEVSQVEDSIRELQQEINSAHLNATRLSEKEKKSSEELRAIIKNIGDIGKEIEEDGRRINQLRSQIDDIRRRQQNKLTAFGGDRVPSLYKSVERHMSKFKCPPIGPIGYHLQLASDSWSVAIEYALGRLLDAFIVSCHKDSLVLRECAKEVNYRNLQIIIYDFTKPRVDIPDHLLPSTPHPTVLSVIHSEIPTILNVLVDQGHAERQVLVRDDETGKSVAFDQRIRNLKEVYTSDGCKMFCRGSVQTILPANRNWRAGRLCTSLEEKITEMEQEATEIKQINSERLDRKRKLFADRDSIDLELRQLKRKREDEELHVERKKAQLVDTKKISIDNSHAAAVDTSELVVEMMQVKEDIENQELVVQKINLKLTDALQEENNRRASYKDFIGPTNRCNPHHVF

SEQ ID NO: 188662 - protein, 561 aa, Zea Mays
MAAGTISRIRLENFMCHSSLHIELDKHVNFITGQNGSGKSAILTALCVAFGCRAKNTQRAASLKDFIKTGCSYAAITVDINNHGEDAFKPEVYGDTIILERRITESASSTVLKDQHGRKVAHRKDDLNEIIEHFNIEVENPCVIMSQDKSREFLHSGNDKDKFKFFFKATLLQQVNDLLATIRDNLNIAASIVEELEASIRPALRELDEIQEKIKNMEHIEEIAHEIENLNKKLAWVWVYDVDKKIGGQQEYLEKLKERIPACQERIDRNIAIIEELRKEFIVKKENFKSFLEKTQEARRMKEKMDHDIREAVKLKMDLEKEHARGRQTLNKMNARVVQLEEQVHEFELQHMQQTQAEVSQVEDSIRELQQEINSAHLNATRLSEKEKKSSEELRAIIKNIGDIGKEIEEDGRRINQLRSQIDDIRRRQQNKLTAFGGDRVPSLYKSVERHMSKFKCPPIGPIGYHLQLASDSWSVAIEYALGRLLDAFIVSCHKDSLVLRECAKEVNYRNLQIIIYDFTKPRVDIPDHLLPSTPHPTVLSVIHSEIPTILNVLVDQRDRS

SEQ ID NO: 188663 - protein, 105 aa, Zea Mays
MACLLPRRRSDSSFSAISITPCSPSGDELGLCSSPAPMVAPVGSPWRLTLLSVCPWSRPAQPCLLPPCARHGRRLQASPCCARGRAPLLATARRAPAPSPFPVRP

SEQ ID NO: 188664 - protein, 142 aa, Zea Mays
MHPLSSLLLFRSAAPPSALPLRRRRRSHTPVRASWQELAGVLVFSAIPFTAVKALANSPLGARLRRRLEDRKAAAAAEADALRAASRGARNNRCSPFYCFIKRGTRRLICLSCIRVATIAAFGTVEIGHGGLVPCLTTTLSI

SEQ ID NO: 188665 - protein, 143 aa, Zea Mays
MHPLSSLLLFRSAAPPSALPLRRRRRSHTPVRASWQELAGVLVFSAIPFTAVKALANSPLGARLRRRLEDRKAAAAAEADALRAASRGARNNSFWYGGDRPRWLGPVPYDYPEYLTGEYPGDYGFDIAGLGRDPVAFANYFKL

SEQ ID NO: 188666 - protein, 160 aa, Zea Mays
MRHGSTYLADCKVPRNFRLLEELERGEKGIGDGTVSYGMDDADDIYMRSWTGTIIGPHNFMSSCINLFSYLKTVHEGRIYQLKLFCDKDYPEKPPSVRFHSRINLTCVNHETGVVDPKKFSVLGNWQRDYSMEYILTHLKKEMTSPQNRKLVQPPEGTFF

SEQ ID NO: 188667 - protein, 478 aa, Zea Mays
MLSSYKNQGGFDLLGRTVDQIRTTEQVDAAKSACCDLNLDGLIIIGGVTSNSDAAQLAEFFAEHDCKTKVIGVPVTLSGDLRNQFVEATVGFDTVCKVNSQLISNVCLDAISAGKYYYFVRLMGGKASHVALECALQSHPNMVILGEEVAFSKLTLKEITNKICDGVEARADQGKYHGVLVIPEGLIESIPEMYALIQEINNLHSSNVTEADIPSQLSPWAAALFKFLPSFIRRELILHQESDNSAQLSQIDTEQLLAHLVEAEMNKRTKEGKCKGRKFSSVCHFFGSQARGSLPSNFDCNYAYVLGHICVQIMAAGLNGYMATVTNLKDSTNKWRCAAVPLTAMMSVRRHLRGPGAVPIGRPVIHPSPIDLKAESYAVLREKASSFLLDDFYRTPGGIQFEGPGAGTKPITVTIEEQDYLGDIEILQDYLDKVRTILKPGCSREILKASISSIASVNDVLKFMSAPLNTELPLYHFS

SEQ ID NO: 188668 - protein, 121 aa, Zea Mays
MTVTNCSNARYFAVGSADSLVSLWNVKELLCIRTFTKLEWPVRTVSFSHTGEFIAYASEDPFIDIANVETGRSIHQIPCKAAMNSVEWNPKYNLLAYAGDDKNKYMTDEGVFRVFGFETHN

SEQ ID NO: 188669 - protein, 203 aa, Zea Mays
MYSPKPESSFGPNPNSGTHQQQMELTGANMGPGNGANNNTNMAGRQRLRWTNELHERFVEAVTQLGGPDRATPKGVLRIMGVQGLTIYHVKSHLQKYRLAKYIPDASTDGNKTDNKDPGDLLAGLEGSSGLQISEALKLQMEVQKRLHEQLEVQRQLQLRIEAQGKYLQKIIEEQQRLTGTLETELKQPRAPVMVILFPATSH

SEQ ID NO: 188670 - protein, 158 aa, Zea Mays
MYSPKPESSFGPNPNSGTHQQQMELTGANMGPGNGANNNTNMAGRQRLRWTNELHERFVEAVTQLGGPDRATPKGVLRIMGVQGLTIYHVKSHLQKYRLAKYIPDASTDGNKTDNKDPGDLLAGLEGSSGLQISEALKLQMEVQKRLHEQLEAAAVTN

SEQ ID NO: 188671 - protein, 50 aa, Zea Mays
MWFWVLRYTLFMIMLLLPMCKIIMLIGTWSDHPGKQCYHKGGMGHPWLTN

SEQ ID NO: 188672 - protein, 316 aa, Zea Mays
MPGLPLPQSLNQNIGCEYAYPGSTGQAFRQQLRTALSPDEKLTAEKDLALYCKPVELYNIIQRRAMKNPLFIQRCLLYNIHARRKKRIQITISLSGSTNTELQTHYVFPLYVLLARPTSNLSLEGHSPIYRFSRVCLLTSFSEHGNKDNSEATFIIPDVKSLSTSRACNHDIIFISCGQVGQSNGEDNCSGNHVEDSSLQMLEGKCSWGKIPTNLLASSLESCVNLSLGHIVELASKVTMRPSFLEPKFLEQDSCLTFCSHKVDAVGSYKLQLCMSAQEAGARDMSLSPYSSYSYNDVPPSSLSDIIRLVPSKFKR

SEQ ID NO: 188673 - protein, 469 aa, Zea Mays
MPGLPLPQSLNQNIGCEYAYPGSTGQAFRQQLRTALSPDEKLTAEKDLALYCKPVELYNIIQRRAMKNPLFIQRCLLYNIHARRKKRIQITISLSGSTNTELQTHYVFPLYVLLARPTSNLSLEGHSPIYRFSRVCLLTSFSEHGNKDNSEATFIIPDVKSLSTSRACNHDIIFISCGQVGQSNGEDNCSGNHVEDSSLQMLEGKCSWGKIPTNLLASSLESCVNLSLGHIVELASKVTMRPSFLEPKFLEQDSCLTFCSHKVDAVGSYKLQLCMSAQEAGARDMSLSPYSSYSYNDVPPSSLSDIIRLRSGNVLFNYKYYNNTMQETEVTEDFSCPFCYVRCGSFKGLGCHLNSSHDLFHYEFWISEEYQVVNVSLKADAWRTECSSKGSFKWRLHLVGQTEGIACSLVQDDSLLCDFLPFLSAEAKDERALAILYLQSNSLHSVLCTSMIFWWIMFYMLNNAWLLFL

SEQ ID NO: 188674 - protein, 631 aa, Zea Mays
MPGLPLPQSLNQNIGCEYAYPGSTGQAFRQQLRTALSPDEKLTAEKDLALYCKPVELYNIIQRRAMKNPLFIQRCLLYNIHARRKKRIQITISLSGSTNTELQTHYVFPLYVLLARPTSNLSLEGHSPIYRFSRVCLLTSFSEHGNKDNSEATFIIPDVKSLSTSRACNHDIIFISCGQVGQSNGEDNCSGNHVEDSSLQMLEGKCSWGKIPTNLLASSLESCVNLSLGHIVELASKVTMRPSFLEPKFLEQDSCLTFCSHKVDAVGSYKLQLCMSAQEAGARDMSLSPYSSYSYNDVPPSSLSDIIRLRSGNVLFNYKYYNNTMQETEVTEDFSCPFCYVRCGSFKGLGCHLNSSHDLFHYEFWISEEYQVVNVSLKADAWRTECSSKGSFKWRLHLVGQTEGIACSLVQDDSLLCDFLPFLSAEAKDERALAILYLQSNSLHSLFAEGVDPRHQTFSYRSRFKKRRRSKNTMEKIRHVHSHIMESGSPEDEAGSEDNFVQGENGTSVANASIDPAQSLHGSNLSPPTVLQFGKTRKLSERSDPRNRQLLQKRQFFHSHRAQPMQLEQVFSDRDSEDEVDDDIADFEDRRMLDDFVDVTKDEKLIMHMWNSFVRKQRWCYVTIHKGGMTR

SEQ ID NO: 188675 - protein, 558 aa, Zea Mays
MPGLPLPQSLNQNIGCEYAYPGSTGQAFRQQLRTALSPDEKLTAEKDLALYCKPVELYNIIQRRAMKNPLFIQRCLLYNIHARRKKRIQITISLSGSTNTELQTHYVFPLYVLLARPTSNLSLEGHSPIYRFSRVCLLTSFSEHGNKDNSEATFIIPDVKSLSTSRACNHDIIFISCGQVGQSNGEDNCSGNHVEDSSLQMLEGKCSWGKIPTNLLASSLESCVNLSLGHIVELASKVTMRPSFLEPKFLEQDSCLTFCSHKVDAVGSYKLQLCMSAQEAGARDMSLSPYSSYSYNDVPPSSLSDIIRLRSGNVLFNYKYYNNTMQETEVTEDFSCPFCYVRCGSFKGLGCHLNSSHDLFHYEFWISEEYQVVNVSLKADAWRTELFAEGVDPRHQTFSYRSRFKKRRRSKNTMEKIRHVHSHIMESGSPEDEAGSEDNFVQGENGTSVANASIDPAQSLHGSNLSPPTVLQFGKTRKLSERSDPRNRQLLQKRQFFHSHRAQPMQLEQVFSDRDSEDEVDDDIADFEDRRMKNLLCICGIHLFENKDGAMSQYTRVA

SEQ ID NO: 188676 - protein, 368 aa, Zea Mays
MPGLPLPQSLNQNIGCEYAYPGSTGQAFRQQLRTALSPDEKLTAEKDLALYCKPVELYNIIQRRAMKNPLFIQRCLLYNIHARRKKRIQITISLSGSTNTELQTHYVFPLYVLLARPTSNLSLEGHSPIYRFSRVCLLTSFSEHGNKDNSEATFIIPDVKSLSTSRACNHDIIFISCGQVGQSNGEDNCSGNHVEDSSLQMLEGKCSWGKIPTNLLASSLESCVNLSLGHIVELASKVTMRPSFLEPKFLEQDSCLTFCSHKVDAVGSYKLQLCMSAQEAGARDMSLSPYSSYSYNDVPPSSLSDIIRLRSGNVLFNYKYYNNTMQETEVTEDFSCPFCYVRCGSFKGLGCHLNSSHDLFHYEFWVDI

SEQ ID NO: 188677 - protein, 269 aa, Zea Mays
MLEGKCSWGKIPTNLLASSLESCVNLSLGHIVELASKVTMRPSFLEPKFLEQDSCLTFCSHKVDAVGSYKLQLCMSAQEAGARDMSLSPYSSYSYNDVPPSSLSDIIRLRSGNVLFNYKYYNNTMQETEVTEDFSCPFCYVRCGSFKGLGCHLNSSHDLFHYEFWISEEYQVVNVSLKADAWRTECSSKGSFKWRLHLVGQTEGIACSLVQDDSLLCDFLPFLSAEAKDERALAILYLQSNSLHSVLCTSMIFWWIMFYMLNNAWLLFL

SEQ ID NO: 188678 - protein, 309 aa, Zea Mays
MPGLPLPQSLNQNIGCEYAYPGSTGQAFRQQLRTALSPDEKLTAEKDLALYCKPVELYNIIQRRAMKNPLFIQRCLLYNIHARRKKRIQITISLSGSTNTELQTHYVFPLYVLLARPTSNLSLEGHSPIYRFSRVCLLTSFSEHGNKDNSEATFIIPDVKSLSTSRACNHDIIFISCGQVGQSNGEDNCSGNHVEDSSLQMLEGKCSWGKIPTNLLASSLESCVNLSLGHIVELASKVTMRPSFLEPKFLEQDSCLTFCSHKVDAVGSYKLQLCMSAQEAGARDMSLSPYSSYSYNDVPPSSLSDIISH

SEQ ID NO: 188679 - protein, 571 aa, Zea Mays
MPGLPLPQSLNQNIGCEYAYPGSTGQAFRQQLRTALSPDEKLTAEKDLALYCKPVELYNIIQRRAMKNPLFIQRCLLYNIHARRKKRIQITISLSGSTNTELQTHYVFPLYVLLARPTSNLSLEGHSPIYRFSRVCLLTSFSEHGNKDNSEATFIIPDVKSLSTSRACNHDIIFISCGQVGQSNGEDNCSGNHVEDSSLQMLEGKCSWGKIPTNLLASSLESCVNLSLGHIVELASKVTMRPSFLEPKFLEQDSCLTFCSHKVDAVGSYKLQLCMSAQEAGARDMSLSPYSSYSYNDVPPSSLSDIIRLRSGNVLFNYKYYNNTMQETEVTEDFSCPFCYVRCGSFKGLGCHLNSSHDLFHYEFWISEEYQVVNVSLKADAWRTELFAEGVDPRHQTFSYRSRFKKRRRSKNTMEKIRHVHSHIMESGSPEDEAGSEDNFVQGENGTSVANASIDPAQSLHGSNLSPPTVLQFGKTRKLSERSDPRNRQLLQKRQFFHSHRAQPMQLEQVFSDRDSEDEVDDDIADFEDRRMLDDFVDVTKDEKLIMHMWNSFVRKQRWCYVTIHKGGMTR

SEQ ID NO: 188680 - protein, 487 aa, Zea Mays
MPGLPLPQSLNQNIGCEYAYPGSTGQAFRQQLRTALSPDEKLTAEKDLALYCKPVELYNIIQRRAMKNPLFIQRCLLYNIHARRKKRIQITISLSGSTNTELQTHYVFPLYVLLARPTSNLSLEGHSPIYRFSRVCLLTSFSEHGNKDNSEATFIIPDVKSLSTSRACNHDIIFISCGQVGQSNGEDNCSGNHVEDSSLQMLEGKCSWGKIPTNLLASSLESCVNLSLGHIVELASKVTMRPSFLEPKFLEQDSCLTFCSHKVDAVGSYKLQLCMSAQEAGARDMSLSPYSSYSYNDVPPSSLSDIIRLRSGNVLFNYKYYNNTMQETEVTEDFSCPFCYVRCGSFKGLGCHLNSSHDLFHYEFWISEEYQVVNVSLKADAWRTELFAEGVDPRHQTFSYRSRFKKRRRSKNTMEKIRHVHSHIMESGSPEDEAGSEDNFVQGENGTSVANASIDPAQSLHGSNLSPPTVLQFGKTRKLSERSDPRK

SEQ ID NO: 188681 - protein, 325 aa, Zea Mays
MILSLLAVVTAHIPYEFFFLPISVPSLNYFNPKGQVGQSNGEDNCSGNHVEDSSLQMLEGKCSWGKIPTNLLASSLESCVNLSLGHIVELASKVTMRPSFLEPKFLEQDSCLTFCSHKVDAVGSYKLQLCMSAQEAGARDMSLSPYSSYSYNDVPPSSLSDIIRLRSGNVLFNYKYYNNTMQETEVTEDFSCPFCYVRCGSFKGLGCHLNSSHDLFHYEFWISEEYQVVNVSLKADAWRTECSSKGSFKWRLHLVGQTEGIACSLVQDDSLLCDFLPFLSAEAKDERALAILYLQSNSLHSVLCTSMIFWWIMFYMLNNAWLLFL

SEQ ID NO: 188682 - protein, 608 aa, Zea Mays
MPGLPLPQSLNQNIGCEYAYPGSTGQAFRQQLRTALSPDEKLTAEKDLALYCKPVELYNIIQRRAMKNPLFIQRCLLYNIHARRKKRIQITISLSGSTNTELQTHYVFPLYVLLARPTSNLSLEGHSPIYRFSRVCLLTSFSEHGNKDNSEATFIIPDVKSLSTSRACNHDIIFISCGQVGQSNGEDNCSGNHVEDSSLQMLEGKCSWGKIPTNLLASSLESCVNLSLGHIVELASKVTMRPSFLEPKFLEQDSCLTFCSHKVDAVGSYKLQLCMSAQEAGARDMSLSPYSSYSYNDVPPSSLSDIIRLRSGNVLFNYKYYNNTMQETEVTEDFSCPFCYVRCGSFKISEEYQVVNVSLKADAWRTELFAEGVDPRHQTFSYRSRFKKRRRSKNTMEKIRHVHSHIMESGSPEDEAGSEDNFVQGENGTSVANASIDPAQSLHGSNLSPPTVLQFGKTRKLSERSDPRNRQLLQKRQFFHSHRAQPMQLEQVFSDRDSEDEVDDDIADFEDRRMLDDFVDVTKDEKLIMHMWNSFVRKQRVLADGHIPWACEAFSQLHGRQLIQNPALLWGWRFFMIKLWNHNILDARTMNTCNTVLQILQEESTGLK

SEQ ID NO: 188683 - protein, 335 aa, Zea Mays
MPGLPLPQSLNQNIGCEYAYPGSTGQAFRQQLRTALSPDEKLTAEKDLALYCKPVELYNIIQRRAMKNPLFIQRCLLYNIHARRKKRIQITISLSGSTNTELQTHYVFPLYVLLARPTSNLSLEGHSPIYRFSRVCLLTSFSEHGNKDNSEATFIIPDVKSLSTSRACNHDIIFISCGQVGQSNGEDNCSGNHVEDSSLQMLEGKCSWGKIPTNLLASSLESCVNLSLGHIVELASKVTMRPSFLEPKFLEQDSCLTFCSHKVDAVGSYKLQLCMSAQEAGARDMSLSPYSSYSYNDVPPSSLSDIIRLRSGNVLFNYKYYNNTMQETEGCLSCF

SEQ ID NO: 188684 - protein, 244 aa, Zea Mays
MKNPLFIQRCLLYNIHARRKKRIQITISLSGSTNTELQTHYVFPLYVLLARPTSNLSLEGHSPIYRFSRVCLLTSFSEHGNKDNSEATFIIPDVKSLSTSRACNHDIIFISCGQVGQSNGEDNCSGNHVEDSSLQMLEGKCSWGKIPTNLLASSLESCVNLSLGHIVELASKVTMRPSFLEPKFLEQDSCLTFCSHKVDAVGSYKLQLCMSAQEAGARDMSLSPYSSYSYNDVPPSSLSDIISH

SEQ ID NO: 188685 - protein, 64 aa, Zea Mays
MAIPPKIISTRSEVRVSHTILAVNLRSIEYVLGLGPSKSLTRALIGDVNLQWLWPPPVHMRYIN

SEQ ID NO: 188686 - protein, 134 aa, Zea Mays
MGLAHLLSLLILLPTLFRVMGSHSDNNCIYTKFKNKMYIFLVMYVDDILLSNCDKKLLLETKRFLSLKFDKKDMGEASYVLRMAIHRDKQRYIKTSTENIHKKYILKRYHMHKWYHILQLSETLFMLKFVLALT

SEQ ID NO: 188687 - protein, 83 aa, Zea Mays
MGAITFEPWKRLWKSWTPPKCKFFLWLAIRNKCWTSDRLEKRGLDHPLSCLLCDQEQETIQHILCTCVFAGQFWHSILFGLDV

SEQ ID NO: 188688 - protein, 59 aa, Zea Mays
MTDVGQLIGLQSVGYHIRNAARCVIRNLKILIIYWLLVFSPSNSGLSFSKMVVCRSSVR

SEQ ID NO: 188689 - protein, 141 aa, Zea Mays
MEVDVHSVAPRTASASRNLISVDRADEASSREYAPQKHDRPHTCASVALWMVISEACSPILFVLVEGGTRMAVCNASETVRTCYNQKQPTLLHIFTCAEGGEWTITVVIRATITNVTPLVLLSLKLEHNIMSISISCVCHT

SEQ ID NO: 188690 - protein, 101 aa, Zea Mays
MSNLMEWSVPIGEFLERIHLLVRSEAAAGHAIRVDGTCLVLAGVYLTRFIGSHAARVAGIVVEPSTAHRLVAVALFLGGHSPKNWAAAFEAVSDRAIRTGP

SEQ ID NO: 188691 - protein, 305 aa, Zea Mays
MAQVSVVTAARRELAGALNPDAREFLPWWRLGGSRKQLSADAPEFTRSSLGRAVAAAAANGAVIAAPNNAGVGKAATQPVPNYVLYRRSASNNGQHAESTMPTFFKSHRSQWDETVKRTIFVKYIDHNVTEDILACLFQLFGTVVDCRICGDPTSDDGLRFGFVELQHEDEAIASLDLDGYIISVSPLSVSRSRTAICPINPKFLPQSEAEWETCLRTIYCTNISKNVTSSNLRSFCEAYFGKVCRVRLLDNKERSTNIAFIEFVEVYGAIAALGSGGIYVDGVPIRMCPSKSPIRTHCFGKLSS

SEQ ID NO: 188692 - protein, 280 aa, Zea Mays
MAQVSVVTAARRELAGALNPDAREFLPWWRLGGSRKQLSADAPEFTRSSLGRAVAAAAANGAVIAAPNNAGVGKAARRSASNNGQHAESTMPTFFKSHRSQWDETVKRTIFVKYIDHNVVDCRICGDPTSDDGLRFGFVELQHEDEAIASLDLDGYIISVSPLSVSRSRTAICPINPKFLPQSEAEWETCLRTIYCTNISKNVTSSNLRSFCEAYFGKVCRVRLLDNKERSTNIAFIEFVEVYGAIAALGSGGIYVDGVPIRMCPSKSPIRTHCFGKLSS

SEQ ID NO: 188693 - protein, 235 aa, Zea Mays
MAQVSVVTAARRELAGALNPDAREFLPWWRLGGSRKQLSADAPEFTRSSLGRAVAAAAANGAVIAAPNNAGVGKAARRSASNNGQHAESTMPTFFKSHRSQWDETVKRTIFVKYIDHNVTEDILACLFQLFGTVVDCRICGDPTSDDGLRFGFVELQHEDEAIASLDLDGYIISVSPLSVSRSRTAICPINPKFLPQSEAEWETCLRTIYCTNISKNVTSSNLRSFCEAYFGVSR

SEQ ID NO: 188694 - protein, 255 aa, Zea Mays
MAQVSVVTAARRELAGALNPDAREFLPWWRLGGSRKQLSADAPEFTRSSLGRAVAAAAANGAVIAAPNNAGVGKAARRSASNNGQHAESTMPTFFKSHRSQWDETVKRTIFVKYIDHNVTEDILACLFQLFGTVVDCRICGDPTSDDGLRFGFVELQHEDEAIASLDLDGYIISVSPLSVSRSRTAICPINPKFLPQSEAEWETCLRTIYCTNISKNVTSSNLRSFCEAYFGKAQQSSKLSLLHLLILQMPCVSR

SEQ ID NO: 188695 - protein, 242 aa, Zea Mays
MDDNGSNTVEHVSLQSSLRTPEDRTHAIGSVIKSLGELIPGIRNELYPVTSSYGMPVYFSLERAAAPYFGIKAYGVHMNGYVEKDGQKFLWIGKRSDVKQTYPGMLDHLVAGGLPYGMSCKENIIKECEEEAGITRSISTNATSVGAVSYMDIEGFRYKRDVLFCYDLQLPADFVPNNEDGEVDSFRLVPVIHAANIIRRTDFFKPNCNLVIIDFLFRHGYINPDSRCYLDLLQSLRSGDCS

SEQ ID NO: 188696 - protein, 190 aa, Zea Mays
MATTTAAARWSFPARLQLLTSRRFCFPASSAAPPSSVAGFSWADALRVAGDGGRGDESDLSGYFRKVKSCNRGMDKKGQFVKFSVEDQVVGYIHKGFIEHIRDFHDVFTIVMDDNGSNTVEHVSLQSSLRTPEDRTHAIGSVIKSLGELIPGIRNELYPVTSSYGMPVYFSLERAAAPYFGLWSSYEWVC

SEQ ID NO: 188697 - protein, 196 aa, Zea Mays
MPVYFSLERAAAPYFGIKAYGVHMNGYVEKDGQKFLWIGKRSDVKQTYPGMLDHLVAGGLPYGMSCKENIIKECEEEAGITRSISTNATSVGAVSYMDIEGFRYKRDVLFCYDLQLPADFVPNNEDGEVDSFRLVPVIHAANIIRRTDFFKPNCNLVIIDFLFRHGYINPDSRCYLDLLQSLRSGTFRLGTKLFTI

SEQ ID NO: 188698 - protein, 361 aa, Zea Mays
MATTTAAARWSFPARLQLLTSRRFCFPASSAAPPSSVAGFSWADALRVAGDGGRGDESDLSGYFRKVKSCNRGMDKKGQFVKFSVEDQVVGYIHKGFIEHIRDFHDVFTIVMDDNGSNTVEHVSLQSSLRTPEDRTHAIGSVIKSLGELIPGIRNELYPVTSSYGMPVYFSLERAAAPYFGIKAYGVHMNGYVEKDGQKFLWIGKRSDVKQTYPGMLDHLVAGGLPYGMSCKENIIKECEEEAGITRSISTNATSVGAVSYMDIEGFRYKRDVLFCYDLQLPADFVPNNEDGEVDSFRLVPVIHAANIIRRTDFFKPNCNLVIIDFLFRHGYINPDSRCYLDLLQSLRSGTFRLGTKLFTI

SEQ ID NO: 188699 - protein, 350 aa, Zea Mays
MATTTAAARWSFPARLQLLTSRRFCFPASSAAPPSSVAGFSWADALRVAGDGGRGDESDLSGYFRKVKSCNRGMDKKGQFVKFSVEDQVVGYIHKGFIEHIRDFHDVFTIVMDDNGSNTVEHVSLQSSLRTPEDRTHAIGSVIKSLGELIPGIRNELYPVTSSYGMPVYFSLERAAAPYFGIKAYGVHMNGYVEKDGQKFLWIGKRSDVKQTYPGMLDHLVAGGLPYGMSCKENIIKECEEEAGITRSISTNATSVGAVSYMDIEGFRYKRDVLFCYDLQLPADFVPNNEDGEVDSFRLVPVIHAANIIRRTDFFKPNCNLVIIDFLFRHGYINPDSRCYLDLLQSLRSV

SEQ ID NO: 188700 - protein, 945 aa, Zea Mays
MLIFAGRHSPVSELLPLANHFTCCGSRPSIEIAMPHGHAAAVVDRLLRRLGSAACRLEVPPNIDGDLAHVWTTLARLQDMLVSLEIRPELQEWMGDIKQVAYDVEDLVDELEDHNSMESQMSGCVAVGEETRWCCSCSFLMHSTRADRMKTIKRRLDFLVKDSVIFSLMQYPFPDVERFDNEAFDRAAVVGRDNDKAKIKDMILQSNAQKFSIIPILGLVGLGKTTLARLIFLDQGEGWDFDLRIWISLNRKLNIKMIASDIISQCNHREEKLLDVRTDMEIQENFQLLKRCLQEALHEKHCLIVLDDLSSTDKNQLDELKEMLKGTNESIKVLVTTSSEITAELLHTIPPYKLCPLSEDDSWKIFSQKAFGNCDGDNTDLKKIGKEIVKRCEGIPLLTHSLGLVVQNEVTNVWLAARDEEIWKLERRVATKIELFSPLYQIYNDFSSTIKLCFLYLSIFPKGSTIDKEKLIQQWIALEIIGSKHDSLPPYVNGEMCIQDFLSIYFLQVRDTHSDGALKAIGIDNSTIKHIPRFNTTSELSVDTISSSKVSTPSKEIPSTLRRPDKSKMPALIPGDGSLNLSLKQVQKVTHNFSPLFELGEGGTWAVYRAVLSDNQVVIIRRAKKGHVQEAKHLMEVKLLTKINHWSLVRFLGFIDEKDECIRITEYVPNGTLREHLHDQRKRILNFNQRIVIALDVAIALTYLHLCSGDALICYNLRTSNILLTESYRAKVCCSELSKSGNIVLLKGTGGYIDPEYLETSELTAKSDVYSFGIILLEIISSHGPQDWDVLMNHRQSSVVQWALEKFYDDLMNEILDYRMEDRVDGDVVRDLLSLALSCVVSRGADRPSIVVVGERLWKIWQDHRRNVGEQHEYQGSWAEFIEQEGILRHHKCVLKRSWEPSTTQQDWSVYVRQIELVQEAYDTPWGEEIFSGSVSLDDITVYSR

SEQ ID NO: 188701 - protein, 959 aa, Zea Mays
MHCYATRLFVQPYQSSNFGFIKMHYAATLTCFIWFLNLSSCYELQQFPESVTNLEKLEVLILRRCCRLRILPPSFAMIKYLRILDLAGCEALHVSTEMLTTNLEYLNLQRCLNLQTQPYYFENFNKLKFLNLSHCLPTVDCLESISYLFNLEYLDLSETSLDIPMSFARLQKLHTLNLTGCAPMHPSSNVHQTWPGILAKITSLKSVLTMDPVLAASLQGHTECSADYDYHSLTTTDELVIKEITGGSRGLRIAEQLNLQNRLEVCFLKLEWVPRSQSAQDQLLEYTDEEVLEKFQPNETLEHFMLVKYTGNVFPTWMMNKLTSLPYLVNLCLFHLHNCSALPPIGHLQNLRYLHIKDMPNLTNLEMGLSGGPVSLGKLTHLKLEALNLEELSILLSANNESPCFMFPNLEELSVLSCSKLVFKPSVPKCAKYVIKESNMVLSCWQPLGPFSSPPIEKVEISGCVMPSGWLQWLRSIQTLEKVVIDGEALSSFELQKIYAFQEASGSKISKETVSSSRTNMSRELTTEDGALKAIGIDNSTIKHIPRFNTTSELSVDTISSSKVSTPSKEIPSTLRRPDKSKMPALIPGDGSLNLSLKQVQKVTHNFSPLFELGEGGTWAVYRAVLSDNQVVIIRRAKKGHVQEAKHLMEVKLLTKINHWSLVRFLGFIDEKDECIRITEYVPNGTLREHLHDQRKRILNFNQRIVIALDVAIALTYLHLCSGDALICYNLRTSNILLTESYRAKVCCSELSKSGNIVLLKGTGGYIDPEYLETSELTAKSDVYSFGIILLEIISSHGPQDWDVLMNHRQSSVVQWALEKFYDDLMNEILDYRMEDRVDGDVVRDLLSLALSCVVSRGADRPSIVVVGERLWKIWQDHRRNVGEQHEYQGSWAEFIEQEGILRHHKCVLKRSWEPSTTQQDWSVYVRQIELVQEAYDTPWGEEIFSGSVSLDDITVYSR

SEQ ID NO: 188702 - protein, 1615 aa, Zea Mays
MLIFAGRHSPVSELLPLANHFTCCGSRPSIEIAMPHGHAAAVVDRLLRRLGSAACRLEVPPNIDGDLAHVWTTLARLQDMLVSLEIRPELQEWMGDIKQVAYDVEDLVDELEDHNSMESQMSGCVAVGEETRWCCSCSFLMHSTRADRMKTIKRRLDFLVKDSVIFSLMQYPFPDVERFDNEAFDRAAVVGRDNDKAKIKDMILQSNAQKFSIIPILGLVGLGKTTLARLIFLDQGEGWDFDLRIWISLNRKLNIKMIASDIISQCNHREEKLLDVRTDMEIQENFQLLKRCLQEALHEKHCLIVLDDLSSTDKNQLDELKEMLKGTNESIKVLVTTSSEITAELLHTIPPYKLCPLSEDDSWKIFSQKAFGNCDGDNTDLKKIGKEIVKRCEGIPLLTHSLGLVVQNEVTNVWLAARDEEIWKLERRVATKIELFSPLYQIYNDFSSTIKLCFLYLSIFPKGSTIDKEKLIQQWIALEIIGSKHDSLPPYVNGEMCIQDFLSIYFLQVRDTHSVYGMDNRVVPTTFYIHNFVHEFARHVACDDIIIFDGTKMQKGCAKRQTFQYALLTCYRVQSTFSHSTLTRTRALHIMNSEAITFPREAFELLKHLRVLNLSGCCIEELPASIGCLKRLKYLDVSGVQIQTLPFPVSRLTNLEMHCYATRLFVQPYQSSNFGFIKMHYAATLTCFIWFLNLSSCYELQQFPESVTNLEKLEVLILRRCCRLRILPPSFAMIKYLRILDLAGCEALHVSTEMLTTNLEYLNLQRCLNLQTQPYYFENFNKLKFLNLSHCLPTVDCLESISYLFNLEYLDLSETSLDIPMSFARLQKLHTLNLTGCAPMHPSSNVHQTWPGILAKITSLKSVLTMDPVLAASLQGHTECSADYDYHSLTTTDELVIKEITGGSRGLRIAEQLNLQNRLEVCFLKLEWVPRSQSAQDQLLEYTDEEVLEKFQPNETLEHFMLVKYTGNVFPTWMMNKLTSLPYLVNLCLFHLHNCSALPPIGHLQNLRYLHIKDMPNLTNLEMGLSGGPVSLGKLTHLKLEALNLEELSILLSANNESPCFMFPNLEELSVLSCSKLVFKPSVPKCAKYVIKESNMVLSCWQPLGPFSSPPIEKVEISGCVMPSGWLQWLRSIQTLEKVVIDGEALSSFELQKIYAFQEASGSKISKETVSSSRTNMSRELTTEDGALKAIGIDNSTIKHIPRFNTTSELSVDTISSSKVSTPSKEIPSTLRRPDKSKMPALIPGDGSLNLSLKQVQKVTHNFSPLFELGEGGTWAVYRAVLSDNQVVIIRRAKKGHVQEAKHLMEVKLLTKINHWSLVRFLGFIDEKDECIRITEYVPNGTLREHLHDQRKRILNFNQRIVIALDVAIALTYLHLCSGDALICYNLRTSNILLTESYRAKVCCSELSKSGNIVLLKGTGGYIDPEYLETSELTAKSDVYSFGIILLEIISSHGPQDWDVLMNHRQSSVVQWALEKFYDDLMNEILDYRMEDRVDGDVVRDLLSLALSCVVSRGADRPSIVVVGERLWKIWQDHRRNVGEQHEYQGSWAEFIEQEGILRHHKCVLKRSWEPSTTQQDWSVYVRQIELVQEAYDTPWGEEIFSGSVSLDDITVYSR

SEQ ID NO: 188703 - protein, 962 aa, Zea Mays
MLQMHCYATRLFVQPYQSSNFGFIKMHYAATLTCFIWFLNLSSCYELQQFPESVTNLEKLEVLILRRCCRLRILPPSFAMIKYLRILDLAGCEALHVSTEMLTTNLEYLNLQRCLNLQTQPYYFENFNKLKFLNLSHCLPTVDCLESISYLFNLEYLDLSETSLDIPMSFARLQKLHTLNLTGCAPMHPSSNVHQTWPGILAKITSLKSVLTMDPVLAASLQGHTECSADYDYHSLTTTDELVIKEITGGSRGLRIAEQLNLQNRLEVCFLKLEWVPRSQSAQDQLLEYTDEEVLEKFQPNETLEHFMLVKYTGNVFPTWMMNKLTSLPYLVNLCLFHLHNCSALPPIGHLQNLRYLHIKDMPNLTNLEMGLSGGPVSLGKLTHLKLEALNLEELSILLSANNESPCFMFPNLEELSVLSCSKLVFKPSVPKCAKYVIKESNMVLSCWQPLGPFSSPPIEKVEISGCVMPSGWLQWLRSIQTLEKVVIDGEALSSFELQKIYAFQEASGSKISKETVSSSRTNMSRELTTEDGALKAIGIDNSTIKHIPRFNTTSELSVDTISSSKVSTPSKEIPSTLRRPDKSKMPALIPGDGSLNLSLKQVQKVTHNFSPLFELGEGGTWAVYRAVLSDNQVVIIRRAKKGHVQEAKHLMEVKLLTKINHWSLVRFLGFIDEKDECIRITEYVPNGTLREHLHDQRKRILNFNQRIVIALDVAIALTYLHLCSGDALICYNLRTSNILLTESYRAKVCCSELSKSGNIVLLKGTGGYIDPEYLETSELTAKSDVYSFGIILLEIISSHGPQDWDVLMNHRQSSVVQWALEKFYDDLMNEILDYRMEDRVDGDVVRDLLSLALSCVVSRGADRPSIVVVGERLWKIWQDHRRNVGEQHEYQGSWAEFIEQEGILRHHKCVLKRSWEPSTTQQDWSVYVRQIELVQEAYDTPWGEEIFSGSVSLDDITVYSR

SEQ ID NO: 188704 - protein, 1607 aa, Zea Mays
MLIFAGRHSPVSELLPLANHFTCCGSRPSIEIAMPHGHAAAVVDRLLRRLGSAACRLEVPPNIDGDLAHVWTTLARLQDMLVSLEIRPELQEWMGDIKQVAYDVEDLVDELEDHNSMESQMSGCVAVGEETRWCCSCSFLMHSTRADRMKTIKRRLDFLVKDSVIFSLMQYPFPDVERFDNEAFDRAAVVGRDNDKAKIKDMILQSNAQKFSIIPILGLVGLGKTTLARLIFLDQGEGWDFDLRIWISLNRKLNIKMIASDIISQCNHREEKLLDVRTDMEIQENFQLLKRCLQEALHEKHCLIVLDDLSSTDKNQLDELKEMLKGTNESIKVLVTTSSEITAELLHTIPPYKLCPLSEDDSWKIFSQKAFGNCDGDNTDLKKIGKEIVKRCEGIPLLTHSLGLVVQNEVTNVWLAARDEEIWKLERRVATKIELFSPLYQIYNDFSSTIKLCFLYLSIFPKGSTIDKEKLIQQWIALEIIGSKHDSLPPYVNGEMCIQDFLSIYFLQVRDTHSVYGMDNRVVPTTFYIHNFVHEFARHVACDDIIIFDGTKMQKGCAKRQTFQYALLTCYRVQSTFSHSTLTRTRALHIMNSEAITFPREAFELLKHLRVLNLSGCCIEELPASIGCLKRLKYLDVSGVQIQTLPFPMHCYATRLFVQPYQSSNFGFIKMHYAATLTCFIWFLNLSSCYELQQFPESVTNLEKLEVLILRRCCRLRILPPSFAMIKYLRILDLAGCEALHVSTEMLTTNLEYLNLQRCLNLQTQPYYFENFNKLKFLNLSHCLPTVDCLESISYLFNLEYLDLSETSLDIPMSFARLQKLHTLNLTGCAPMHPSSNVHQTWPGILAKITSLKSVLTMDPVLAASLQGHTECSADYDYHSLTTTDELVIKEITGGSRGLRIAEQLNLQNRLEVCFLKLEWVPRSQSAQDQLLEYTDEEVLEKFQPNETLEHFMLVKYTGNVFPTWMMNKLTSLPYLVNLCLFHLHNCSALPPIGHLQNLRYLHIKDMPNLTNLEMGLSGGPVSLGKLTHLKLEALNLEELSILLSANNESPCFMFPNLEELSVLSCSKLVFKPSVPKCAKYVIKESNMVLSCWQPLGPFSSPPIEKVEISGCVMPSGWLQWLRSIQTLEKVVIDGEALSSFELQKIYAFQEASGSKISKETVSSSRTNMSRELTTEDGALKAIGIDNSTIKHIPRFNTTSELSVDTISSSKVSTPSKEIPSTLRRPDKSKMPALIPGDGSLNLSLKQVQKVTHNFSPLFELGEGGTWAVYRAVLSDNQVVIIRRAKKGHVQEAKHLMEVKLLTKINHWSLVRFLGFIDEKDECIRITEYVPNGTLREHLHDQRKRILNFNQRIVIALDVAIALTYLHLCSGDALICYNLRTSNILLTESYRAKVCCSELSKSGNIVLLKGTGGYIDPEYLETSELTAKSDVYSFGIILLEIISSHGPQDWDVLMNHRQSSVVQWALEKFYDDLMNEILDYRMEDRVDGDVVRDLLSLALSCVVSRGADRPSIVVVGERLWKIWQDHRRNVGEQHEYQGSWAEFIEQEGILRHHKCVLKRSWEPSTTQQDWSVYVRQIELVQEAYDTPWGEEIFSGSVSLDDITVYSR

SEQ ID NO: 188705 - protein, 1049 aa, Zea Mays
MLIFAGRHSPVSELLPLANHFTCCGSRPSIEIAMPHGHAAAVVDRLLRRLGSAACRLEVPPNIDGDLAHVWTTLARLQDMLVSLEIRPELQEWMGDIKQVAYDVEDLVDELEDHNSMESQMSGCVAVGEETRWCCSCSFLMHSTRADRMKTIKRRLDFLVKDSVIFSLMQYPFPDVERFDNEAFDRAAVVGRDNDKAKIKDMILQSNAQKFSIIPILGLVGLGKTTLARLIFLDQGEGWDFDLRIWISLNRKLNIKMIASDIISQCNHREEKLLDVRTDMEIQENFQLLKRCLQEALHEKHCLIVLDDLSSTDKNQLDELKEMLKGTNESIKVLVTTSSEITAELLHTIPPYKLCPLSEDDSWKIFSQKAFGNCDGDNTDLKKIGKEIVKRCEGIPLLTHSLGLVVQNEVTNVWLAARDEEIWKLERRVATKIELFSPLYQIYNDFSSTIKLCFLYLSIFPKGSTIDKEKLIQQWIALEIIGSKHDSLPPYVNGEMCIQDFLSIYFLQVRDTHSVYGMDNRVVPTTFYIHNFVHEFARHVACDDIIIFDGTKMQKGCAKRQTFQYALLTCYRVQSTFSHSTLTRTRALHIMNSEAITFPREAFELLKHLRVLNLSGCCIEELPASIGCLKRLKYLDVSGVQIQTLPFPDGALKAIGIDNSTIKHIPRFNTTSELSVDTISSSKVSTPSKEIPSTLRRPDKSKMPALIPGDGSLNLSLKQVQKVTHNFSPLFELGEGGTWAVYRAVLSDNQVVIIRRAKKGHVQEAKHLMEVKLLTKINHWSLVRFLGFIDEKDECIRITEYVPNGTLREHLHGDALICYNLRTSNILLTESYRAKVCCSELSKSGNIVLLKGTGGYIDPEYLETSELTAKSDVYSFGIILLEIISSHGPQDWDVLMNHRQSSVVQWALEKFYDDLMNEILDYRMEDRVDGDVVRDLLSLALSCVVSRGADRPSIVVVGERLWKIWQDHRRNVGEQHEYQGSWAEFIEQEGILRHHKCVLKRSWEPSTTQQDWSVYVRQIELVQEAYDTPWGEEIFSGSVSLDDITVYSR

SEQ ID NO: 188706 - protein, 764 aa, Zea Mays
MDNRVVPTTFYIHNFVHEFARHVACDDIIIFDGTKMQKGCAKRQTFQYALLTCYRVQSTFSHSTLTRTRALHIMNSEAITFPREAFELLKHLRVLNLSGCCIEELPASIGCLKRLKYLDVSGVQIQTLPFPVSRLTNLEVLDLSKTCMKELPSFIGNLQNLKYLNMQGCDKLQNLPLSLGHLQRLEQLRLSCCRCIAMLPDSLCNLINLRILDLSRCTMLRHLPALFGNLVNLEDLSLSSCFNLKQLPESFGNLYFLRFLNLSSCYELQQFPESVTNLEKLEVLILRRCCRLRILPPSFAMIKYLRILDLAGCEALHVSTEMLTTNLEYLNLQRCLNLQTQPYYFENFNKLKFLNLSHCLPTVDCLESISYLFNLEYLDLSETSLDIPMSFARLQKLHTLNLTGCAPMHPSSNVHQTWPGILAKITSLKSVLTMDPVLAASLQGHTECSADYDYHSLTTTDELVIKEITGGSRGLRIAEQLNLQNRLEVCFLKLEWVPRSQSAQDQLLEYTDEEVLEKFQPNETLEHFMLVKYTGNVFPTWMMNKLTSLPYLVNLCLFHLHNCSALPPIGHLQNLRYLHIKDMPNLTNLEMGLSGGPVSLGKLTHLKLEALNLEELSILLSANNESPCFMFPNLEELSVLSCSKLVFKPSVPKCAKYVIKESNMVLSCWQPLGPFSSPPIEKVEISGCVMPSGWLQWLRSIQTLEKVVIDGEALSSFELQKIYAFQEASGSKISKETVSSSRTNMSRELTTENVYMLLNIGWCP

SEQ ID NO: 188707 - protein, 635 aa, Zea Mays
MLIFAGRHSPVSELLPLANHFTCCGSRPSIEIAMPHGHAAAVVDRLLRRLGSAACRLEVPPNIDGDLAHVWTTLARLQDMLVSLEIRPELQEWMGDIKQVAYDVEDLVDELEDHNSMESQMSGCVAVGEETRWCCSCSFLMHSTRADRMKTIKRRLDFLVKDSVIFSLMQYPFPDVERFDNEAFDRAAVVGRDNDKAKIKDMILQSNAQKFSIIPILGLVGLGKTTLARLIFLDQGEGWDFDLRIWISLNRKLNIKMIASDIISQCNHREEKLLDVRTDMEIQENFQLLKRCLQEALHEKHCLIVLDDLSSTDKNQLDELKEMLKGTNESIKVLVTTSSEITAELLHTIPPYKLCPLSEDDSWKIFSQKAFGNCDGDNTDLKKIGKEIVKRCEGIPLLTHSLGLVVQNEVTNVWLAARDEEIWKLERRVATKIELFSPLYQIYNDFSSTIKLCFLYLSIFPKGSTIDKEKLIQQWIALEIIGSKHDSLPPYVNGEMCIQDFLSIYFLQVRDTHSVYGMDNRVVPTTFYIHNFVHEFARHVACDDIIIFDGTKMQKGCAKRQTFQYALLTCYRVQSTFSHSTLTRTRALHIMNSEIQTLPFPMHCYATRLFVQPYQSSNFGFIKMHYAATLTCFIW

SEQ ID NO: 188708 - protein, 1032 aa, Zea Mays
MLIFAGRHSPVSELLPLANHFTCCGSRPSIEIAMPHGHAAAVVDRLLRRLGSAACRLEVPPNIDGDLAHVWTTLARLQDMLVSLEIRPELQEWMGDIKQVAYDVEDLVDELEDHNSMESQMSGCVAVGEETRWCCSCSFLMHSTRADRMKTIKRRLDFLVKDSVIFSLMQYPFPDVERFDNEAFDRAAVVGRDNDKAKIKDMILQSNAQKFSIIPILGLVGLGKTTLARLIFLDQGEGWDFDLRIWISLNRKLNIKMIASDIISQCNHREEKLLDVRTDMEIQENFQLLKRCLQEALHEKHCLIVLDDLSSTDKNQLDELKEMLKGTNESIKVLVTTSSEITAELLHTIPPYKLCPLSEDDSWKIFSQKAFGNCDGDNTDLKKIGKEIVKRCEGIPLLTHSLGLVVQNEVTNVWLAARDEEIWKLERRVATKIELFSPLYQIYNDFSSTIKLCFLYLSIFPKGSTIDKEKLIQQWIALEIIGSKHDSLPPYVNGEMCIQDFLSIYFLQVRDTHSVYGMDNRVVPTTFYIHNFVHEFARHVACDDIIIFDGTKMQKGCAKRQTFQYALLTCYRVQSTFSHSTLTRTRALHIMNSEIQTLPFPDGALKAIGIDNSTIKHIPRFNTTSELSVDTISSSKVSTPSKEIPSTLRRPDKSKMPALIPGDGSLNLSLKQVQKVTHNFSPLFELGEGGTWAVYRAVLSDNQVVIIRRAKKGHVQEAKHLMEVKLLTKINHWSLVRFLGFIDEKDECIRITEYVPNGTLREHLHDQRKRILNFNQRIVIALDVAIALTYLHLCSGDALICYNLRTSNILLTESYRAKVCCSELSKSGNIVLLKGTGGYIDPEYLETSELTAKSDVYSFGIILLEIISSHGPQDWDVLMNHRQSSVVQWALEKFYDDLMNEILDYRMEDRVDGDVVRDLLSLALSCVVSRGADRPSIVVVGERLWKIWQDHRRNVGEQHEYQGSWAEFIEQEGILRHHKCVLKRSWEPSTTQQDWSVYVRQIELVQEAYDTPWGEEIFSGSVSLDDITVYSR

SEQ ID NO: 188709 - protein, 750 aa, Zea Mays
MDPVLAASLQGHTECSADYDYHSLTTTDELVIKEITGGSRGLRIAEQLNLQNRLEVCFLKLEWVPRSQSAQDQLLEYTDEEVLEKFQPNETLEHFMLVKYTGNVFPTWMMNKLTSLPYLVNLCLFHLHNCSALPPIGHLQNLRYLHIKDMPNLTNLEMGLSGGPVSLGKLTHLKLEALNLEELSILLSANNESPCFMFPNLEELSVLSCSKLVFKPSVPKCAKYVIKESNMVLSCWQPLGPFSSPPIEKVEISGCVMPSGWLQWLRSIQTLEKVVIDGEALSSFELQKIYAFQEASGSKISKETVSSSRTNMSRELTTEDGALKAIGIDNSTIKHIPRFNTTSELSVDTISSSKVSTPSKEIPSTLRRPDKSKMPALIPGDGSLNLSLKQVQKVTHNFSPLFELGEGGTWAVYRAVLSDNQVVIIRRAKKGHVQEAKHLMEVKLLTKINHWSLVRFLGFIDEKDECIRITEYVPNGTLREHLHDQRKRILNFNQRIVIALDVAIALTYLHLCSGDALICYNLRTSNILLTESYRAKVCCSELSKSGNIVLLKGTGGYIDPEYLETSELTAKSDVYSFGIILLEIISSHGPQDWDVLMNHRQSSVVQWALEKFYDDLMNEILDYRMEDRVDGDVVRDLLSLALSCVVSRGADRPSIVVVGERLWKIWQDHRRNVGEQHEYQGSWAEFIEQEGILRHHKCVLKRSWEPSTTQQDWSVYVRQIELVQEAYDTPWGEEIFSGSVSLDDITVYSR

SEQ ID NO: 188710 - protein, 522 aa, Zea Mays
MLIFAGRHSPVSELLPLANHFTCCGSRPSIEIAMPHGHAAAVVDRLLRRLGSAACRLEVPPNIDGDLAHVWTTLARLQDMLVSLEIRPELQEWMGDIKQVAYDVEDLVDELEDHNSMESQMSGCVAVGEETRWCCSCSFLMHSTRADRMKTIKRRLDFLVKDSVIFSLMQYPFPDVERFDNEAFDRAAVVGRDNDKAKIKDMILQSNAQKFSIIPILGLVGLGKTTLARLIFLDQGEGWDFDLRIWISLNRKLNIKMIASDIISQCNHREEKLLDVRTDMEIQENFQLLKRCLQEALHEKHCLIVLDDLSSTDKNQLDELKEMLKGTNESIKVLVTTSSEITAELLHTIPPYKLCPLSEDDSWKIFSQKAFGNCDGDNTDLKKIGKEIVKRCEGIPLLTHSLGLVVQNEVTNVWLAARDEEIWKLERRVATKIELFSPLYQIYNDFSSTIKLCFLYLSIFPKGSTIDKEKLIQQWIALEIIGSKHDSLPPYVNGEMCIQDFLSIYFLQVRDTHSWILFHPLK

SEQ ID NO: 188711 - protein, 1623 aa, Zea Mays
MLIFAGRHSPVSELLPLANHFTCCGSRPSIEIAMPHGHAAAVVDRLLRRLGSAACRLEVPPNIDGDLAHVWTTLARLQDMLVSLEIRPELQEWMGDIKQVAYDVEDLVDELEDHNSMESQMSGCVAVGEETRWCCSCSFLMHSTRADRMKTIKRRLDFLVKDSVIFSLMQYPFPDVERFDNEAFDRAAVVGRDNDKAKIKDMILQSNAQKFSIIPILGLVGLGKTTLARLIFLDQGEGWDFDLRIWISLNRKLNIKMIASDIISQCNHREEKLLDVRTDMEIQENFQLLKRCLQEALHEKHCLIVLDDLSSTDKNQLDELKEMLKGTNESIKVLVTTSSEITAELLHTIPPYKLCPLSEDDSWKIFSQKAFGNCDGDNTDLKKIGKEIVKRCEGIPLLTHSLGLVVQNEVTNVWLAARDEEIWKLERRVATKIELFSPLYQIYNDFSSTIKLCFLYLSIFPKGSTIDKEKLIQQWIALEIIGSKHDSLPPYVNGEMCIQDFLSIYFLQVRDTHSVYGMDNRVVPTTFYIHNFVHEFARHVACDDIIIFDGTKMQKGCAKRQTFQYALLTCYRVQSTFSHSTLTRTRALHIMNSEIQTLPFPVSRLTNLEVLDLSKTCMKELPSFIGNLQNLKYLNMQGCDKLQNLPLSLGHLQRLEQLRLSCCRCIAMLPDSLCNLINLRILDLSRCTMLRHLPALFGNLVNLEDLSLSSCFNLKQLPESFGNLYFLRFLNLSSCYELQQFPESVTNLEKLEVLILRRCCRLRILPPSFAMIKYLRILDLAGCEALHVSTEMLTTNLEYLNLQRCLNLQTQPYYFENFNKLKFLNLSHCLPTVDCLESISYLFNLEYLDLSETSLDIPMSFARLQKLHTLNLTGCAPMHPSSNVHQTWPGILAKITSLKSVLTMDPVLAASLQGHTECSADYDYHSLTTTDELVIKEITGGSRGLRIAEQLNLQNRLEVCFLKLEWVPRSQSAQDQLLEYTDEEVLEKFQPNETLEHFMLVKYTGNVFPTWMMNKLTSLPYLVNLCLFHLHNCSALPPIGHLQNLRYLHIKDMPNLTNLEMGLSGGPVSLGKLTHLKLEALNLEELSILLSANNESPCFMFPNLEELSVLSCSKLVFKPSVPKCAKYVIKESNMVLSCWQPLGPFSSPPIEKVEISGCVMPSGWLQWLRSIQTLEKVVIDGEALSSFELQKIYAFQEASGSKISKETVSSSRTNMSRELTTEDGALKAIGIDNSTIKHIPRFNTTSELSVDTISSSKVSTPSKEIPSTLRRPDKSKMPALIPGDGSLNLSLKQVQKVTHNFSPLFELGEGGTWAVYRAVLSDNQVVIIRRAKKGHVQEAKHLMEVKLLTKINHWSLVRFLGFIDEKDECIRITEYVPNGTLREHLHGDALICYNLRTSNILLTESYRAKVCCSELSKSGNIVLLKGTGGYIDPEYLETSELTAKSDVYSFGIILLEIISSHGPQDWDVLMNHRQSSVVQWALEKFYDDLMNEILDYRMEDRVDGDVVRDLLSLALSCVVSRGADRPSIVVVGERLWKIWQDHRRNVGEQHEYQGSWAEFIEQEGILRHHKCVLKRSWEPSTTQQDWSVYVRQIELVQEAYDTPWGEEIFSGSVSLDDITVYSR

SEQ ID NO: 188712 - protein, 468 aa, Zea Mays
MPSQPQPSSIGGTSQTPAPFQTAPVFTGGSPRTLATLSAQSVPRVTRRSIALVDWCLERVEGEEGKIRVAGTTYTPQTSPQTRREASSSKGSRKVAGRVFRSSAIVRRHDHFRIMSEDGYLIRIGCLLNIPKTRNNGFSEEVCECFEFGFPIQWHRLVNPKMVPDNKHALSPSETTASAPSHSVGYYMEKFLSDSFSNSNRYSFTENDSYTSVVCTGSRNGLTTQTLSNLPDDNAGNITVSWGLYGLGMDMSEKPWTPPAEACNNRQESDQHESMQIDACKQELVNRSMSSVSVKQSISSISPNSKVDGNRIVPSKIMSVVNESYRSTVGCGQAEEDVGIQQEKKHSCSSEHGMVTLSINCTSSQLGAPGIPKFGKDSVNLWTTDALELSTEGMTPKIGADSTDRRLRSGKILGMPSGGLMNRGHKLKKIKQEASSKQMVNQGATCTVDLTSHENSYEALLECCQAIM

SEQ ID NO: 188713 - protein, 367 aa, Zea Mays
MASVIDGNGGSRLVVTELGHLKELAMQLEGHLGGSSPDLCKHLASQISSITDRSISLLITATSSSPHGGASDAPPFIRATTKKRKRMDKKRHEVRVGSAGGGGGDHPADDGYSWRKYGQKEILGAKHPRCPLDTCCAIRRFFSPLLHLFHTPQPNLICTCSYRNFASGIEIILPLLSLSSFHGGAAASIVLVEMGYYRCTHKSSQGCAATKQVQRTDEDPAFFDVVYLGDHTCVQSQRAAATAGRQAAADAQAPEYDANLMVKTEGPALEPEQQRRGWEDAPTPFLFSSTPACLVPERSPFSAPSTSENWGVSPATSDSNHVVSFPPFEVAAAAAAQFEFEEVMSAIDRADGEFLEDLDIYVSSFLA

SEQ ID NO: 188714 - protein, 166 aa, Zea Mays
MCGDEASAAHRRGPGLLRRRLPRRPHLRSEPEGGSDGGSSGCRGRAGAGVRRQPHGEDRGAGPGARAAAAGLGGRAHALSLLLHAGVPCAGAQPLLRTVHVRELGRVPGDLGLQPRRLFPAFRGRRRRCRAVRVRGSHVSDRQSRRRVSRGPRHLCLKLLSVICWM

SEQ ID NO: 188715 - protein, 159 aa, Zea Mays
MASVIDGNGGSRLVVTELGHLKELAMQLEGHLGGSSPDLCKHLASQISSITDRSISLLITATSSSPHGGASDAPPFIRATTKKRKRMDKKRHEVRVGSAGGGGGDHPADDGYSWRKYGQKEILGAKHPRYRTMIRRRSCISISVARCWLHLPWTGQNAD

SEQ ID NO: 188716 - protein, 441 aa, Zea Mays
MATRRMEQCAWVAEVERAVADGGASSEESSRWRQQCIYRVPTCIKNLNRKAYQPQVVSLGPFHHGEPQLRPMDTHKRRALVHFLRRARKPLAAFAGAVAAAGERLEAAYEGLGDEWRVGGGAAERFVELMVTDGCFLLETMRTATGWEVNDYDGEDPVFSAHGLLYNVPYIRRDMLMIENQLPLLVLDRLLAVENGKDGNEDVINRIVLLFLSPTAAWPLTTGTGLALHPLDMFRRSLLCGSPTPSGGPRAPPPDSPDDIIRSAEELYEAGVRFRRSATSSFLDIRFHRGTLYLPAIVVDDTTEYVLLNLMAFERLHVGAGNDVTAYVFFMDNMVDSARDVALLTSRRIVYNTVGSDKAVAKLFSGLSRDVVLEPHSALDDVHREVNAYCRKRRNRWRANLVHTYFRSPWSFLSLAAAVFLLVMTVLQTVYTLLPYYSDKS

SEQ ID NO: 188717 - protein, 77 aa, Zea Mays
MVLAQLDLGTRHSDTGTLVTLQLPVPSLKPRDVHTQKTKLGQVNKSFTAILPKFVKICSQSALEQGQRQREHVFDRG

SEQ ID NO: 188718 - protein, 63 aa, Zea Mays
MHISYALHSLDCNLADGEYVLIPEQGPVQEEDQEQVWQNLQVIGPTCTRPCPKDLKRPCMCTR

SEQ ID NO: 188719 - protein, 119 aa, Zea Mays
MPTTSWCSRPCSPSGGSPGERDLPTPGSLPSLAAASCCLRPCSPTAARRRRSDREPFAMDKAFLLSGNEGIVGSSLTWGRGRSSSAVGWSGQDSSVPTRLHRSGPSSPLASYSQFREQD

SEQ ID NO: 188720 - protein, 81 aa, Zea Mays
MAYVSPATDDTSTDLDTDEKNQMGLPSGRWPNQSTRLWRPDESPRRPPRDSSTSPGWRSRNPTPPCPFCYLRTPLPRGCMT

SEQ ID NO: 188721 - protein, 718 aa, Zea Mays
MAVMSSGGLLPTLCCLCYVLSSVHVPLAASLSFHFNFSDPDSTCTAQNAELACSSDAYFHSTEDAIELTKNGMDNHNNKSVGRLVYTQPIPLWNGATGELASFTTSFTFRIKRAQPGSPSGDGMAFFLAHHPGRVPPSSFGRNLGLFNDSTNRNATGDDRAVAVEFDTFENDELEDADGNHVGIDVNSIVSTDSISPDKSIKSGETLAADVAFDNTTETLSVTLWMSGAPYRVSANVDMRKSLPQMVAVGFAASTGNNVEMHQLLSWSFNSTLASSKDGETRPPAPSQAIVSKNKSKARSSAIAVSSAAAFVVVCALTGFLLRRKLRMWKTSKEASGAGELDDDEHDGEEAEFEKGVGPKRYSYRELAAATRNFSEETKLGRGGFGHVYQGRLNIDGQDRRVAIKKFSESSMQGRKEFEAEVKIISRLRHRNLVRLIGWCDCCKGLLIVYELVSEGSLDRHIYNAARWLTWPQRYKIIIGLGSALRYLHAEWEQCVVHGDIKPSNIMLDSSLDAKLGDFGLARLVDHGVKPATTKVVLGTAGYIDPELVNTRRPSAVSDVYSFGVVLLELVTGRRPVEEPDDSDELFVLIRWVWRLYGRNAIAEAVDERLKLVGREGDGGGGEVEEEEERGQMERALVVGLWCAQPDRGDRPSIAHAMHVLQSADVKLPVLRPHMYASAADTVHSTIAMGGDGYSELSFGVTSTDGSDTSTTSERESK

SEQ ID NO: 188722 - protein, 652 aa, Zea Mays
MFNHHPLRCSSCGKESAASSKMEDFYELELNIKGLNNLEESLNEYFSEEALDGENQYFCESCQKRVDATRCIKLRSLPPVVNFQLKRYVFLPKTTTKKKISSTFSFPGQLDLGKRLSEPSSSCTYALSAILIHKGTGANSGHYVAHIKDESNGQWWEFDDETVSKLGLHPFGEKPGKASNKDDQKSQNTSTEGSVTNNNNNGHHEAAPSSTMGEMFSSTDAYMLMYKCITKDVNPTESNKIVEINNDLLPHHLLDEINELNASYTKLCVEYQSKKDSHLAYITERRQEVKSVLTEAPAGPGDDSYFWISTDWLRQWADNITPPSSIDNGAIQCEHGKVPASKVTSMKRLSSVAWQKLHSKYGGGPILNSDDFCMECLKDGAKSAVSADVYRERRASLKTLAEAALAGNCPDGPSYFISKTWLTHWLRRKNADIPSDGDNGPTSALRCCHGDFLPEHAPGAKRVSVPEILWLFLYQTVHEKKADDTVTFPSDSHPCETCSRELSDVASVEVNLRAVKLKQRQNHEKLISGKSFALHPGQKYYLVPSSWLSEWRAYITATGKNISSLPEPQTLEAVARSLICEKHSRLLQRPLDLVLKRGSIIQKASNSMIGNYSLKSGVLHLEKVYLLKLLLARVLKTNCMDHLKQCRLRMEI

SEQ ID NO: 188723 - protein, 625 aa, Zea Mays
MSRPNTRNKSKRPRSDESINPSAAVFKKIHSAGDISKDDICQLYMVWKPPCHGCHGNTKDSPNCFCGLIPAANGVRKTGLWQKMQEMVRGLGPNPSKDLRDSTDTPAGLTNLGATCYANSILQCLYMNIAFRSGIFSLELDVLEKHPVLDQLARLFAQLHSSKMLFIDSAPFIKTLELDNGVQQDSHEFLTLFLSLLEQSLSHSKVPGARTIVQNLFCGSVSHVTRCSSCGKESAASSKMEDFYELELNIKGLNNLEESLNEYFSEEALDGENQYFCESCQKRVDATRCIKLRSLPPVVNFQLKRYVFLPKTTTKKKISSTFSFPGQLDLGKRLSEPSSSCTYALSAILIHKGTGANSGHYVAHIKDESNGQWWEFDDETVSKLGLHPFGEKPGKASNKDDQKSQNTSTEGSVTNNNNNGHHEAAPSSTMGEMFSSTDAYMLMYKCITKDVNPTESNKIVEINNDLLPHHLLDEINELNASYTKLCVEYQSKKDSHLAYITERRQEVKSVLTEAPAGPGDDSYFWISTDWLRQWADNITPPSSIDNGAIQCEHGKVPASKVTSMKRLSSVAWQKLHSKYGGGPILNSDDFCMECLKDGAKSAVSADVYRERRASLKTLAEAALAG

SEQ ID NO: 188724 - protein, 931 aa, Zea Mays
MSRPNTRNKSKRPRSDESINPSAAVFKKIHSAGDISKDDICQLYMVWKPPCHGCHGNTKDSPNCFCGLIPAANGVRKTGLWQKMQEMVRGLGPNPSKDLRDSTDTPAGLTNLGATCYANSILQCLYMNIAFRSGIFSLELDVLEKHPVLDQLARLFAQLHSSKMLFIDSAPFIKTLELDNGVQQDSHEFLTLFLSLLEQSLSHSKVPGARTIVQNLFCGSVSHVTRCSSCGKESAASSKMEDFYELELNIKGLNNLEESLNEYFSEEALDGENQYFCESCQKRVDATRCIKLRSLPPVVNFQLKRYVFLPKTTTKKKISSTFSFPGQLDLGKRLSEPSSSCTYALSAILIHKGTGANSGHYVAHIKDESNGQWWEFDDETVSKLGLHPFGEKPGKASNKDDQKSQNTSTEGSVTNNNNNGHHEAAPSSTMGEMFSSTDAYMLMYKCITKDVNPTESNKIVEINNDLLPHHLLDEINELNASYTKLCVEYQSKKDSHLAYITERRQEVKSVLTEAPAGPGDDSYFWISTDWLRQWADNITPPSSIDNGAIQCEHGKVPASKVTSMKRLSSVAWQKLHSKYGGGPILNSDDFCMECLKDGAKSAVSADVYRERRASLKTLAEAALAGNCPDGPSYFISKTWLTHWLRRKNADIPSDGDNGPTSALRCCHGDFLPEHAPGAKRVSVPEILWLFLYQTVHEKKADDTVTFPSDSHPCETCSRELSDVASVEVNLRAVKLKQRQNHEKLISGKSFALHPGQKYYLVPSSWLSEWRAYITATGKNISSLPEPQTLEAVARSLICEKHSRLLQRPLDLVLKRGSIIQKASNSMIGNYSLKSGVLHLEKASLLMTQTMIWEPESLISELIPRFVKNVLAKGRAVHWWKNSTIKMKISTFTLSMEKKHQSLLKKHLKLLLYQIVGHRSVPGEQALETQSV

SEQ ID NO: 188725 - protein, 826 aa, Zea Mays
MVWKPPCHGCHGNTKDSPNCFCGLIPAANGVRKTGLWQKMQEMVRGLGPNPSKDLRDSTDTPAGLTNLGATCYANSILQCLYMNIAFRSGIFSLELDVLEKHPVLDQLARLFAQLHSSKMLFIDSAPFIKTLELDNGVQQDSHEFLTLFLSLLEQSLSHSKVPGARTIVQNLFCGSVSHVTRCSSCGKESAASSKMEDFYELELNIKGLNNLEESLNEYFSEEALDGENQYFCESCQKRVDATRCIKLRSLPPVVNFQLKRYVFLPKTTTKKKISSTFSFPGQLDLGKRLSEPSSSCTYALSAILIHKGTGANSGHYVAHIKDESNGQWWEFDDETVSKLGLHPFGEKPGKASNKDDQKSQNTSTEGSVTNNNNNGHHEAAPSSTMGEMFSSTDAYMLMYKCITKDVNPTESNKIVEINNDLLPHHLLDEINELNASYTKLCVEYQSKKDSHLAYITERRQEVKSVLTEAPAGPGDDSYFWISTDWLRQWADNITPPSSIDNGAIQCEHGKVPASKVTSMKRLSSVAWQKLHSKYGGGPILNSDDFCMECLKDGAKSAVSADVYRERRASLKTLAEAALAGNCPDGPSYFISKTWLTHWLRRKNADIPSDGDNGPTSALRCCHGDFLPEHAPGAKRVSVPEILWLFLYQTVHEKKADDTVTFPSDSHPCETCSRELSDVASVEVNLRAVKLKQRQNHEKLISGKSFALHPGQKYYLVPSSWLSEWRAYITATGKNISSLPEPQTLEAVARSLICEKHSRLLQRPLDLVLKRGSIIQKASNSMIGNYSLKSGVLHLEKVYLLKLLLARVLKTNCMDHLKQCRLRMEI

SEQ ID NO: 188726 - protein, 1050 aa, Zea Mays
MSRPNTRNKSKRPRSDESINPSAAVFKKIHSAGDISKDDICQLYMVWKPPCHGCHGNTKDSPNCFCGLIPAANGVRKTGLWQKMQEMVRGLGPNPSKDLRDSTDTPAGLTNLGATCYANSILQCLYMNIAFRSGIFSLELDVLEKHPVLDQLARLFAQLHSSKMLFIDSAPFIKTLELDNGVQQDSHEFLTLFLSLLEQSLSHSKVPGARTIVQNLFCGSVSHVTRCSSCGKESAASSKMEDFYELELNIKGLNNLEESLNEYFSEEALDGENQYFCESCQKRVDATRCIKLRSLPPVVNFQLKRYVFLPKTTTKKKISSTFSFPGQLDLGKRLSEPSSSCTYALSAILIHKGTGANSGHYVAHIKDESNGQWWEFDDETVSKLGLHPFGEKPGKASNKDDQKSQNTSTEGSVTNNNNNGHHEAAPSSTMGEMFSSTDAYMLMYKCITKDVNPTESNKIVEINNDLLPHHLLDEINELNASYTKLCVEYQSKKDSHLAYITERRQEVKSVLTEAPAGPGDDSYFWISTDWLRQWADNITPPSSIDNGAIQCEHGKVPASKVTSMKRLSSVAWQKLHSKYGGGPILNSDDFCMECLKDGAKSAVSADVYRERRASLKTLAEAALAGNCPDGPSYFISKTWLTHWLRRKNADIPSDGDNGPTSALRCCHGDFLPEHAPGAKRVSVPEILWLFLYQTVHEKKADDTVTFPSDSHPCETCSRELSDVASVEVNLRAVKLKQRQNHEKLISGKSFALHPGQKYYLVPSSWLSEWRAYITATGKNISSLPEPQTLEAVARSLICEKHSRLLQRPLDLVLKRGSIIQKASNTDGLTIIPEYDWKLFSEEWSATPGKGISAEIAFSKSSQDKLHGSSEAVPITDGNLGQSLDDTNDDLGAREPYIRTDPEVCEECIGERESCALVEKLNYQNEDIHVYFVHGKEAPKSIKEASKAVTVPDRRTSKRSRRTSSGNSISLKVSGSTSVYQLKLMIWESLGVCTRGITKIVRSQILICTIVVSFFMFQKGLHTFMFFHQAMGWAFLFFILVCFFQLLQIFK

SEQ ID NO: 188727 - protein, 81 aa, Zea Mays
MYKTFFYLIQVLALNPFPLACRCSAVAAPRPASANTSRALNRWSHYLRLFPFPSSDSGLDGSWPLCFLDNRCNFWFWIGCS

SEQ ID NO: 188728 - protein, 61 aa, Zea Mays
MAELVGPRVYSCCNCRNNVCLHDDILSKAFQALAKLKNLISWCSAKGTKFACSSPLRLGWN

SEQ ID NO: 188729 - protein, 205 aa, Zea Mays
MPLSSSRRPSQASAVGSPSFPPNPGVHHHPSSSSLPLLLRSSLARPGSSLPLAPIFSLPRRTRPGLHVSPQLHLPQLAQAMDISELTLGPTCIDPTPLHPWLRSASTSSLALGSSSNVPFTPLTLARQHPPFGRPWPPRRGPGHDVILASCQSRASHTAYLMKCPNSWTVNATSAPCPNTLSQFRALSMRHRFSSIQIVHCLMLD

SEQ ID NO: 188730 - protein, 292 aa, Zea Mays
MGRKYYCHAVAALAVVFAAAVVVAADRRLSLVVGAAVAPEEVSLLRKVANLMWNGDGNSYQHVWPPMEFGWQIVLGSLIGFFGAAFGSVGGVGGGGIFVPMLTLIIGFDPKSSTAISKCMIMGASVSTVYYNLKLKHPTLDMPVIDYDLAVLMQPMLMLGISIGVIFNVIFPDWLVTVLLIILFLGTSTKAFLKGIETWKKETVIQREAAKLLEQTAGEEAEYAALPTGPDVAANKKALTSDEAPSLIKNIHWKKVGLLSFVWVAFLVLQVTKNYTATCSPWYWVLNLLQCQ

SEQ ID NO: 188731 - protein, 432 aa, Zea Mays
MGRKYYCHAVAALAVVFAAAVVVAADRRLSLVVGAAVAPEEVSLLRKVANLMWNGDGNSYQHVWPPMEFGWQIVLGSLIGFFGAAFGSVGGVGGGGIFVPMLTLIIGFDPKSSTAISKCMIMGASVSTVYYNLKLKHPTLDMPVIDYDLAVLMQPMLMLGISIGVIFNVIFPDWLVTVLLIILFLGTSTKAFLKGIETWKKETVIQREAAKLLEQTAGEEAEYAALPTGPDVAANKKALTSDEAPSLIKNIHWKKVGLLSFVWVAFLVLQVTKNYTATCSPWYWVLNLLQVPVSVGVTLYEGFGLMSGKRVLSSKGSGQTTMKFHQVVVYGLFGIAAGLVGGLLGLGGGFIMGPLFLELGIPPQVSSATATFAMMFSSSMSVVEYYLLNRFPVPYACGEEVDQLARASITYHLHTGFHDLCQRDFSRWGWRL

SEQ ID NO: 188732 - protein, 423 aa, Zea Mays
MACRPPCPCGCFCFYMVFFLGLLLVEAVHGTGRSEVAAAAPTPSLVPAEASVLRRIAARLGVSSWDFTAGAGPCDHGDSGVHCDCSFSNGTVCHVTEIFLKGQNFSGELPPDFADLPYLLQLDLSRSLFHGGVPHQWARMKLQGLSLMANRLSGPFPMVLTKITTLTNLSIEGNEFYGPIPPEIGYLIRMEKLILSTNEFTGPLPAALSLFSNLTDLRISSTNFSGRIPDFWGNLKRLDKLQIEGSFLEGPIPSSLSELKNLSDLRISDLRGSGSSFPDLSGMTYMNKLVLRNCSISGSIPPYIGTWTSLKHLDLSFNKLSGEIPPSFASMGAVDYIYLSGNSLTGNIPGWLLRRNKIADISFNNFTMGSSGPSQCLQGSVNLVESYSAEVNRLNSIHPCLKRNFPCVASNGQFEEKPSGRVM

SEQ ID NO: 188733 - protein, 827 aa, Zea Mays
MACRPPCPCGCFCFYMVFFLGLLLVEAVHGTGRSEVAAAAPTPSLVPAEASVLRRIAARLGVSSWDFTAGAGPCDHGDSGVHCDCSFSNGTVCHVTEIFLKGQNFSGELPPDFADLPYLLQLDLSRSLFHGGVPHQWARMKLQGLSLMANRLSGPFPMVLTKITTLTNLSIEGNEFYGPIPPEIGYLIRMEKLILSTNEFTGPLPAALSLFSNLTDLRISSTNFSGRIPDFWGNLKRLDKLQIEGSFLEGPIPSSLSELKNLSDLRISDLRGSGSSFPDLSGMTYMNKLVLRNCSISGSIPPYIGTWTSLKHLDLSFNKLSGEIPPSFASMGAVDYIYLSGNSLTGNIPGWLLRRNKIADISFNNFTMGSSGPSQCLQGSVNLVESYSAEVNRLNSIHPCLKRNFPCVASNGQYFQIPLAVDPPKAGSREKRSSRASIALGIGIPIVAIFTALILGIYCIKKQRKSSMHEELRALDLQIGSFTLRQIKAATRNFDAANKIGEGGFGSVYKGLLSDGTIIAVKQLSSRSKQGNREFVNEIGMISALQHPNLVKLYGCCTEGNQLSLVYEYMENNCLARALFVEQYRLRMDWGTRHKICLGIAKGLAYLHEESAIRIVHRDIKASNILLDKDLNAKISDFGLAKLNEDDHTHISTKVAGTIGYMAPEYAMRGYLTDKADVYSFGVVVLEIVSGKSNTNYRPKEDFVYLLDWACVLHERGTLLELVDPDLGSNYSTEEALLMLNVALLCTTAAPTLRPKMSKVVSLLEGSAPLQPLLSDLSLAANSLSSSGVRRNFWQNPGESQSLTAQASCSDTNESSTIDIDGILLVS

SEQ ID NO: 188734 - protein, 1006 aa, Zea Mays
MACRPPCPCGCFCFYMVFFLGLLLVEAVHGTGRSEVAAAAPTPSLVPAEASVLRRIAARLGVSSWDFTAGAGPCDHGDSGVHCDCSFSNGTVCHVTEIFLKGQNFSGELPPDFADLPYLLQLDLSRSLFHGGVPHQWARMKLQGLSLMANRLSGPFPMVLTKITTLTNLSIEGNEFYGPIPPEIGYLIRMEKLILSTNEFTGPLPAALSLFSNLTDLRISSTNFSGRIPDFWGNLKRLDKLQIEGSFLEGPIPSSLSELKNLSDLRISDLRGSGSSFPDLSGMTYMNKLVLRNCSISGSIPPYIGTWTSLKHLDLSFNKLSGEIPPSFASMGAVDYIYLSGNSLTGNIPGWLLRRNKIADISFNNFTMGSSGPSQCLQGSVNLVESYSAEVNRLNSIHPCLKRNFPCVASNGQYHSSLHINCGDKEATINGTKYEADTTPKGASLLYVSPGLNWAFSSTGNFMDDNINDDNYIATSASKLAVPNSDLYNKARLSPLSLTYYGLCMLSGSYTVNLHFAEIVFTNDSTYYSLGKRRFNVFIQGRMVLEDFDIEQSSGAAAKPVTKTFQTYVTNHTLEIQFYWAGRGTTGIPYRGSYGPLISAISVTPNFQIPLAVDPPKAGSREKRSSRASIALGIGIPIVAIFTALILGIYCIKKQRKSSMHEELRALDLQIGSFTLRQIKAATRNFDAANKIGEGGFGSVYKLSSRSKQGNREFVNEIGMISALQHPNLVKLYGCCTEGNQLSLVYEYMENNCLARALFVEQYRLRMDWGTRHKICLGIAKGLAYLHEESAIRIVHRDIKASNILLDKDLNAKISDFGLAKLNEDDHTHISTKVAGTIGYMAPEYAMRGYLTDKADVYSFGVVVLEIVSGKSNTNYRPKEDFVYLLDWACVLHERGTLLELVDPDLGSNYSTEEALLMLNVALLCTTAAPTLRPKMSKVVSLLEGSAPLQPLLSDLSLAANSLSSSGVRRNFWQNPGESQSLTAQASCSDTNESSTIDIDGILLVS

SEQ ID NO: 188735 - protein, 1005 aa, Zea Mays
MACRPPCPCGCFCFYMVFFLGLLLVEAVHGTGRSEVAAAAPTPSLVPAEASVLRRIAARLGVSSWDFTAGAGPCDHGDSGVHCDCSFSNGTVCHVTEIFLKGQNFSGELPPDFADLPYLLQLDLSRSLFHGGVPHQWARMKLQGLSLMANRLSGPFPMVLTKITTLTNLSIEGNEFYGPIPPEIGYLIRMEKLILSTNEFTGPLPAALSLFSNLTDLRISSTNFSGRIPDFWGNLKRLDKLQIEGSFLEGPIPSSLSELKNLSDLRISDLRGSGSSFPDLSGMTYMNKLVLRNCSISGSIPPYIGTWTSLKHLDLSFNKLSGEIPPSFASMGAVDYIYLSGNSLTGNIPGWLLRRNKIADISFNNFTMGSSGPSQCLQGSVNLVESYSAEVNRLNSIHPCLKRNFPCVASNGQYHSSLHINCGDKEATINGTKYEADTTPKGASLLYVSPGLNWAFSSTGNFMDDNINDDNYIATSASKLAVPNSDLYNKARLSPLSLTYYGLCMLSGSYTVNLHFAEIVFTNDSTYYSLGKRRFNVFIQGRMVLEDFDIEQSSGAAAKPVTKTFQTYVTNHTLEIQFYWAGRGTTGIPYRDFQIPLAVDPPKAGSREKRSSRASIALGIGIPIVAIFTALILGIYCIKKQRKSSMHEELRALDLQIGSFTLRQIKAATRNFDAANKIGEGGFGSVYKGLLSDGTIIAVKQLSSRSKQGNREFVNEIGMISALQHPNLVKLYGCCTEGNQLSLVYEYMENNCLARALFVEQYRLRMDWGTRHKICLGIAKGLAYLHEESAIRIVHRDIKASNILLDKDLNAKISDFGLAKLNEDDHTHISTKVAGTIGYMAPEYAMRGYLTDKADVYSFGVVVLEIVSGKSNTNYRPKEDFVYLLDWACVLHERGTLLELVDPDLGSNYSTEEALLMLNVALLCTTAAPTLRPKMSKVVSLLEGSAPLQPLLSDLSLAANSLSSSGVRRNFWQNPGESQSLTAQASCSDTNESSTIDIDGILLVS

SEQ ID NO: 188736 - protein, 872 aa, Zea Mays
MANRLSGPFPMVLTKITTLTNLSIEGNEFYGPIPPEIGYLIRMEKLILSTNEFTGPLPAALSLFSNLTDLRISSTNFSGRIPDFWGNLKRLDKLQIEGSFLEGPIPSSLSELKNLSDLRISDLRGSGSSFPDLSGMTYMNKLVLRNCSISGSIPPYIGTWTSLKHLDLSFNKLSGEIPPSFASMGAVDYIYLSGNSLTGNIPGWLLRRNKIADISFNNFTMGSSGPSQCLQGSVNLVESYSAEVNRLNSIHPCLKRNFPCVASNGQYHSSLHINCGDKEATINGTKYEADTTPKGASLLYVSPGLNWAFSSTGNFMDDNINDDNYIATSASKLAVPNSDLYNKARLSPLSLTYYGLCMLSGSYTVNLHFAEIVFTNDSTYYSLGKRRFNVFIQGRMVLEDFDIEQSSGAAAKPVTKTFQTYVTNHTLEIQFYWAGRGTTGIPYRGSYGPLISAISVTPNFQIPLAVDPPKAGSREKRSSRASIALGIGIPIVAIFTALILGIYCIKKQRKSSMHEELRALDLQIGSFTLRQIKAATRNFDAANKIGEGGFGSVYKGLLSDGTIIAVKQLSSRSKQGNREFVNEIGMISALQHPNLVKLYGCCTEGNQLSLVYEYMENNCLARALFVEQYRLRMDWGTRHKICLGIAKGLAYLHEESAIRIVHRDIKASNILLDKDLNAKISDFGLAKLNEDDHTHISTKVAGTIGYMAPEYAMRGYLTDKADVYSFGVVVLEIVSGKSNTNYRPKEDFVYLLDWACVLHERGTLLELVDPDLGSNYSTEEALLMLNVALLCTTAAPTLRPKMSKVVSLLEGSAPLQPLLSDLSLAANSLSSSGVRRNFWQNPGESQSLTAQASCSDTNESSTIDIDGILLVS

SEQ ID NO: 188737 - protein, 613 aa, Zea Mays
MGMEVVGAEAAPAEVKISDGEVNLFQEKESKATAKEREEAAVFGSETTANVTDLAPPKDAKDEWPEPKQTYVFYFIKIRSFEDPKLRVKLEQADKEFQKKIQARSKLIEAVRAKKAERSSIIAELKPLSAENKQYNEVVNEKIKEMEPLRNSLGKFREENNAMRAQSAGLCSSIEELDLTMLNDRMVHESIPLSEEKRLVKEIKDLEKTRSKVISNAANRAKLQGTVVEKEAIQDQVKIIGEGIDGIKKERQAVRSKIKVLEDELKLVDAEIGLLQEDLDAATARKDKAYESLQELRAVRDAKNASSMHNRTVLTRARDYSSRNMLTELQELHKTEVDKFMTQWCESKAFREDYEKRILTSLNSRQLTRDGRMRNPDEKPIFIESQAPAPAPEPIPVKLPAKQAKEVPAPQADDAPKTEAPSKGPVKSHKAKAALDADDDYEAEPLKEKAKPTEADVAKLKEIKRQEEIEKNKLALERKKKQAEKQAAKAAARAQKEAEKKLKKEEKKAKKKSGAADTDEPSESDAKSDEAMEAPVEQEVAPASTMIKKEQKESARHRNVVSKAPPPKAILKRKKAQSYWSWAGPAAMVAAVLVALLAVLGYYQYYLPANASN

SEQ ID NO: 188738 - protein, 306 aa, Zea Mays
MHNRTVLTRARDYSSRNMLTELQELHKTEVDKFMTQWCESKAFREDYEKRILTSLNSRQLTRDGRMRNPDEKPIFIESQAPAPAPEPIPVKLPAKQAKEVPAPQADDAPKTEAPSKGPVKSHKAKAALDADDDYEAEPLKEKAKPTEADVAKLKEIKRQEEIEKNKLALERKKKQAEKQAAKAAARAQKEAEKKLKKEEKKAKKKSGAADTDEPSESDAKSDEAMEAPVEQEVAPASTMIKKEQKESARHRNVVSKAPPPKAILKRKKAQSYWSWAGPAAMVAAVLVALLAVLGYYQYYLPANASN

SEQ ID NO: 188739 - protein, 238 aa, Zea Mays
MEKLAADRKDQVFDNKFCQKLAEEFNRSVGRAGSKALQATQVQGWFLNKFPASATKPTCVPTASQEKTSASEINVSVSEKRSAASEEKLFPLDTETKDMIPELEDLEFEAKSTKDFAWYDIALFLAHRRNRAGEVEVRVRFEGFGADEDEWVNVKKFIRQRSIPLESSQCKSVVEGDLVLCFREGNEEALHFDAHVLEVQRKQHDIRGCRCVFLVEYDHDQSQERVSLRRLSRRPKYF

SEQ ID NO: 188740 - protein, 140 aa, Zea Mays
MIPELEDLEFEAKSTKDFAWYDIALFLAHRRNRAGEVEVRVRFEGFGADEDEWVNVKKFIRQRSIPLESSQCKSVVEGDLVLCFREGNEEALHFDAHVLEVQRKQHDIRGCRCVFLVEYDHDQSQERVSLRRLSRRPKYF

SEQ ID NO: 188741 - protein, 137 aa, Zea Mays
MERRSSVRFVPSEIARMEKLAADRKDQVFDNKFCQKLAEEFNRSVGRAGSKALQATQVQGWFLNKFPASATKPTCVPTASQEKTSASEINVSVSEKRSAASEEKLFPLDTETKDMIPELEDLEFEAKSTKDFAWKSG

SEQ ID NO: 188742 - protein, 140 aa, Zea Mays
MIARMEKLAADRKDQVFDNKFCQKLAEEFNRSVGRAGSKALQATQVQGWFLNKFPASATKPTCVPTASQEKTSASEINVSVSEKRSAASEEKLFPLDTGVSNNEDEVSPVFPLETKDMIPELEDLEFEAKSTKDFAWKSG

SEQ ID NO: 188743 - protein, 406 aa, Zea Mays
MALKQKDTDAAATATGTKKRRRVFFSDTDAGVEANECMKVFLVWNPGEGGKGITDLKPVLQNIFGENLVEKEEFLHTFSKECEYIRTAVTNGSAIKHDGSYESDPAVEIVRVELQGAAAFLYSRLVPLVLLLVEGSTPIDIGEHGWEMLLVVKKATQEAGSKFELLGFAAVHNFYHYPESIRLRISQGEGHGLGLLEAINYIAQSENIYDVTIESPSDYLQYVRSSIDCLRLLMFDPIKPALGAIVLSLKETNLSKRAQSLRMVPPADLMETVRQKLKINKKQFLRCWEILIFLSLDSQDHKSMDNFRACIYDRMKGEILGSASGTNRKRLLQMPTSFNKEASFAVYWTQEIEDEDEQTVEQQPEDLKTQEQQLNELVDIQIEEIAGVAKNVTSRCKDKMTELVVQ

SEQ ID NO: 188744 - protein, 94 aa, Zea Mays
MKWRILLKMPTYPMDKQKMIVVATMCLHNFIRENSALDEDFQRCDRDPDYIPTIPSRYRRHVPQNASDTSTTGSSSRNMNRFCDDVSKVLWESR

SEQ ID NO: 188745 - protein, 108 aa, Zea Mays
MANRTLCLVAAPGNHHHSLSLSHLLSLMLATATTPITWWLPITAPKSKAPRRAPRRPAWLSRRGLFFSGESFDQFVIRFRASRDRRSSFGDQVIKLLELYEIEDSEHL

SEQ ID NO: 188746 - protein, 54 aa, Zea Mays
MALTGREGGITAMKSNPPFEMIMVALSTQRSQIIHASYPQLLHQSLELTISYAK

SEQ ID NO: 188747 - protein, 125 aa, Zea Mays
MTGKKRKAEAARLEETDQALYGAFRGAANSLSQLYTLAMGAQKASFNAGERHAMEKLYEWILRQHENGLRLTVADVASRIQVSLQSFPYMFLSKFNMETRVKIWDILPLHCLVLNYMLSGTDLLP

SEQ ID NO: 188748 - protein, 554 aa, Zea Mays
MDSPRGPASFATQANALLRKNLCVQKRNLKTNIGITFFPILICVLLIVLQNVINSELDKPKYKCGCVCLETSANGRCVRKECGIQYSTLDQVGSCPIPSPPQWPALIQIPRADFRAARTFSQPFNDLPDPFCRDSWSCPATVLVTGKDRAVAEAISRGLFPVLSPSLNATDLLDLFSKIVAGSDTQPWYTQLLEPAFFSGRTLYVIQPECTPVMSQTITYNTGGIPFQLNIQCVEGAPLWRETASIINHEFLKGYRQRGGQINEFIAGYDFLGTTQYGLGVNVWYNSTYNDNNAYSFISTLRVPRLVNAVSNAYLKLIKGTGVDMLLEFVKDMPKVGTSFQLDLSSLLSVLFFTWIIELLFPVMLTYLVYEKQQKLRIMMKMHGLKDGPYWLISYSYFLALSIVYMLFFMIFGSLIGLNFFRVNEYSIQAVFFFVCINLQIALAFFVASFFLSVKMATVIGYMYVFGSGLLGAFLFRFFVEDKTFPYGWTLVMEIVPGFSLYRGLYELGQYAFSGSSIGTTDVYRRNVQHHCMNLALSNRIPKSFSIWRNLMLL

SEQ ID NO: 188749 - protein, 908 aa, Zea Mays
MDSPRGPASFATQANALLRKNLCVQKRNLKTNIGITFFPILICVLLIVLQNVINSELDKPKYKCGCVCLETSANGRCVRKECGIQYSTLDQVGSCPIPSPPQWPALIQIPRADFRAARTFSQPFNDLPDPFCRDSWSCPATVLVTGKDRAVAEAISRGLFPVLSPSLNATDLLDLFSKIVAVSSLNYQPNIQCVEGAPLWRETASIINHEFLKGYRQRGGQINEFIAGYDFLGTTQYGLGVNVWYNSTYNDNNAYSFISTLRVPRLVNAVSNAYLKLIKGTGVDMLLEFVKDMPKVGTSFQLDLSSLLSVLFFTWIIELLFPVMLTYLVYEKQQKLRIMMKMHGLKDGPYWLISYSYFLALSIVYMLFFMIFGSLIGLNFFRVNEYSIQAVFFFVCINLQIALAFFVASFFLSVKMATVIGYMYVFGSGLLGAFLFRFFVEDKTFPYGWTLVMEIVPGFSLYRGLYELGQYAFSGSSIGTTGMTWRSLKDPLNGMRDVMIVMSVEWAVLLILAFYLDQTSLLGGGVRKNPFFCFRCLQKKCATSLHEPSFVQQDSKVILDMEKSDVALERKVVEQFLIDPNANQAIICDNLRKVYHGRDGNPDKLAVRGLSLVLQKGQCFGMLGPNGAGKTSFINMMIGLIKPTSGTAYVHGMDINMDMGDIYTNMGVCPQQNLLWETLTGKEHLFFYGKLKNLKGSALMKAVDHSLKSVNLSHGNVGDKQVKKYSGGMKRRLSVAISLIGDPKVVFMDEPSTGMDPASRNNLWNVVKEAKKNRAIILTTHSMEEAEVLCDRLGIFVDGDFQCLGNPKELKARYGGTYIFTVTTPPDQEMEVEHLVRQFSPSANKIYHLSGTQKFELPKQEVKIAHVFDMVEKAKRRLSIHAWGLVDTTLEDVFIKVARGAQVFNEFA

SEQ ID NO: 188750 - protein, 400 aa, Zea Mays
MDSPRGPASFATQANALLRKNLCVQKRNLKTNIGITFFPILICVLLIVLQNVINSELDKPKYKCGCVCLETSANGRCVRKECGIQYSTLDQVGSCPIPSPPQWPALIQIPRADFRAARTFSQPFNDLPDPFCRDSWSCPATVLVTGKDRAVAEAISRGLFPVLSPSLNATDLLDLFSKIVAGSDTQPWYTQLLEPAFFSGRTLYVIQPECTPVMSQTITYNTGGIPFQLSYDFLGTTQYGLGVNVWYNSTYNDNNAYSFISTLRVPRLVNAVSNAYLKLIKGTGVDMLLEFVKDMPKVGTSFQLDLSSLLSVLFFTWIIELLFPVMLTYLVYEKQQKLRIMMKMHGLKDGPYWLISYSYFLALSIVYMLFFMIFGSLIGNCITTLLMNILLWQINLHCLD

SEQ ID NO: 188751 - protein, 493 aa, Zea Mays
MATVIGYMYVFGSGLLGAFLFRFFVEDKTFPYGWTLVMEIVPGFSLYRGLYELGQYAFSGSSIGTTGMTWRSLKDPLNGMRDVMIVMSVEWAVLLILAFYLDQTSLLGGGVRKNPFFCFRCLQKKCATSLHEPSFVQQDSKVILDMEKSDVALERKVVEQFLIDPNANQAIICDNLRKVYHGRDGNPDKLAVRGLSLVLQKGQCFGMLGPNGAGKTSFINMMIGLIKPTSGTAYVHGMDINMDMGDIYTNMGVCPQQNLLWETLTGKEHLFFYGKLKNLKGSALMKAVDHSLKSVNLSHGNVGDKQVKKYSGGMKRRLSVAISLIGDPKVVFMDEPSTGMDPASRNNLWNVVKEAKKNRAIILTTHSMEEAEVLCDRLGIFVDGDFQCLGNPKELKARYGGTYIFTVTTPPDQEMEVEHLVRQFSPSANKIYHLSGTQKFELPKQEVKIAHVFDMVEKAKRRLSIHAWGLVDTTLEDVFIKVARGAQVFNEFA

SEQ ID NO: 188752 - protein, 281 aa, Zea Mays
MDSPRGPASFATQANALLRKNLCVQKRNLKTNIGITFFPILICVLLIVLQNVINSELDKPKYKCGCVCLETSANGRCVRKECGIQYSTLDQVGSCPIPSPPQWPALIQIPRADFRAARTFSQPFNDLPDPFCRDSWSCPATVLVTGKDRAVAEAISRGLFPVLSPSLNATDLLDLFSKIVAGSDTQPWYTQLLEPAFFSGRTLYVIQPECTPVMSQTITYNTGGIPFQLNIQCVEGAPLWRETASIINHEFLKGYRQRGGQINEFIAVWPRCKCLVQLYLQ

SEQ ID NO: 188753 - protein, 735 aa, Zea Mays
MSQTITYNTGGIPFQLNIQCVEGAPLWRETASIINHEFLKGYRQRGGQINEFIAGYDFLGTTQYGLGVNVWYNSTYNDNNAYSFISTLRVPRLVNAVSNAYLKLIKGTGVDMLLEFVKDMPKVGTSFQLDLSSLLSVLFFTWIIELLFPVMLTYLVYEKQQKLRIMMKMHGLKDGPYWLISYSYFLALSIVYMLFFMIFGSLIGLNFFRVNEYSIQAVFFFVCINLQIALAFFVASFFLSVKMATVIGYMYVFGSGLLGAFLFRFFVEDKTFPYGWTLVMEIVPGFSLYRGLYELGQYAFSGSSIGTTGMTWRSLKDPLNGMRDVMIVMSVEWAVLLILAFYLDQTSLLGGGVRKNPFFCFRCLQKKCATSLHEPSFVQQDSKVILDMEKSDVALERKVVEQFLIDPNANQAIICDNLRKVYHGRDGNPDKLAVRGLSLVLQKGQCFGMLGPNGAGKTSFINMMIGLIKPTSGTAYVHGMDINMDMGDIYTNMGVCPQQNLLWETLTGKEHLFFYGKLKNLKGSALMKAVDHSLKSVNLSHGNVGDKQVKKYSGGMKRRLSVAISLIGDPKVVFMDEPSTGMDPASRNNLWNVVKEAKKNRAIILTTHSMEEAEVLCDRLGIFVDGDFQCLGNPKELKARYGGTYIFTVTTPPDQEMEVEHLVRQFSPSANKIYHLSGTQKFELPKQEVKIAHVFDMVEKAKRRLSIHAWGLVDTTLEDVFIKVARGAQVFNEFA

SEQ ID NO: 188754 - protein, 677 aa, Zea Mays
MDSPRGPASFATQANALLRKNLCVQKRNLKTNIGITFFPILICVLLIVLQNVINSELDKPKYKCGCVCLETSANGRCVRKECGIQYSTLDQVGSCPIPSPPQWPALIQIPRADFRAARTFSQPFNDLPDPFCRDSWSCPATVLVTGKDRAVAEAISRGLFPVLSPSLNATDLLDLFSKIVAGSDTQPWYTQLLEPAFFSGRTLYVIQPECTPVMSQTITYNTGGIPFQLNIQCVEGAPLWRETASIINHEFLKGYRQRGGQINEFIAGYDFLGTTQYGLGVNVWYNSTYNDNNAYSFISTLRVPRLVNAVSNAYLKLIKGTGVDMLLEFVKDMPKVGTSFQLDLSSLLSVLFFTWIIELLFPVMLTYLVYEKQQKLRIMMKMHGLKDGPYWLISYSYFLALSIVYMLFFMIFGSLIGLNFFRVNEYSIQAVFFFVCINLQIALAFFVASFFLSVKMATVIGYMYVFGSGLLGAFLFRFFVEDKTFPYGWTLVMEIVPGFSLYRGLYELGQYAFSGSSIGTTGMTWRSLKDPLNGMRDVMIVMSVEWAVLLILAFYLDQTSLLGGGVRKNPFFCFRCLQKKCATSLHEPSFVQQDSKVILDMEKSDVALERKVVEQFLIDPNANQAIICDNLRKVYHGRDGNPDKLAVRGLSLVLQKGQCFGMLGPNGAGKTSFINMV

SEQ ID NO: 188755 - protein, 697 aa, Zea Mays
MSQTITYNTGGIPFQLSYDFLGTTQYGLGVNVWYNSTYNDNNAYSFISTLRVPRLVNAVSNAYLKLIKGTGVDMLLEFVKDMPKVGTSFQLDLSSLLSVLFFTWIIELLFPVMLTYLVYEKQQKLRIMMKMHGLKDGPYWLISYSYFLALSIVYMLFFMIFGSLIGLNFFRVNEYSIQAVFFFVCINLQIALAFFVASFFLSVKMATVIGYMYVFGSGLLGAFLFRFFVEDKTFPYGWTLVMEIVPGFSLYRGLYELGQYAFSGSSIGTTGMTWRSLKDPLNGMRDVMIVMSVEWAVLLILAFYLDQTSLLGGGVRKNPFFCFRCLQKKCATSLHEPSFVQQDSKVILDMEKSDVALERKVVEQFLIDPNANQAIICDNLRKVYHGRDGNPDKLAVRGLSLVLQKGQCFGMLGPNGAGKTSFINMMIGLIKPTSGTAYVHGMDINMDMGDIYTNMGVCPQQNLLWETLTGKEHLFFYGKLKNLKGSALMKAVDHSLKSVNLSHGNVGDKQVKKYSGGMKRRLSVAISLIGDPKVVFMDEPSTGMDPASRNNLWNVVKEAKKNRAIILTTHSMEEAEVLCDRLGIFVDGDFQCLGNPKELKARYGGTYIFTVTTPPDQEMEVEHLVRQFSPSANKIYHLSGTQKFELPKQEVKIAHVFDMVEKAKRRLSIHAWGLVDTTLEDVFIKVARGAQVFNEFA

SEQ ID NO: 188756 - protein, 327 aa, Zea Mays
MYVFGSGLLGAFLFRFFVEDKTFPYGWTLVMEIVPGFSLYRGLYELGQYAFSGSSIGTTGMTWRSLKDPLNGMRDVMIVMSVEWAVLLILAFYLDQTSLLGGGVRKNPFFCFRCLQKKCATSLHEPSFVQQDSKVILDMEKSDVALERKVVEQFLIDPNANQAIICDNLRKVYHGRDGNPDKLAVRGLSLVLQKGQCFGMLGPNGAGKTSFINMMIGLIKPTSGTAYVHGMDINMDMGDIYTNMGVCPQQNLLWETLTGKEHLFFYGKLKNLKGSALMKVHPIQIPLFEHYIHFLVFNGSKSYVIYSSVFFLEIIQLSQSMLQSYFL

SEQ ID NO: 188757 - protein, 436 aa, Zea Mays
MDSPRGPASFATQANALLRKNLCVQKRNLKTNIGITFFPILICVLLIVLQNVINSELDKPKYKCGCVCLETSANGRCVRKECGIQYSTLDQVGSCPIPSPPQWPALIQIPRADFRAARTFSQPFNDLPDPFCRDSWSCPATVLVTGKDRAVAEAISRGLFPVLSPSLNATDLLDLFSKIGSDTQPWYTQLLEPAFFSGRTLYVIQPECTPVMSQTITYNTGGIPFQLNIQCVEGAPLWRETASIINHEFLKGYRQRGGQINEFIAGYDFLGTTQYGLGVNVWYNSTYNDNNAYSFISTLRVPRLVNAVSNAYLKLIKGTGVDMLLEFVKDMPKVGTSFQLDLSSLLSVLFFTWIIELLFPVMLTYLVYEKQQKLRIMMKMHGLKDGPYWLISYSYFLALSIVYMLFFMIFGSLIGNCITTLLMNILLWQINLHCLD

SEQ ID NO: 188758 - protein, 341 aa, Zea Mays
MSQTITYNTGGIPFQLNIQCVEGAPLWRETASIINHEFLKGYRQRGGQINEFIAGYDFLGTTQYGLGVNVWYNSTYNDNNAYSFISTLRVPRLVNAVSNAYLKLIKGTGVDMLLEFVKDMPKVGTSFQLDLSSLLSVLFFTWIIELLFPVMLTYLVYEKQQKLRIMMKMHGLKDGPYWLISYSYFLALSIVYMLFFMIFGSLIGLNFFRVNEYSIQAVFFFVCINLQIALAFFVASFFLSVKMATVIGYMYVFGSGLLGAFLFRFFVEDKTFPYGWTLVMEIVPGFSLYRGLYELGQYAFSGSSIGTTDVYRRNVQHHCMNLALSNRIPKSFSIWRNLMLL

SEQ ID NO: 188759 - protein, 215 aa, Zea Mays
MYVFGSGLLGAFLFRFFVEDKTFPYGWTLVMEIVPGFSLYRGLYELGQYAFSGSSIGTTGMTWRSLKDPLNGMRDVMIVMSVEWAVLLILAFYLDQTSLLGGGVRKNPFFCFRCLQKKCATSLHEPSFVQQDSKVILDMEKSDVALERKVVEQFLIDPNANQAIICDNLRKVYHGRDGNPDKLAVRGLSLVLQKGQCFGMLGPNGAGKTSFINMV

SEQ ID NO: 188760 - protein, 536 aa, Zea Mays
MVLAYFMIAFISAGYDFLGTTQYGLGVNVWYNSTYNDNNAYSFISTLRVPRLVNAVSNAYLKLIKGTGVDMLLEFVKDMPKVGTSFQLDLSSLLSVLFFTWIIELLFPVMLTYLVYEKQQKLRIMMKMHGLKDGPYWLISYSYFLALSIVYMLFFMIFGSLIGLNFFRVNEYSIQAVFFFVCINLQIALAFFVASFFLSVKMATVIGYMYVFGSGLLGAFLFRFFVEDKTFPYGWTLVMEIVPGFSLYRGLYELGQYAFSGSSIGTTGMTWRSLKDPLNGMRDVMIVMSVEWAVLLILAFYLDQTSLLGGGVRKNPFFCFRCLQKKCATSLHEPSFVQQDSKVILDMEKSDVALERKVVEQFLIDPNANQAIICDNLRKVYHGRDGNPDKLAVRGLSLVLQKGQCFGMLGPNGAGKTSFINMMIGLIKPTSGTAYVHGMDINMDMGDIYTNMGVCPQQNLLWETLTGKEHLFFYGKLKNLKGSALMKAVDHSLKSVNLSHGNVGDKQVKKYSGGMKRRLSVAISLIGDPKVVSFFS

SEQ ID NO: 188761 - protein, 303 aa, Zea Mays
MSQTITYNTGGIPFQLSYDFLGTTQYGLGVNVWYNSTYNDNNAYSFISTLRVPRLVNAVSNAYLKLIKGTGVDMLLEFVKDMPKVGTSFQLDLSSLLSVLFFTWIIELLFPVMLTYLVYEKQQKLRIMMKMHGLKDGPYWLISYSYFLALSIVYMLFFMIFGSLIGLNFFRVNEYSIQAVFFFVCINLQIALAFFVASFFLSVKMATVIGYMYVFGSGLLGAFLFRFFVEDKTFPYGWTLVMEIVPGFSLYRGLYELGQYAFSGSSIGTTDVYRRNVQHHCMNLALSNRIPKSFSIWRNLMLL

SEQ ID NO: 188762 - protein, 64 aa, Zea Mays
MHGGSVTYLVDPGNNDSSSRTVVINYAYARDNETLFDIISVKMNLSIDKRCRINNLSTSMIALS

SEQ ID NO: 188763 - protein, 135 aa, Zea Mays
MISPEDPRKWLVKRVVGMHGGSVTYLVDPGNNDSSSRTVVINYAYARDNETLFDIISVKFFRCGDGSGGGAVQRDAGSGERVRDPDPVAPQSSFQAPPPQRSVPTRLLLSLSSCSRFLTGNTTGKPPAHHYVGFY

SEQ ID NO: 188764 - protein, 120 aa, Zea Mays
MQINYAYARDNETLFDIISVKMAAAAGPYKEMLEVVNACATRIRWRLSPASKRRLLNGCAVVVDEQTQLLPNILFLCTRLRPVVLVDYGGTMPQLQENLCGLLYLARQFKLYKVRSVQFG

SEQ ID NO: 188765 - protein, 125 aa, Zea Mays
MHGGSVTYLVDPGNNDSSSRTVVINYAYARDNETLFDIISVKFFRCGDGSGGGAVQRDAGSGERVRDPDPVAPQSSFQAPPPQRLRPVVLVDYGGTMPQLQENLCGLLYLARQFKLYKVRSVQFG

SEQ ID NO: 188766 - protein, 90 aa, Zea Mays
MGAPSPTLSTPATTTPPPEPSCGGGAVQRDAGSGERVRDPDPVAPQSSFQAPPPQRSVPTRLLLSLSSCSRFLTGNTTGKPPAHHYVGFY

SEQ ID NO: 188767 - protein, 105 aa, Zea Mays
MQINYAYARDNETLFDIISVKMAAAAGPYKEMLEVVNACATRIRWRLSPASKRRLLNGCVLWYWSTMVAQCLSYKKIFVACYILPDSSSSTRLGLFSLARKASPT

SEQ ID NO: 188768 - protein, 104 aa, Zea Mays
MQINYAYARDNETLFDIISVKFFRCGDGSGGGAVQRDAGSGERVRDPDPVAPQSSFQAPPPQRLRPVVLVDYGGTMPQLQENLCGLLYLARQFKLYKVRSVQFG

SEQ ID NO: 188769 - protein, 158 aa, Zea Mays
MISPEDPRKWLVKRVVGMHGGSVTYLVDPGNNDSSSRTVVINYAYARDNETLFDIISVKMAAAAGPYKEMLEVVNACATRIRWRLSPASKRRLLNGCAVVVDEQTQLLPNILFLCTRLRPVVLVDYGGTMPQLQENLCGLLYLARQFKLYKVRSVQFG

SEQ ID NO: 188770 - protein, 106 aa, Zea Mays
MISPEDPRKWLVKRVVGMHGGSVTYLVDPGNNDSSSRTVVINYAYARDNETLFDIISVKFFRCGDGSGGGAVQRDAGSGERVRDPDPVAPQSSFQAPPPQRLCCGC

SEQ ID NO: 188771 - protein, 97 aa, Zea Mays
MQINYAYARDNETLFDIISVKFFRCGDGSGGGAVQRDAGSGERVRDPDPVAPQSSFQAPPPQRSVPTRLLLSLSSCSRFLTGNTTGKPPAHHYVGFY

SEQ ID NO: 188772 - protein, 116 aa, Zea Mays
MPKLGCTISFIQEILAVILVMEKHSVLMNDIGQAFATNCNYTTTSSTQAAHERTNNLPDQNYRRMDAESSKVPSQGQGHRLRRLLIAQVAHSGCGSRVTDNPNWFQASSATRMYLL

SEQ ID NO: 188773 - protein, 219 aa, Zea Mays
MVGPGLYTEIGKKTRDLLYKDYQTDHKFTLTTYSSNGVAVTATSTKKADLIFSEIHSQIKNKNMTVDVKANSESNIITTVTVNEIATPGLKTILSFAVPDQRSGKVELQYLHDYAGVNASVSLTANPVANLSAAFGTKALAVGAEISFDSATGNFTKYNAGLMFTHEDLIASLNMNNKGDNLTGAYYHKHTLDPLTVLKVSWGKQNCWGYRHLLVVAVC

SEQ ID NO: 188774 - protein, 365 aa, Zea Mays
MPPPSSSRYSPGRLLAARPASATTVGRWARLSCSLSMNGCAPGAGDRGAVCVRETRALPAAPAPHDAVGRLRAAVDALWSNAAPPAAPSGIIRIEVPITQRVDAVEWLHAQTTLPRCFFSARAPLPDAPALAGNGNGNGSVHRQQPVSVAGVGSAVFFRGTEPFSLADWRAIKRFLPRDCPLVRAYGAIRFDATSDASVEWEDYGSFYFVVPQVEFNELEESSVLATTIAWDDSLSWTWHNAVEELQSTLRKISPCSSVQANKASLQTAIVSLNHVPTKASWDLAVTKALHMIKGRQRELVKVVLARCSRYITDTCIDPVELLACLKAEGQNAYQFCIQPPGAPAFVGNSRGSSWYSGKREDKGR

SEQ ID NO: 188775 - protein, 221 aa, Zea Mays
MPPPSSSRYSPGRLLAARPASATTVGRWARLSCSLSMNGCAPGAGDRGAVCVRETRALPAAPAPHDAVGRLRAAVDALWSNAAPPAAPSGIIRIEVPITQRVDAVEWLHAQTTLPRCFFSARAPLPDAPALAGNGNGNGSVHRQQPVSVAGVGSAVFFRGTEPFSLADWRAIKRFLPRDCPLVRAYGAIRFDATSDASVEWEDYGSFYFVVPQYVGAGRVQ

SEQ ID NO: 188776 - protein, 936 aa, Zea Mays
MESTGSALASVPVDSNTDPMADPKRRAKSNDPRWNYGYWIEIGNRDKVTCNLCKTVTMGGIKRLKEHLAGGYADTLMCSKTTTEIRKEVKAYLDKNKRTRPTFLDDDDHDGQGQQGEEDSTTSMQQPSSGTTAKRKRAAFQFRTTAQPQTSNKEKKKGKLQPCFEELLNKLWMRGAPQGHTTKPPWKHALSLRLTKIMSTSNELCSSMSVVYLLMPLILDSFTLLVRPLLNMVLNMFLLVFMRHGRILSGMREQTGGMDLVRPGATRFVTCFLTLKSLHKHRNHLKELSSYFNDVLERMEPDDAIRSKIDEFAMHSEEQCSPIFSSKLALANIETKSPHAHKKEESIANKRLNDLVFVSYNRKMQNRFQKRRETGGTSYDPLVLDDFDWDNEWVHSSVVHAGRDDDEHNLTWEQVDEAIRASESLRGRNFQDKLMSNLAVNSFFPQWNIWTQFLDDTTAGLKLDSLEESHPIEKALASYIRKFAYSNAKTEDLWAVLEENSGEPIKNMMTTWTKQQGYPVINAKLQGNYLELEQAQFLLDGSSGPRMWIVPITADCGSYYTQKKILLKGKSDRLDIRDIASQCGNQEKGGNFWIKLNINQTGFYRVQYDDKLAAALQNALQAKKLSVMDKIGIVEDSLALSMACKQTLTSLLRLLYAYREEADYSVLSHINTASLSIAKISVDATPGLVGDIKQLLIKLLLPPAVKLGWDLKNGESHLDSLLRPVLLVALVKLGHDKSINEGARRFSIFVHDRNTSLLRPDTRKAAYLAAMQNVTASYRSAYNDLLKVYRESDEAEERGRVLSTLCFCKDENIVLESLNLLFTNEFRKQDAYYVLQGLDVETRDTAWVWLKDNWDRVTRKYGDTQAGGFIRYVVTLFTSNEKAAEFSRFFATRKKPEFERTLKQSLENVRISARWIQGIKSEPRLAQTVQELLRRP

SEQ ID NO: 188777 - protein, 686 aa, Zea Mays
MREQTGGMDLVRPGATRFVTCFLTLKSLHKHRNHLKELSSYFNDVLERMEPDDAIRSKIDEFAMHSEEQCSPIFSSKLALANIETKSPHAHKKEESIANKRLNDLVFVSYNRKMQNRFQKRRETGGTSYDPLVLDDFDWDNEWVHSSVVHAGRDDDEHNLTWEQVDEAIRASESLRGRNFQDKLMSNLAVNSFFPQWNIWTQFLDDTTAGLKLDSLEESHPIEKALASYIRKFAYSNAKTEDLWAVLEENSGEPIKNMMTTWTKQQGYPVINAKLQGNYLELEQAQFLLDGSSGPRMWIVPITADCGSYYTQKKILLKGKSDRLDIRDIASQCGNQEKGGNFWIKLNINQTGFYRVQYDDKLAAALQNALQAKKLSVMDKIGIVEDSLALSMACKQTLTSLLRLLYAYREEADYSVLSHINTASLSIAKISVDATPGLVGDIKQLLIKLLLPPAVKLGWDLKNGESHLDSLLRPVLLVALVKLGHDKSINEGARRFSIFVHDRNTSLLRPDTRKAAYLAAMQNVTASYRSAYNDLLKVYRESDEAEERGRVLSTLCFCKDENIVLESLNLLFTNEFRKQDAYYVLQGLDVETRDTAWVWLKDNWDRVTRKYGDTQAGGFIRYVVTLFTSNEKAAEFSRFFATRKKPEFERTLKQSLENVRISARWIQGIKSEPRLAQTVQELLRRP

SEQ ID NO: 188778 - protein, 244 aa, Zea Mays
MESSKQSIAITVAHELAHQWFGNLVTMEWWTHLWLNEGFATWMSNLAVNSFFPQWNIWTQFLDDTTAGLKLDSLEESHPIEKALASYIRKFAYSNAKTEDLWAVLEENSGEPIKNMMTTWTKQQGYPVINAKLQGNYLELEQAQFLLDGSSGPRMWIVPITADCGSYYTQKKILLKGKSDRLDIRDIASQCGNQEKGGNFWIKLNINQTGFYRVQYDDKLAAALQNALQAKKLSVMDKIGKNHM

SEQ ID NO: 188779 - protein, 518 aa, Zea Mays
MEWWTHLWLNEGFATWMSNLAVNSFFPQWNIWTQFLDDTTAGLKLDSLEESHPIEKALASYIRKFAYSNAKTEDLWAVLEENSGEPIKNMMTTWTKQQGYPVINAKLQGNYLELEQAQFLLDGSSGPRMWIVPITADCGSYYTQKKILLKGKSDRLDIRDIASQCGNQEKGGNFWIKLNINQTGFYRVQYDDKLAAALQNALQAKKLSVMDKIGIVEDSLALSMACKQTLTSLLRLLYAYREEADYSVLSHINTASLSIAKISVDATPGLVGDIKQLLIKLLLPPAVKLGWDLKNGESHLDSLLRPVLLVALVKLGHDKSINEGARRFSIFVHDRNTSLLRPDTRKAAYLAAMQNVTASYRSAYNDLLKVYRESDEAEERGRVLSTLCFCKDENIVLESLNLLFTNEFRKQDAYYVLQGLDVETRDTAWVWLKDNWDRVTRKYGDTQAGGFIRYVVTLFTSNEKAAEFSRFFATRKKPEFERTLKQSLENVRISARWIQGIKSEPRLAQTVQELLRRP

SEQ ID NO: 188780 - protein, 567 aa, Zea Mays
MPGAGVEPPSPPAEAAAWLPPRRLRPGRVSAKRCWPPGCGRFPSPPPAPASAAEAGPEVEAPAPVSPAPESGAPPADKVEEVADPAAVSPACQNCAPPQQEENKVEVVAAILPAAHSSALPHALTEKDQQNVVIRENGEAQLLGDAGKLSLDGQQGNNVVQVAVLGSSSTVGASYLQNGDKGGGLLVAEEKGRGGSSDVGQEVAVNGDVSEIANKTGTGELQRKENGTAGSRTKRWFVSSLNPPPKRREVSAVRRFPPGCGRTAVTTTDSGVLEVSPISTFAPGHGRSGVNTTGSGNEGLPSEATPVNNNDALVASSVLGELASPTSALEASNKKLESKRIVGEGHSKAHNKVQVQDDFAGTKQDGGQRNVVPKATPRSVSDGKMKGKLPAHKANQVAQEVMVGKMKNKLDGSFQRSNLRTPLSNPIDAKTKVKRSDSDKMNAGVHGNAGASAGGKMENKTLSAKKEVGFPNMNTKQKKVAPKLKGDVIGKDNMHLSARELKLGKYVATDHTEEPKKQIIVQALMAPDNCPWARGRKSIASAFKSLGPMNKAKGKDASASKQCSRKC

SEQ ID NO: 188781 - protein, 581 aa, Zea Mays
MALLLPPPALSTTPPFLSAPRPARLPCLRCTRTTTATSSVSTCPPASTSSPSTSSPVASDGAVGRKSKNKSRPLKPSFEEQALRRWSARAPSQRASVPWEQPQQQSPLPPSLPHRAGRGSGDAGDQKRSGGGSSATLRSIVDYFAGGSSDDEGVRVEEGACDTTAVPDQAAREQDDGSHFRPSYLLGSHPFSAPWIHREESTNDRGVSGPVAEEEERLDIRDASDDELGLVDEDKEETDNGEELLTGGLEDEFYDDYATPTMNSSYGVDLSVDKDAYGSRFDRSMMQSSVNTIVKTLRNSMEESDPNATVELSNAEDFVQKLGPALLPWEREEEDDEAFSGGRAVRRSNTELAERSIPEPELRRLRDTALRMKERIKVGPGGVTQDIVESIHRKWKVDEVVKMRFEGPPSLNMKRTHDLLEDRTGGVVIWRSGRSVVLYRGMNYNFQCVQSYAKFIEIDSGKGVSDANSAVLSHDGHNLQASRADGMKSLTSTGNFSLESSETFDIDNFLDQLGPRYKDWSGRGPIPVDADLLPGVVHGYKPPFRVLPYKIKSTLRDKEMTTLRRLARQTAPHFALENTKA

SEQ ID NO: 188782 - protein, 969 aa, Zea Mays
MALLLPPPALSTTPPFLSAPRPARLPCLRCTRTTTATSSVSTCPPASTSSPSTSSPVASDGAVGRKSKNKSRPLKPSFEEQALRRWSARAPSQRASVPWEQPQQQSPLPPSLPHRAGRGSGDAGDQKRSGGGSSATLRSIVDYFAGGSSDDEGVRVEEGACDTTAVPDQAAREQDDGSHFRPSYLLGSHPFSAPWIHREESTNDRGVSGPVAEEEERLDIRDASDDELGLVDEDKEETDNGEELLTGGLEDEFYDDYATPTMNSSYGVDLSVDKDAYGSRFDRSMMQSSVNTIVKTLRNSMEESDPNATVELSNAEDFVQKLGPALLPWEREEEDDEAFSGGRAVRRSNTELAERSIPEPELRRLRDTALRMKERIKVGPGGVTQDIVESIHRKWKVDEVVKMRFEGPPSLNMKRTHDLLEDRTGGVVIWRSGRSVVLYRGMNYNFQCVQSYAKFIEIDSGKGVSDANSAVLSHDGHNLQASRADGMKSLTSTGNFSLESSETFDIDNFLDQLGPRYKDWSGRGPIPVDADLLPGVVHGYKPPFRVLPYKIKSTLRDKEMTTLRRLARQTAPHFALGRNREHQGLAAAMVKLWEKSAIAKIAIKRGIPNTCNDRMAEEIKKLTGGVLLSRNKEFIVFYRGNDFIAPKVRQVLVEKQEQAITQQDEEELARLKASASIITIPKDIKGPLVAGTLAETTEAKSRWGKSVNDKQREEEMKHLSLLKHTSLLKNLKRKLILAKTKVAKAEKALAKVQEFLTPAELPTDLETVTDEERFLFRRIGLKMRAFLMLGRREVFDGTVQNMHLHWKHRELVKIVVRGKSFAQAKHIAISLEAESEGVLISLDKTTKGYVIIFYRGKNYRRPQIMKPRNLLTRRQALARSIELQRREALKHHISSLQGKISKLQSQLVQTKVASEKHDLKLLQTVEDDFSSSDDDVELIMCQDDGEEAYLQTYSSADEEDAEDDANEYI

SEQ ID NO: 188783 - protein, 376 aa, Zea Mays
MPRAATGAITAAFLRAQAPHMAPLASRIARAFPGLATAAATRFAPSSSASSPRLGLVPRLRSARSFSGARASPVSGAVSGSSTSEEGQQLQSELIFLGTGTSEGIPRVSCLTHPTKICPVCTKAAEPGNPNRRRNTSILLRHATPSGTTNIVVDAGKFFYHSALQWFPTFGLRTIDGVIITHSHADAIGGLDCLRDWTNNVQSSIPIYVAERDYEVMKMTHYYLIDTSVVIPGAAVSALQFNIIKEEPFMVHNLEVIPLPVWHGQGYRSLGFRFGDVCYISDVSDIPEETYKLLENCELLIMDALRPDRSSSTHFGLPRALEEVRKIKPKKTLFTGMMHLMDHEKVNSDLARLIGTDGLDIQLSYDGLRIPVCAIW

SEQ ID NO: 188784 - protein, 398 aa, Zea Mays
MPRAATGAITAAFLRAQAPHMAPLASRIARAFPGLATAAATRFAPSSSASSPRLGLVPRLRSARSFSGARASPVSGAVSGSSTSEEGQQLQSELIFLGTGTSEGIPRVSCLTHPTKICPVCTKAAEPGNPNRRRNTSILLRHATPSGTTNIVVDAGKFFYHSALQWFPTFGLRTIDGVIITHSHADAIGGLDCLRDWTNNVQSSIPIYVAERDYEVMKMTHYYLIDTSVVIPGAAVSALQFNIIKEEPFMVHNLEVIPLPVWHGQGYRSLGFRFGDVCYISDVSDIPEETYKLLENCELLIMDALRPDRSSSTHFGLPRALEEVRKIKPKKTLFTGMMHLMDHEKVNSDLARLIGTDGLDIQLSYDGLRIPGIAMADLSRHDSMVAVDTLRRLTKPAA

SEQ ID NO: 188785 - protein, 285 aa, Zea Mays
MAATSPAPAPPRILLAGDAHGRLHQLFKRVKSVNQSTGPFHALLCVGQFFSPEGAAEGSPEDVTDYLEGRASVPIPTYFTGDYGPAAPRLLSKAAAGARGFAPGGIEICPNVFWLRGSNRFTLHGLSVVYLSGRKGLGGPGCYSQDDVDALRALAEEPGIDDLFLTNEWPTGVVSGSDTSNVPNQVLDPNGYDPIVAELVAEIKPRYHIAGTKGVFYSREPYVNDSAAHVTRFIGLANVGNKEKQHLSCPVLISMPSLQTPLCHHMLVQQNQFLSKKLQNVQRRT

SEQ ID NO: 188786 - protein, 208 aa, Zea Mays
MSSADINAKPPNATLSPYVGSAKSVPIEEAPKRAAENIDSQYWRYDVKRQRHGEAGGGGLCFKFVSSGSCQRGSRCSYRHDEEAVEHYQRNVCFDFLNKGKCERGPECKFVHSLSGETALRDARPPSERRRVESSCWFCLSSPDVESHLVISIGEGYYCTLAKGPLVPNHVLMIPVEHCPSTLMMPPEAEAELGRYKIALSMDASHLI

SEQ ID NO: 188787 - protein, 415 aa, Zea Mays
MAATSPAPAPPRILLAGDAHGRLHQLFKRVKSVNQSTGPFHALLCVGQFFSPEGAAEGSPEDVTDYLEGRASVPIPTYFTGDYGPAAPRLLSKAAAGARGFAPGGIEICPNVFWLRGSNRFTLHGLSVVYLSGRKGLGGPGCYSQDDVDALRALAEEPGIDDLFLTNEWPTGVVSGSDTSNVPNQVLDPNGYDPIVAELVAEIKPRYHIAGTKGVFYSREPYVNDSAAHVTRFIGLANVGNKEKQKFIHAISPTPASVMSSADINAKPPNATLSPYVGSAKSVPIEEAPKRAAENIDSQYWRYDVKRQRHGEAGGGGLCFKFVSSGSCQRGSRCSYRHDEEAVEHYQRNVCFDFLNKGKCERGPECKFVHSLSGETALRDARPPSERRRVESSCWFCLSSPDVESHLVISIGEVH

SEQ ID NO: 188788 - protein, 457 aa, Zea Mays
MWLQQMLTLRPIPVMRRCFPRGFRKKGANEAKCPHLETRIGCPASLTIRLTANGKYHLIEFVPNHNHQLAIASTIHMLKAKKIRHKARVVRENLTDDTVSTPDFENEDEAYEYYRYALQGYDMPLALSVNHHKQTIIFGAAIIHDESKEAFQWLLDTFKMAMNGTHPKTLLIDRSVALNEAVTAHRYCVWQIYQNALQQLSQAFHGSKTLDCNFKRCLFDCEDEFVTACKEMLENVQQKESLTSELKKHLSLECDLLNFFEQFERLLCDRQSTEMEAEPRDHFVKFDSLNSTMDCTCKTFELIGIPCRHMLEQCHCDRSATVTIYEFDLVGSALAGRGNGSALAGCGNLDGSDLVGRGNFAGSDLADRGNIAGFGLAELDNLAGSGLADRGNLAGSGLAEGGNLVGSGLVEGGNLAGSGLGDRGNIADFGLAEFDNLAGSVLVDRGNLPGSGLVFFW

SEQ ID NO: 188789 - protein, 225 aa, Zea Mays
MKSVQQKESLTSELKKHLSLECDLLNFFEQFERLLCDRQSTEMEAEPRDHFVKFDSLNSTMDCTCKTFELIGIPCRHMLEQCHCDRSATVTIYEFDLVGSALAGRGNGSALAGCGNLDGSDLVGRGNFAGSDLADRGNIAGFGLAELDNLAGSGLADRGNLAGSGLAEGGNLVGSGLVEGGNLAGSGLGDRGNIADFGLAEFDNLAGSVLVDRGNLPGSGLVFFW

SEQ ID NO: 188790 - protein, 179 aa, Zea Mays
MERAVRTSAVVKLLTRSLLSGVLQPGRHLTVTTGTASAIAGTSSWPSTAALPSRSVVADLLDAIETNRAVPRCGGSGGDGGLGLGWWNLNVEGVMLLLRVVQAVRGRNNLAAPAPGGKRPRDEGPAGRDTMRGGVVGGSSAARRWCGAGGRPGKIGNAPLAPVAVGSRPSSNRCLIDDR

SEQ ID NO: 188791 - protein, 351 aa, Zea Mays
MAEAGRRTLALVNLAAIMERADEALLPAVYREVGAALGATPVALGALTLYRSAVQAACYPLAAYAAVRYNRAHVVAVGAVLWAAATFLVAVSDTFAQQVAIARCLNGIGLALVTPAIQSLVADCSDDNTRGAAFGWLQLTGNIGSIIGGLFSLMLAPTTVMGIAGWRVAFHIVAVISVVVGVLVGLFAVDPHFLHVESGEQLLRKSAWAEMKDLVREAKAVVKISSFQIIVAQGVTGSFPWSALAFAPMWLELMGFTHNRTGLLMVTFALASSLGGLLGGKMGDHFATRFPNSGRIVLSQISSASAIPLAALLLLGLPDNSSGSLHGLVMFIMGLSISWNGPATNKQPDIC

SEQ ID NO: 188792 - protein, 309 aa, Zea Mays
MAEAGRRTLALVNLAAIMERADEALLPAVYREVGAALGATPVALGALTLYRSAVQAACYPLAAYAAVRYNRAHVVAVGAVLWAAATFLVAVSDTFAQVAIARCLNGIGLALVTPAIQSLVADCSDDNTRGAAFGWLQLTGNIGSIIVDPHFLHVESGEQLLRKSAWAEMKDLVREAKAVVKISSFQIIVAQGVTGSFPWSALAFAPMWLELMGFTHNRTGLLMVTFALASSLGGLLGGKMGDHFATRFPNSGRIVLSQISSASAIPLAALLLLGLPDNSSGSLHGLVMFIMGLSISWNGPATNKQPDIC

SEQ ID NO: 188793 - protein, 383 aa, Zea Mays
MNPGHCSQHLHRRTFPRKSRCSREKRTPPALACSPVCTLEAGAGALLASGQSTARVGHGGGGEADACAGEPGGHHGARRRGAAARGVPGGGRSAGRHARGTRRAHALPLSRAGRLLPAGRLRRRALQPRPRSRRWGRSLGRRHLPRRRLRHLCPDCSDDNTRGAAFGWLQLTGNIGSIIGGLFSLMLAPTTVMGIAGWRVAFHIVAVISVVVGVLVGLFAVDPHFLHVESGEQLLRKSAWAEMKDLVREAKAVVKISSFQIIVAQGVTGSFPWSALAFAPMWLELMGFTHNRTGLLMVTFALASSLGGLLGGKMGDHFATRFPNSGRIVLSQISSASAIPLAALLLLGLPDNSSGSLHGLVMFIMGLSISWNGPATNKQPDIC

SEQ ID NO: 188794 - protein, 92 aa, Zea Mays
MAAISQQLSKQASSQATGGRSGSSLLGRIFIFTARLWFEYSRVAYDTWAILHVGCYVSDGVRYAGKLGKQAKATSDERARRGSWGASHWLVN

SEQ ID NO: 188795 - protein, 94 aa, Zea Mays
MTISVSASQDNNSFDLEFVVPGDESAGPTPKRIAWSARGSQRCGHGCVGSGGQGWSVATDVAVPLGHQVLRLASQADESQDLSSGRGRGYASAE

SEQ ID NO: 188796 - protein, 92 aa, Zea Mays
MPLVTCLILVRLLFFFLSLFSRSSPHSLLCSSSVLHSPAPTSPQRSSPHRTTCPTVTDVVPTSPLQCNPRPCVRRGHAAGGGGNEDELILSS

SEQ ID NO: 188797 - protein, 260 aa, Zea Mays
MAKAARPTAQHGNMVWSARMASASGSGCASTGASLAAANTLVVVVQETTPVNRGGEGEDGERTTDIGVKESDTKKRKPKRPTSGVWDYFIKSTVTEKGDKGKTEEQIWAKCKKCKFKTRGESSRGTTVFWNHLKSRHYIHKGRQELQVQKGEGNNDIVQNFKYDPEASLRKFHMAIVMHEYPFKMVEHEYFVDFMKSLHPHFTFLCRTTTRNEIMTMYMDEKKKLFEQLKSLSCRFSATMDMWTSNENKGYMSITIHWID

SEQ ID NO: 188798 - protein, 180 aa, Zea Mays
MASASGSGCASTGASLAAANTLVVVVQETTPVNRGGEGEDGERTTDIGVKESDTKKRKPKRPTSGVWDYFIKSTVTEKGDKGKTEEQIWAKCKKCKFKTRGESSRGTTVFWNHLKSRHYIHKGRQELQVQKDRNDKVPSILEEFMADENEYSSTIEEGHNQADNEGNGEDSEDEGSDMEL

SEQ ID NO: 188799 - protein, 319 aa, Zea Mays
MDLEPGTMDSVRSGPFGQIFRPDNFVFQSGAGNNWAKGHYTEGANNNRNRTRHPRSKSRCSLSKRGEEAGQLSRSASESSSSAGSIGRTPSGRRAGRRGSDVDGDRSSRESFEAQDQKRSMHEISRGERRSWSGQKRKPEPLVEKKSVRAAAEEFFAKASQELIGHSDCRTILLKNVIGHYSEDILRFDMHSVNQLPVPLVPLIGKGVLEEEVMVSFVATNGEPTTTTTSKLVWWNLLEQMTMTPTSCTSVMLSTRTRAPLLRALYKAGSIIVLGKTDFLRPDMSVHRQVIDNGILPILVKIEKKKEKLLSEKMEVIKV

SEQ ID NO: 188800 - protein, 85 aa, Zea Mays
MQAVMQGRMRTTDHRIGAPSTSCSWALRGTAPGADLQREFEDDPDLYVLKPLKYIGIEVWQAPCRLISQTYASKSWFSFQQHSDL

SEQ ID NO: 188801 - protein, 136 aa, Zea Mays
MQAVMQGRMRTTDHRIGAPSTSCSWALRGTAPGADLQREFEDDPDLYVLKPLKHRVDLYLKRMQVKAGSVFNNILICDDPEYARKVVEETWGANREAEKEAFEEAEKERKAREDRRNIIVSTHDIQIVMDTWHHIS

SEQ ID NO: 188802 - protein, 363 aa, Zea Mays
MATTLHKPLGAITVDDLAAAAPGSDATALHAALRRALDSHGPTEVWGELCRSVLCPSVPFAVHRMLYYGCFAGFPSPTPPAWTPDPKESVLTNVGRVLEARGRNLIGDAYKDPITSFPDLHKFSNENPEAYWKMVFEDMGIQFSVEPSCIWRENTAYPGGEWLPGAELNAAVNCLTAKPGRSSDGPAIVWRDEGKDSDPLNFMSLEDLRKKVCLVANAIDALELPKGSAIAIDMPMDVNAVVIYLAIVLAGYVVVSIADSFAAPAISMRLKLSEAKAIFTQDYILRDDKELPLYSRVVEAKAPMAIVIPVRGSLLIKGLRVDDLSWQDFLGRVNYTEAENYTAVNQPAYAFTNILFSSGTTGC

SEQ ID NO: 188803 - protein, 468 aa, Zea Mays
MATTLHKPLGAITVDDLAAAAPGSDATALHAALRRALDSHGPTEVWGELCRSVLCPSVPFAVHRMLYYGCFAGFPSPTPPAWTPDPKESVLTNVGRVLEARGRNLIGDAYKDPITSFPDLHKFSNENPEAYWKMVFEDMGIQFSVEPSCIWRENTAYPGGEWLPGAELNAAVNCLTAKPGRSSDGPAIVWRDEGKDSDPLNFMSLEDLRKKVCLVANAIDALELPKGSAIAIDMPMDVNAVVIYLAIVLAGYVVVSIADSFAAPAISMRLKLSEAKAIFTQDYILRDDKELPLYSRVVEAKAPMAIVIPVRGSLLIKGLRVDDLSWQDFLGRVNYTEAENYTAVNQPAYAFTNILFSSGTTGEPKAIPWTHITPLKAAADGWCHMDIRKGDVVAWPTNLGWMMGPWLVYASLLNGASMALYNGSPNSSGFAKFVQHRSYLEEYGLYSWTRLVLHPVIFKLLNYPDLLS

SEQ ID NO: 188804 - protein, 365 aa, Zea Mays
MQLLGEPKAIPWTHITPLKAAADGWCHMDIRKGDVVAWPTNLGWMMGPWLVYASLLNGASMALYNGSPNSSGFAKFVQDAKVTMLGLVPSIVRTWKNTDCTAGLDWSSIRCFSSSGEASSVDDYLWLMGRAGYKPVIEYCGGTEIGGGFVTGSMLQPQALSAFSTPAMGCNLFILDSSGNPLPQDSVGIGELALDPTLFGSSTTLLNADHQEVYFNGMPEWHGKILRRHGDEFERTSDGYYRAHGRADDTMNLGGIKVSSIEIERICNRVHDAILETAAIGVPPVGGGPEQLTIAVVLKDQSSQIEDLNQLKLACNMALKKLNPLFKVSSVVIVPSLPRTASNKVMRRVLRKEFSQAAQAKHSKI

SEQ ID NO: 188805 - protein, 254 aa, Zea Mays
MQATAASFLARPLPRLRRIGSWGADAAVVREGVIALPLRLRGPRCSISLSIGAGAGAGAEADHEFSYEHVPVFPRYRIRDPYKLLGVDRDASEEEIRGARNFLIQQYAGHEPSEEAIEGAYEKIIMKSYQQRKKTKINLKTKLKKRVEESPSWVKALLGCFEVPSMDIISRRLFFFAFIAGWSIATSAENGPAFQLAISLFSCIYFLNEKMKNLLRASTTGFGILVGGWIIGSLLVPLVPTFIIPPSWQVREIV

SEQ ID NO: 188806 - protein, 478 aa, Zea Mays
MGLRVWVVEEQTHAHVPVGFPFEPINKPMGREIGPNTYPNRAKTHRVSGSGYSLPSLDRTYWYRRSFLLLTHMKKFLRTMRGTQGALLVASTIQIILGFSGLWRNVVKLLSPLAAVPLVSLVGFGLYELGFPGVAKCVEVGLPELLLLVVFSQYLPQVLDFGKSVFSRFSVLFTVAIVWLYAYILTIGGAYKNSPPKTQVHCRVDRSGLISGAPWISVPYPFQWGAPTFDAGEAFAMMMTSFIALVESTGAFIGASRYASATMIPPSIISRGVGWQGIGLLLDSFFGTANGTSVSVENIGLLALTRIGSRRVVQISAGFMIFFSVLGKFGALFASIPLPVFAGMYCLFFAYVGGVGLSLLQFCNLNSFRTKFIMGFAFFMGLSVPQYFNEYTAVASYGPVHTGARWFNDMINVPFTSKPFVAGLVAYILDNTLQVKESAVRKDRGNHWWEKFRSFKKDARSQEFYSLPFNLNKFFPSV

SEQ ID NO: 188807 - protein, 354 aa, Zea Mays
MAAAPPPKADELQPFPPKEQLPGVAFCITSPPPWPEAILLGFQHFVVMLGTTVIIPSALVPQMGGGNEEKARVVQTILFVAGINTLFQTLFGTRLPVVMGGSYVFVGPTISIVLAGRYSNEADPHEKFLRTMRGTQGALLVASTIQIILGFSGLWRNVVKLLSPLAAVPLVSLVGFGLYELGFPGVAKCVEVGLPELLLLVVFSQYLPQVLDFGKSVFSRFSVLFTVAIVWLYAYILTIGGAYKNSPPKTQVHCRVDRSGLISGAPWISVPYPFQWGAPTFDAGEAFAMMMTSFIALVESTGAFIGASRYASATMIPPSIISRGVGWQMRNTLVRALVCCSIHFSGQRTGHRFQ

SEQ ID NO: 188808 - protein, 520 aa, Zea Mays
MAAAPPPKADELQPFPPKEQLPGVAFCITSPPPWPEAILLGFQHFVVMLGTTVIIPSALVPQMGGGNEEKARVVQTILFVAGINTLFQTLFGTRLPVVMGGSYVFVGPTISIVLAGRYSNEADPHEGALLVASTIQIILGFSGLWRNVVKLLSPLAAVPLVSLVGFGLYELGFPGVAKCVEVGLPELLLLVVFSQYLPQVLDFGKSVFSRFSVLFTVAIVWLYAYILTIGGAYKNSPPKTQVHCRVDRSGLISGAPWISVPYPFQWGAPTFDAGEAFAMMMTSFIALVESTGAFIGASRYASATMIPPSIISRGVGWQGIGLLLDSFFGTANGTSVSVENIGLLALTRIGSRRVVQISAGFMIFFSVLGKFGALFASIPLPVFAGMYCLFFAYVGGVGLSLLQFCNLNSFRTKFIMGFAFFMGLSVPQYFNEYTAVASYGPVHTGARWFNDMINVPFTSKPFVAGLVAYILDNTLQVKESAVRKDRGNHWWEKFRSFKKDARSQEFYSLPFNLNKFFPSV

SEQ ID NO: 188809 - protein, 547 aa, Zea Mays
MQSAPVSWDLHRSSFSVFNLSALAHVCCCNSAYGFLRIFSYYDSCFPERKKAEAILLGFQHFVVMLGTTVIIPSALVPQMGGGNEEKARVVQTILFVAGINTLFQTLFGTRLPVVMGGSYVFVGPTISIVLAGRYSNEADPHEKFLRTMRGTQGALLVASTIQIILGFSGLWRNVVKLLSPLAAVPLVSLVGFGLYELGFPGVAKCVEVGLPELLLLVVFSQYLPQVLDFGKSVFSRFSVLFTVAIVWLYAYILTIGGAYKNSPPKTQVHCRVDRSGLISGAPWISVPYPFQWGAPTFDAGEAFAMMMTSFIALVESTGAFIGASRYASATMIPPSIISRGVGWQGIGLLLDSFFGTANGTSVSVENIGLLALTRIGSRRVVQISAGFMIFFSVLGKFGALFASIPLPVFAGMYCLFFAYVGGVGLSLLQFCNLNSFRTKFIMGFAFFMGLSVPQYFNEYTAVASYGPVHTGARWFNDMINVPFTSKPFVAGLVAYILDNTLQVKESAVRKDRGNHWWEKFRSFKKDARSQEFYSLPFNLNKFFPSV

SEQ ID NO: 188810 - protein, 550 aa, Zea Mays
MALHHLRLAPLALLRAASLPPLASSRIAARGHRRVLLFAPPSWPWRLLSPGARPRALATAAAEADDATSGSGNEFFAESTSWASLGVSERLASALCSAGLSRPSLVQATCIPHVLMANDVIVAAETDDNCQDTTPGAHDMVLVLCPNVMLCEQVVRMANSLLDESGKPLKRAAAVCGPNGWPAVHPDILVATPAALLNYLFDYDPEKRRRERFMRNVKFVVFDEADMLLCGSFENQVIRLINMLRFDEKLLSRAQDSGKDISLGSDDEYHEDSKFETAEFGSSDKEIEDNIVEDRLVKLENSHVGAHKDWRRVRKIYRRSKQYVFVAATLPQSGKKTAGGVLQRMFPDAVWVSGTYLHRHNPRLERRWIEVTADTQVDALLNAVKYGLKSEVHDAKDVPRRTMVFTNTVDAANSVSDILHRVGIPCILYHRESSLKERANNLQSFRENGGVLVCTDAAARGLDVPNVSHVIQAEFAACAVDFLHRVGRTARAGQSGIVTSLYTEANRDLVRAVRQAEELAQPVEGAFSRKRSFRNKLKKQALQKREALLS

SEQ ID NO: 188811 - protein, 651 aa, Zea Mays
MALHHLRLAPLALLRAASLPPLASSRIAARGHRRVLLFAPPSWPWRLLSPGARPRALATAAAEADDATSGSGNEFFAESTSWASLGVSERLASALCSAGLSRPSLVQATCIPHVLMANDVIVAAETGSGKTHGYLVPLIEKLCSKSSTTKDDNCQDTTPGAHDMVLVLCPNVMLCEQVVRMANSLLDESGKPLKRAAAVCGPNGWPAVHPDILVATPAALLNYLFDYDPEKRRRERFMRNVKFVVFDEADMLLCGSFENQVIRLINMLRFDEKLLSRAQDSGKDISLGSDDEYHEDSKFETAEFGSSDKEIEDNIVEDRLVKLENSHVGAHKDWRRVRKIYRRSKQYVFVAATLPQSGKKTAGGVLQRMFPDAVWVSGTYLHRHNPRSVKESVGSAPDSVPVDSNTDPMADPKRRAKSCKTVTTGGIKRLKKHLAGGHADTLMCSKTTTEIRKEMKAYLDKNKRLERRWIEVTADTQVDALLNAVKYGLKSEVHDAKDVPRRTMVFTNTVDAANSVSDILHRVGIPCILYHRESSLKERANNLQSFRENGGVLVCTDAAARGLDVPNVSHVIQAEFAACAVDFLHRVGRTARAGQSGIVTSLYTEANRDLVRAVRQAEELAQPVEGAFSRKRSFRNKLKKQALQKREALLS

SEQ ID NO: 188812 - protein, 392 aa, Zea Mays
MALHHLRLAPLALLRAASLPPLASSRIAARGHRRVLLFAPPSWPWRLLSPGARPRALATAAAEADDATSGSGNEFFAESTSWASLGVSERLASALCSAGLSRPSLVQATCIPHVLMANDVIVAAETGSGKTHGYLVPLIEKLCSKSSTTKDDNCQDTTPGAHDMVLVLCPNVMLCEQVVRMANSLLDESGKPLKRAAAVCGPNGWPAVHPDILVATPAALLNYLFDYDPEKRRRERFMRNVKFVVFDEADMLLCGSFENQVIRLINMLRFDEKLLSRAQDSGKDISLGSDDEYHEDSKFETAEFGSSDKEIEDNIVEDRLVKLENSHVGAHKDWRRVRKIYRRSKQYVFVAATLPQSGKKTAGGVLQRMFPDAVWVSGTYLHRHNPRVQGVA

SEQ ID NO: 188813 - protein, 158 aa, Zea Mays
MAKTKQGKRDVDAYTIKGTNKVVRVGDCVLMRPADTDNPPYVARVERMESDGRGSVRVRVRWYYRPEEAKGGRRPFHGAKELFLSDHFDTQSAHTIEGKCIVHSFKSYTKLDNVGPEDFYCRFDYKAATGAFTPDRVACEMPYNPDDLMVQCEGCKDW

SEQ ID NO: 188814 - protein, 406 aa, Zea Mays
MAASSPRKRLPAARLIFALLLMSSVLPRDAGAVELGLKLPFSPGDVLPVLPRQVAWPVMNTLHSAVDLLPSFVAAVAPGAPAPAAWKGACFSENEAAIELTPGDRNGTDVGGAVLRLKTASAHSWACMDLYVFATPYRITWDYYFAAREHTLEIKSWEEEAELKYVKEHGISIFLMPSGMLGTLLSLIDVLPLFSNTAWGQHSNLAFLEKHMGASFEKRTQPWVANIRKEDIQSGDFLALSKIRGRWGGFETLEKWVTGAFAGHTSVCLKDEKGDLWVAESGYENEKGEEIIAIVPWDEWWAMALKDESNPQIALLPLHPDVRARFNESAAWEYARSMVGNPYGYHNMIFSWIDTIGDNYPPPLDANLVMAVMSMWTRLQPVYAANMWNEALNKRLGTEGSSTVMY

SEQ ID NO: 188815 - protein, 277 aa, Zea Mays
MDLYVFATPYRITWDYYFAAREHTLEIKSWEEEAELKYVKEHGISIFLMPSGMLGTLLSLIDVLPLFSNTAWGQHSNLAFLEKHMGASFEKRTQPWVANIRKEDIQSGDFLALSKIRGRWGGFETLEKWVTGAFAGHTSVCLKDEKGDLWVAESGYENEKGEEIIAIVPWDEWWAMALKDESNPQIALLPLHPDVRARFNESAAWEYARSMVGNPYGYHNMIFSWIDTIGDNYPPPLDANLVMAVMSMWTRLQPVYAANMWNEALNKRLGTEVVDYC

SEQ ID NO: 188816 - protein, 129 aa, Zea Mays
MEIERRGMSFDQLLTIPEQDEWVYSDGKSTTCVAFILAMYKEAGIFTPFSESIQVTEFTIRDAYMLKIFEDNPARLPGWCNAGTDKLPFCQILGEYRMELPEYNTIEPYAKMNENCPSLPPTYKRPARC

SEQ ID NO: 188817 - protein, 457 aa, Zea Mays
MPTPLAAALLPLPASPALHFPRPRPGPSWRARPAVVRAAALRALPRRLELCPPCLAAVESNPAPPPLAPPPPDEASAGSGLDARAGGGGGGGDGGGGADLGWLRAFPHVFTASMANFLFGYHIGVMNGPIEDIATQLGFQGNPFLQGLVVSIFIVGAFFGSLGSSALVDKFGCKRTLQIDSIPLIIGALLSAQADSLDEMLLGRFLVGIGIGVNTVLVPIYISEVAPTKYRGTLGTLCQIGTCLGIIAALSLGIPSESDPHWWRTMLYAACVPGILIVAGMQFAVESPRWLAKVGRFDDARKVVESLWEPSEVEKSMEEIKAVVLNDDSRGSWSDLLVEPHNRVALIGGSLFFLQQFAGINGVLYFSSLTFRDVGISSGALASLYVGITNFGGALVASNLMDKQGRKKLLIGSYLGMVHFYFCNWCWTSYRYHYTRAQQCSDTLKSYGLQFHCALDM

SEQ ID NO: 188818 - protein, 351 aa, Zea Mays
MLLGRFLVGIGIGVNTVLVPIYISEVAPTKYRGTLGTLCQIGTCLGIIAALSLGIPSESDPHWWRTMLYAACVPGILIVAGMQFAVESPRWLAKVGRFDDARKVVESLWEPSEVEKSMEEIKAVVLNDDSRGSWSDLLVEPHNRVALIGGSLFFLQQFAGINGVLYFSSLTFRDVGISSGALASLYVGITNFGGALVASNLMDKQGRKKLLIGSYLGMAFAMFLIVYGISFPLDEGVAHSLSIAGTLLYIFTFAIGAGPVTGIIIPELSSARTRSKVMGFSFTVHWICNFLVGLFFLELVHKFGVGAVYAGFGGVSLLTALFAYNFIVETKGRSLEEIEMSMSSATPGKQE

SEQ ID NO: 188819 - protein, 290 aa, Zea Mays
MMWRTMLYAACVPGILIVAGMQFAVESPRWLAKVGRFDDARKVVESLWEPSEVEKSMEEIKAVVLNDDSRGSWSDLLVEPHNRVALIGGSLFFLQQFAGINGVLYFSSLTFRDVGISSGALASLYVGITNFGGALVASNLMDKQGRKKLLIGSYLGMAFAMFLIVYGISFPLDEGVAHSLSIAGTLLYIFTFAIGAGPVTGIIIPELSSARTRSKVMGFSFTVHWICNFLVGLFFLELVHKFGVGAVYAGFGGVSLLTALFAYNFIVETKGRSLEEIEMSMSSATPGKQE

SEQ ID NO: 188820 - protein, 295 aa, Zea Mays
MPTPLAAALLPLPASPALHFPRPRPGPSWRARPAVVRAAALRALPRRLELCPPCLAAVESNPAPPPLAPPPPDEASAGSGLDARAGGGGGGGDGGGGADLGWLRAFPHVFTASMANFLFGYHIGVMNGPIEDIATQLGFQGNPFLQGLVVSIFIVGAFFGSLGSSALVDKFGCKRTLQIDSIPLIIGALLSAQADSLDEMLLGRFLVGIGIGVNTVLVPIYISEVAPTKYRGTLGTLCQIGTCLGIIAALSLGIPSESDPHWWRTMLYAACVPGILIVAGMQFAVESPRWLAKVR

SEQ ID NO: 188821 - protein, 542 aa, Zea Mays
MPTPLAAALLPLPASPALHFPRPRPGPSWRARPAVVRAAALRALPRRLELCPPCLAAVESNPAPPPLAPPPPDEASAGSGLDARAGGGGGGGDGGGGADLGWLRAFPHVFTASMANFLFGYHIGVMNGPIEDIATQLGFQGNPFLQGLVVSIFIVGAFFGSLGSSALVDKFGCKRTLQIDSIPLIIGALLSAQADSLDEMLLGRFLVGIGIGVNTVLVPIYISEVAPTKYRGTLGTLCQIGTCLGIIAALSLGIPSESDPHWWRTMLYAACVPGILIVAGMQFAVESPRWLAKVGRFDDARKVVESLWEPSEVEKSMEEIKAVVLNDDSRGSWSDLLVEPHNRVALIGGSLFFLQQFAGINGVLYFSSLTFRDVGISSGALASLYVGITNFGGALVASNLMDKQGRKKLLIGSYLGMAFAMFLIVYGISFPLDEGVAHSLSIAGTLLYVLSLSILSSKPLRGLGWFGDKGIGGDPWRRKSIAIQNCCSSLAEGLLRTFCGNYTCGFLNVWKSFTYIMNNVKGFLVRSLLHDMMINELHLVNV

SEQ ID NO: 188822 - protein, 250 aa, Zea Mays
MASLTLPPAPPNPRQDAIDLQKAFKGFGCDSTTVINILTHRDSVQRGLIQQEYRAMYHEELSHRISSELNGNHKKAMLLWILDPAGRDATVLREALSVDTMDLRAATDIICSRTPSQLQIMKQTYYARFGTYLEHDIGHHTSGDHQKLLLAYVGIPRYEGPEVDPTIVTHDAKDLYKAGEKRLGTDEKTFIRVFTERSWAHLASVSSAYHHMYDRKLEKVIKSETSGNFEFALLAILRCAENPAKYFAKV

SEQ ID NO: 188823 - protein, 229 aa, Zea Mays
MYHEELSHRISSELNGNHKKAMLLWILDPAGRDATVLREALSVDTMDLRAATDIICSRTPSQLQIMKQTYYARFGTYLEHDIGHHTSGDHQKLLLAYVGIPRYEGPEVDPTIVTHDAKDLYKAGEKRLGTDEKTFIRVFTERSWAHLASVSSAYHHMYDRKLEKVIKSETSGNFEFALLAILRCAENPAKYFAKAEYFKKYKKPLAEAIHSETSGNYRTFLLSLVGPGH

SEQ ID NO: 188824 - protein, 200 aa, Zea Mays
MYHEELSHRISSELNGNHKKAMLLWILDPAGRDATVLREALSVDTMDLRAATDIICSRTPSQLQIMKQTYYARFGTYLEHDIGHHTSGDHQKLLLAYVGIPRYEGPEVDPTIVTHDAKDLYKAGEKRLGTDEKTFIRVFTERSWAHLASVSSAYHHMYDRKLEKVIKSETSGNFEFALLAILRCAENPAKYFAKGCGDED

SEQ ID NO: 188825 - protein, 168 aa, Zea Mays
MALNGGKTTLVQDEEKQQLLLEKHTEKHFTAGEVVRDILSQYGLGPEEYGPVVTSLRNNPKAWLEFMMKFELGLERPEPRRALVSAATIALSYVAGGLVPLLPYMFVPEAARAMAVSVAVTLAALLFFGFVKGRFTGDRPFFSAVQTTVVGALASAAAFAMARAVQSI

SEQ ID NO: 188826 - protein, 187 aa, Zea Mays
MKTYTETTDGSTIEDKETAIVWCYEDADPDFGSCQAKELHDHLESVLANEPVSVKAGPNLVEVKPQGVSKGLVAKRILSTTQERGDADDDLPDFVLCVGDDRSDEDMFEVIAAAAAARGVSSLQAEAEVFACTVGRKPSKAKYYLDDPADIVRLVQGLASVSDDDQTHAPPPPPPSAATTAADTVPR

SEQ ID NO: 188827 - protein, 869 aa, Zea Mays
MVSRSYSNLLELAAGGSGGEPLPSLGRRRIPRVVTASGIVPDLDVSDAASAADQSSHAPRERVIIVANQLPVRASRRAAAGAGGGGWDFAWDQDSLLLQVKDSLRAHHGRADVEFVYVGGLRDDVPPAEHDQVAHDLLEGFRCVPTFLPADLRSRFYHGFCKQQLWPLFHYMLPLSPELGGRFDRLLWQAYVSVNKIFADKILEVISPDEDFVWVHDYHLMVLPTFLRKRFNRVKLGFFLHSPFPSSEIYKTLPVREELLRSLLNADLIGFHTFDYARHFLSCCSRMLGLKYESQRGYIALEYYGRTVTIKILPVGVHLEQLRSVLNLPELGVKVAELLKQFCHRNRLLLLGVDDMDIFKGISLKLLAFEQLLMQHPEWRGRVVLVQIANPARGRGKDVREVQEESDAMVRRINDAFGQPGYQPVILIDQPLQFYERMAYYVVAECCLVTAVRDGMNLIPYEYVIARQGNERIDSILGLGPASRKKSMLVVSEFIGCSPSLSGAIRVNPWNIDSVADAMDYALEMPEGEKVLRHEKHHRYVSTHDVGYWANSFLQDLERICLDHNRRRCWGIGFGLKFRVVALDPNFKKLAVEHLVLAYRRTKKRVILLDYDGTLMPQTSLGKSPTSRTIDMLNSLCRDRNNMVFLVSAKSRMTLNEWFLPCESLGLAAEHGCFLRLRRDAEWETCVPVIDCSWKQIAEPVMKTYTETTDGSTIEDKETAIVWCYEDADPDFGSCQAKELHDHLESVLANEPVSVKAGPNLVEVKPQGVSKGLVAKRILSTTQERGDADDDLPDFVLCVGDDRSDEDMFEVFACTVGRKPSKAKYYLDDPADIVRLVQGLASVSDDDQTHAPPPPPPSAATTAADTVPR

SEQ ID NO: 188828 - protein, 553 aa, Zea Mays
MATQEETMVTESSPSSDSSITIGLAVSSSKSSKYAVNWALKNFGTRQRIRFMLIHVRQKVTLVPTPMGNYVPVDQVRDDIASAYEKEVECEAQNMLLMYKNMCDGKVEAEVLVVKGDDVAETISGVVLACQIHKLFVGVSSHSNFIRKFKGTRMFSRICKCVPSFCMVYAISKGGLSMVYSLGSESDNSSKILQVNESSNSELYSDKSSVSDITPSIISRSNSLDGNLDSPPSTHHNWSQSLQEHLSRSTSSTIGKDQRISPCTDGSSNLGILDKTPTMSRALQELMLLEDEASAPCATGQISASTNLPLSDKALTVKSALQELMLSEDKASTHCASGQISGSSNFPISYKAPTVSNALQELMLSEDKDNANFELEKLRIKLEHMKGVCKLVQDESTSASQQMIDLVERRAQEEARLAEVRQRINITTEAARKEREQRYAIEAQARHVRDLAKEEALKKQNLQLRLSREADNVQKLEKLLELGGKSYTVFTWEEMESATSSFSEALKIGSGAFGTVYKGKVHHKTVAIKVLKSDDSHIAKHFEKEVCRAPLQS

SEQ ID NO: 188829 - protein, 501 aa, Zea Mays
MLSEDKDNANFELEKLRIKLEHMKGVCKLVQDESTSASQQMIDLVERRAQEEARLAEVRQRINITTEAARKEREQRYAIEAQARHVRDLAKEEALKKQNLQLRLSREADNVQKLEKLLELGGKSYTVFTWEEMESATSSFSEALKIGSGAFGTVYKGKVHHKTVAIKVLKSDDSHIAKHFEKELEILGKTRHRHLLLLLGACLDRACLVYEYMENGSLEDRLQCKGDTAPLPWYHRFRIAWEITLALIFLHSSKPKPIIHRDLKPANILLDRNFTSKIGDAGLATFLPLRDTSSTHTIRKSTDLVGTLFYLDPEYQRTGQVSAKSDVYALGMVFLQLLTAKSPIGLADTAERAMEEDHLIDILDQRAGNWPVREAHELTQLGLRCLEMRSKDRPDLKSKVLVVLERLNNLASTVYHSVQPIPTAPPSHFICPILKRVMQDPCIASDGYSYERVAIEMWLNENDVSPLTKARLPDKNLVPNLALICLINSWKGEVGATGPIR

SEQ ID NO: 188830 - protein, 585 aa, Zea Mays
MSRALQELMLLEDEASAPCATGQISASTNLPLSDKALTVKSALQELMLSEDKASTHCASGQISGSSNFPISYKAPTVSNALQELMLSEDKDNANFELEKLRIKLEHMKGVCKLVQDESTSASQQMIDLVERRAQEEARLAEVRQRINITTEAARKEREQRYAIEAQARHVRDLAKEEALKKQNLQLRLSREADNVQKLEKLLELGGKSYTVFTWEEMESATSSFSEALKIGSGAFGTVYKGKVHHKTVAIKVLKSDDSHIAKHFEKELEILGKTRHRHLLLLLGACLDRACLVYEYMENGSLEDRLQCKGDTAPLPWYHRFRIAWEITLALIFLHSSKPKPIIHRDLKPANILLDRNFTSKIGDAGLATFLPLRDTSSTHTIRKSTDLVGTLFYLDPEYQRTGQVSAKSDVYALGMVFLQLLTAKSPIGLADTAERAMEEDHLIDILDQRAGNWPVREAHELTQLGLRCLEMRSKDRPDLKSKVLVVLERLNNLASTVYHSVQPIPTAPPSHFICPILKRVMQDPCIASDGYSYERVAIEMWLNENDVSPLTKARLPDKNLVPNLALICLINSWKGEVGATGPIR

SEQ ID NO: 188831 - protein, 571 aa, Zea Mays
MSRALQELMLLEDEASAPCATGQISASTNLPLSDKALTVKSALQELMLSEDKASTHCASGQISGSSNFPISYKAPTDNANFELEKLRIKLEHMKGVCKLVQDESTSASQQMIDLVERRAQEEARLAEVRQRINITTEAARKEREQRYAIEAQARHVRDLAKEEALKKQNLQLRLSREADNVQKLEKLLELGGKSYTVFTWEEMESATSSFSEALKIGSGAFGTVYKGKVHHKTVAIKVLKSDDSHIAKHFEKELEILGKTRHRHLLLLLGACLDRACLVYEYMENGSLEDRLQCKGDTAPLPWYHRFRIAWEITLALIFLHSSKPKPIIHRDLKPANILLDRNFTSKIGDAGLATFLPLRDTSSTHTIRKSTDLVGTLFYLDPEYQRTGQVSAKSDVYALGMVFLQLLTAKSPIGLADTAERAMEEDHLIDILDQRAGNWPVREAHELTQLGLRCLEMRSKDRPDLKSKVLVVLERLNNLASTVYHSVQPIPTAPPSHFICPILKRVMQDPCIASDGYSYERVAIEMWLNENDVSPLTKARLPDKNLVPNLALICLINSWKGEVGATGPIR

SEQ ID NO: 188832 - protein, 539 aa, Zea Mays
MATQEETMVTESSPSSDSSITIGLAVSSSKSSKYAVNWALKNFGTRQRIRFMLIHVRQKVTLVPTPMGNYVPVDQVRDDIASAYEKEVECEAQNMLLMYKNMCDGKVEAEVLVVKGDDVAETISGVVLACQIHKLFVGVSSHSNFIRKFKGTRMFSRICKCVPSFCMVYAISKGGLSMVYSLGSESDNSSKILQVNESSNSELYSDKSSVSDITPSIISRSNSLDGNLDSPPSTHHNWSQSLQEHLSRSTSSTIGKDQRISPCTDGSSNLGILDKTPTMSRALQELMLLEDEASAPCATGQISASTNLPLSDKALTVKSALQELMLSEDKASTHCASGQISGSSNFPISYKAPTDNANFELEKLRIKLEHMKGVCKLVQDESTSASQQMIDLVERRAQEEARLAEVRQRINITTEAARKEREQRYAIEAQARHVRDLAKEEALKKQNLQLRLSREADNVQKLEKLLELGGKSYTVFTWEEMESATSSFSEALKIGSGAFGTVYKGKVHHKTVAIKVLKSDDSHIAKHFEKEVCRAPLQS

SEQ ID NO: 188833 - protein, 451 aa, Zea Mays
MATQEETMVTESSPSSDSSITIGLAVSSSKSSKYAVNWALKNFGTRQRIRFMLIHVRQKVTLVPTPMGNYVPVDQVRDDIASAYEKEVECEAQNMLLMYKNMCDGKVEAEVLVVKGDDVAETISGGSSRALGCSLEYASVFQAFVWCMLFQKVGCPWFILLDQKVTTVLRYSRSTRVLTVNFIQISHQYQASAPCATGQISASTNLPLSDKALTVKSALQELMLSEDKASTHCASGQISGSSNFPISYKAPTVSNALQELMLSEDKDNANFELEKLRIKLEHMKGVCKLVQDESTSASQQMIDLVERRAQEEARLAEVRQRINITTEAARKEREQRYAIEAQARHVRDLAKEEALKKQNLQLRLSREADNVQKLEKLLELGGKSYTVFTWEEMESATSSFSEALKIGSGAFGTVYKGKVHHKTVAIKVLKSDDSHIAKHFEKEVCRAPLQS

SEQ ID NO: 188834 - protein, 386 aa, Zea Mays
MFSRICKCVPSFCMVYAISKGGLSMVYSLGSESDNSSKILQVNESSNSELYSDKSSVSDITPSIISRSNSLDGNLDSPPSTHHNWSQSLQEHLSRSTSSTIGKDQRISPCTDGSSNLGILDKTPTMSRALQELMLLEDEASAPCATGQISASTNLPLSDKALTVKSALQELMLSEDKASTHCASGQISGSSNFPISYKAPTDNANFELEKLRIKLEHMKGVCKLVQDESTSASQQMIDLVERRAQEEARLAEVRQRINITTEAARKEREQRYAIEAQARHVRDLAKEEALKKQNLQLRLSREADNVQKLEKLLELGGKSYTVFTWEEMESATSSFSEALKIGSGAFGTVYKGKVHHKTVAIKVLKSDDSHIAKHFEKEVCRAPLQS

SEQ ID NO: 188835 - protein, 277 aa, Zea Mays
MRLPCDKIDEDLFNASTTVTVGNGKTAGFWNSSWIQGQAPRNIAPSLFKKAKRKNITVAKALTNNTWIRLCYPFSGEGEFSEFFSLWQAIGSMPELNGSEDNISWRWTADGQYSASSAYKIQFASNFSRMNLCPIWKAKVEPKCRFFAWTVLHKRILTADNLQKRGWPCNPICCLCNSAPETILHLCKDCPFSREVWSKVLSRGNLHFLTGVPSGSSLYDWWTDLRSLCSSQRRRDLDGLLIQFWWNLWLERNFRIFQGQHRGVDQVTLAILGIASS

SEQ ID NO: 188836 - protein, 269 aa, Zea Mays
MKVSVKTLKGSSFHIEVDPTDKVADVKKVIESIQEQASYPADQQVLIHQGKVLKDDTTLEENQVVENNFLVIMLRQNKGSSSAAPAKVTANQAPSTQTVPATPPQTSAAPDAPAPIVPVSAPAATATASAAPAVAVSTEADSYGQATSNLVAGSNLEGTIKSILEMGGGTWDRDTVLRALRAAYNNPERAVEYLYSGIPEQMEVPAPPPSSQPVDPVQAVQPAQAGPNANPLDLFPQEILMFCVITHSSKTYLVWFRLTLKFCSHCFKN

SEQ ID NO: 188837 - protein, 381 aa, Zea Mays
MKVSVKTLKGSSFHIEVDPTDKVADVKKVIESIQEQASYPADQQVLIHQGKVLKDDTTLEENQVVENNFLVIMLRQNKGSSSAAPAKAPSTQTVPATPPQTSAAPDAPAPIVPVSAPAATATASAAPAVAVSTEADSYGQATSNLVAGSNLEGTIKSILEMGGGTWDRDTVLRALRAAYNNPERAVEYLYSGIPEQMEVPAPPPSSQPVDPVQAVQPAQAGPNANPLDLFPQSLPNDSANANTGNLDVLRNNSQFQNLLGLVQANPQILQPLLQELRKQNPRVMQLIQENQAEFMRLISEPLEGDEENEMMLDQMADATETIAVTPEENEAILRLEGMGFDRALVLEVFFACNKNEQLAANYLLDHMHEFDNDDGLGGPPL

SEQ ID NO: 188838 - protein, 174 aa, Zea Mays
MGGGTWDRDTVLRALRAAYNNPERAVEYLYSGIPEQMEVPAPPPSSQPVDPVQAVQPAQAGPNANPLDLFPQSLPNDSANANTGNLDVLRNNSQFQNLLGLVQANPQILQPLLQELRKQNPRVMQLIQENQAEFMRLISEPLEGDEENEMMLDQMADATETIAVTPEENEAILP

SEQ ID NO: 188839 - protein, 96 aa, Zea Mays
MNHSSEASIKDQAHKLQVVKYGCKQSEAHQSEHQAAPRTLIPSFPLLAALNSTRSSLSLRRPFSHSAPPPLRPVETVAAAAGRRRAPWTTGSSPTA

SEQ ID NO: 188840 - protein, 58 aa, Zea Mays
MSVVYGWGRGSRIFSTYVGRSSLNIMSEGYLTPAGQVFFIYLFAGTKTGKNWRYHLLS

SEQ ID NO: 188841 - protein, 95 aa, Zea Mays
MTEKRINHIGKRTDSRPQSASVVVTICGSSWNNSDNTCIFYASSAANEHDKKQDPERKIHRERRFSFGKAKALEGRPLKASFGFGKAKASERFPL

SEQ ID NO: 188842 - protein, 215 aa, Zea Mays
MMGSDVSPNKTCIILWTHYSSNFNQLSTAAATAGVHRHSSTQHARPKREKNTTTSFFRSYPPIFSSKAPIPKNKTVVAGEIDWPVSASAARRGRPATGPCRRGCWCWQWGARSPSSCTPSSPPEAGGRRRGARAAPAPSALPPALRSITTQHSDGITYTESEEQAAALASLAGRAAAASTLPCEQESTRRAATRRRARSLCCAIAVVGTIEEDEE

SEQ ID NO: 188843 - protein, 105 aa, Zea Mays
MFLRASSCAERGRKLTMKRLLILQRCEPIVRFSCCSVRYGDCRRNHAASTGGHAVDGCREFIAEGEEGTSGALKCAACGCHRSFHRRVQVYEVAWGYGSDTSSTE

SEQ ID NO: 188844 - protein, 265 aa, Zea Mays
MAIWRKRVNTESCPSRQEESAVQMCESTNPDDVWYKKMKACVTPLPDVKDENDVAGGAIKPFPARLNAVPPRIANGLVPGVSSQAFQKDNKMWKKHVKSYSSVNKYLLTGRYRNIMDMNAQYGGFAAAIESPKSWVMNVVPTIAKMPTLGAVYERGLIGIYHDWCEAFSTYPRTYDLIHASGLFTLYKTKCSMEDVLLEMDRILRPEGAVIIRDDVDVLTKVNSLALGMRWDTKMVDHEDGPLVREKILYAVKQYWVGGKQTAVA

SEQ ID NO: 188845 - protein, 312 aa, Zea Mays
MALKASSSDNRTRSTVSLCIVIGMCCFFYILGAWQKSGFGKGDSIALEVTKRTDCTVVPNLSFDTHHSKASGNSSSLVSPSKKFKPCPDLYTDYTPCQDQNRAMKFPRENMNYRERHCPAQKEKLHCLVPPPKGYVAPFPWPKSRDYVPFANCPYKSLTVEKAIQNWVQYEGNVFRFPGGGTQFPQGADKYIDQLASVVPIANGTVRTALDTGCGVASWGAYLLKRNVLAMSFAPRDSHEAQVQFALERGVPAVIGVLGTIKLPYPSRAFDMAHCSRCLIPWGANDGMYMMEVDRVLRPGELQGLATHKEGS

SEQ ID NO: 188846 - protein, 524 aa, Zea Mays
MAGGGVAALGVKTERAAQYKGRMTLAVATTCLVAAVGGAIFGYDIGISAGGVTSMDPFLEKFFPVVFHRKNSGGKNNYCKYDNQGLAAFTSSLYLAGLVASLVASPVTRNYGRKASIVCGGVSFLIGAALNVAAVNLAMLILGRIMLGVGIGFGNQAVPLYLSEMAPAHLRGGLNMMFQLATTLGIFTANLINYGTQNIKPWGWRLSLGLAAVPALLMTLGGLFLPETPNSLIERGRVEEGRRVLERIRGTADVDAEFTDMVEASELANTVEHPFRNILQPRNRPQLVMAVCMPAFQILTGINSILFYAPVLFQSMGFGGNASLYSSVLTGAVLFSSTLISIGIVDRLGRRKLLISGGIQMIVCQVIVAVILGVKFGAEKQLARSYSVAVVVVICLFVLAFGWSWGPLGWTVPSEIFPLETRSAGQSITVAVNLLFTFAIAQAFLSLLCAFKFGIFLFFAGWITVMTVFVYVFLPETKGVPIEEMVLLWRKHWFWKKVMPDMPLEDGWGAAEGHAAPASNNHKG

SEQ ID NO: 188847 - protein, 108 aa, Zea Mays
MCGLFSFDLGSDYSYKFPLHPCCKGEALELFSVERQLISSQNGDWISPAAEVQEFIHSLSYLICAFLNKVGSSRMKKRMNNQTKWIFTQTHDLLIANGNSQPLAYRWY

SEQ ID NO: 188848 - protein, 50 aa, Zea Mays
MPSSGVIPEEGWLLLARIFSLGAMVGSYCKVTFDALFILRNTNNPKDGST

SEQ ID NO: 188849 - protein, 209 aa, Zea Mays
MLEHLSPSTEITVPKAQKGSAATPKRRRMANVLDVVLETAKSLSPSPLRKIVEAFKALPEAETKQAEVEAAKIQAETEVGPSEPTKTEPAVAEEKTAEQIASEKVEATATEASKESTDYVICHASGKRLSQEEKLEALHYAQNLKYPKGALVFNGSGEEDFLYCLPDNKEISVCREIGRSIGFSKLEDGLSILSKDELADSLAYNSIKV

SEQ ID NO: 188850 - protein, 82 aa, Zea Mays
MDWSTPLWSVSATPNLRRKLHGRTPHKGHYGALSALVMSSHLQMFLTCAAISPSASQIYPCRSINVGRRVQLVAVAQWLSMH

SEQ ID NO: 188851 - protein, 115 aa, Zea Mays
MDALTSCAVQNFGQAKGNTSASSRLPKICKAAGWKEPSFDFEEQGPPHNRIFTCKVTVHLDGLVNTIMECFSDPKPKKKAARENAAQGALWCLERSGYVKSSSDVPDLCGHQPFC

SEQ ID NO: 188852 - protein, 209 aa, Zea Mays
MVARCAHADAGGFRIWPIFSAASLRRKVLEVLACGGGGGGGDGGGSCRGRTAYRSPQRIPRPRPRSDRLAELLRAEQPSECSDEAGASSALLELTLVGTALAQKRASRILEILRADKGKQVAEDASGVVATVSAPQERGCRGEESVDGEFADAGMSAEKRAVRQLVQQSLQSNMRRIVRRARLPQDLAPAPTESLKALTASSTSKSLPF

SEQ ID NO: 188853 - protein, 115 aa, Zea Mays
MARGHPRQATAVRCIWVSSSVCDGAASANGEAASASGGSNNTARQEERQQLHVYSHFSVSSNRQLRHRRLRHPSGDSPRTCRLQQPPPSIDGFWPRHSGSSGAGHSPQGNQATNM

SEQ ID NO: 188854 - protein, 132 aa, Zea Mays
MQVTAARFPSISSTHSLQEGMAAMPLMALKTPTVLPLSTTSLPPPSLYKTRARAHGADSWSPQPLHDLSLSPAVENRCRFAARRRSTSGAEADAAPTTPTAERVRKKTLQMMSTSTKSTDAPVTFLWKSVQA

SEQ ID NO: 188855 - protein, 135 aa, Zea Mays
MQVTAARFPSISSTHSLQEGMAAMPLMALKTPTVLPLSTTSLPPPSLYKTRARAHGADSWSPQPLHDLSLSPAVENRCRFAARRRSTSGAEADAAPTTPTAEVVPCFPLLLHRSSHPAPLPTPCSSISSTRKNQG

SEQ ID NO: 188856 - protein, 147 aa, Zea Mays
MQETEAKKRRLASKKRRSLALLAEVKFLRRKYQSFPKGGSQQTHYRLKKQARYMPSPLGHGAGTEVPSTSRNPNLDLNQDSVLNDVGNDCQGQHGHPEVEKLDQVEVNEDTMTPDVKLSVCRDTGEYSPVSEGKRAVPWQDRFALKT

SEQ ID NO: 188857 - protein, 316 aa, Zea Mays
MLEDDAAMDADSLVGQDPRSGVRPSGGERDWAAAVLEPVRWMRMLCRELGATFVAGVVLVYGLSQGFAGSFFRVASDYYWKDVQRVQPATVQFLSVFFFIPWVLKPLWGIMTDVFPICGYRRRPYFLFSGILGTVSAAIVAVTIGLPMSSAVLCLMGISTAVAIADVTIDASIAKNSIDKPALAPDMQSLCAFSSSLGALVGYATSGLFVHHLGAQGALGVMAIPPATVVFLGFFIYELKTHQHNVKEKVLNKVGGAVKGMVRTIRYPVVWRPSLYMFLSLALSISTHEGQFYWYTNKTPPNPGFSQVKKFVSLPA

SEQ ID NO: 188858 - protein, 302 aa, Zea Mays
MRWSRAKNFREREREERERPACLSRLSSFLLLCSFGICPALQTSTKFGRPITNPFPVSPSASSLKRPPPKAPCSWPPTSPSSFLLSSLSPHAQWRGLARTAPPPPTTTTATPPTPATPPSTSRRASSRSARGRACPGSPPRSAAPSTAASHGTGGRGGSRLTCGTRTAGTSPRTRRASKFTSVSEALESRSWHDTHEEEEEELRPHSLPLSLGKRKKKNIFSALVCIHQWRSVLLTIVSLHGLHAGAYDDEDAAARAYDLAALKYWGPDTILNFPASAYEAELKEMEGQSREEYIGSLRRGP

SEQ ID NO: 188859 - protein, 223 aa, Zea Mays
MAYDMAAIEYRGLNAVTNFDLSRYIKWLRPGAGAAQNPHPMLDGLAQQLLLSPEGTIDGAAFHQQQHDHRQQGAAELPLPPRASLGHTPTTSALGLLLQSSKFKEMIQRASAAESGTTTVTTTSSSSSQPPTPTPTPSPSPPPTPPVQPARDASPQCSFPEDIQTFFGCEDVAGVGAGVDVDALFFGDLAARMELSRHLRTKKMVRHTKQERQQNRQTAPSLF

SEQ ID NO: 188860 - protein, 156 aa, Zea Mays
MPVGTQGTIKGLTTDQLEEIGCQIILGNTYHLELRPGSQLIDDLGGLHKFMNWKRALLTDSGGFQMVSLLHLADITEEGVTFQSPVDGKPMLLTPEESIHIQNNIGADIIMALDDVVKTTITGPRIKEAMYRTIRWIDRCIAEFIWDCARRIGSCS

SEQ ID NO: 188861 - protein, 182 aa, Zea Mays
MPVGTQGTIKGLTTDQLEEIGCQIILGNTYHLELRPGSQLIDDLGGLHKFMNWKRALLTDSGGFQMVSLLHLADITEEGSPVDGKPMLLTPEESIHIQNNIGADIIMALDDVVKTTITGPRIKEAMYRTIRWIDRCIADMQLVVLLVAKTRIHFGVLLPNALLDCLKINHDMSWVLAIHLIL

SEQ ID NO: 188862 - protein, 292 aa, Zea Mays
MFFTMMLPKKTFPQIKTDQELLKMFSKHVDSKIVLMTITYTEPTDVVAVLEWCYTEEDIPRIPSLACPSLPPVSQITEPITKLPTQPCTSEPSTYNNDDDGYLANPEPHKEHVGVDEEGFYLTVEKIASEESDSESDSESDEEYNEEDVNDPPMSVGNIYPNMREFKLALNQHDIKSEFEYNIEKSDPGRVRAYCSRKKEEGCRWRLHASIMRDNTTLKVRKNPHQHTCSSARSKVVKNATKFWLEEDILSGSRVVQRLVAALQERRGHTSALFARDMAIGGITVRMVTQMT

SEQ ID NO: 188863 - protein, 427 aa, Zea Mays
MALARLRLLDRYGLLSPALSATALRSLGDLRALCTLSTTLRSGAGEDEIERIRREFDDAKRNYLSIPAAIKDMPKMNPQGIYVNKNVKLDDLQVYGFDYDYTLSHYSEHLQCLIYDLAKRHLVNELKYPESCLQYEYDRTFPIRGLYYDRLKGCLLKLDFFGSIEPDGCFFGRQRLSLSEIKELYGTRHIGRDQARHLVGLMDVFCFSEACLIADIVQHFIDAKLEFDPSYIYEDVNQSIQHVHRSGLIHRQILSEPEKFLIKKSQVFRFLKMLKEKGKKLFLLTNSPFYFVDGGMRYLLEDQHFDGNSWRELFDVVIAQANKPTFYNSDHPFRVYDTQKDTLTFTAVDKFLPDQVYYHGCLKSFLQITKWKGSEVIYFGDHLLSDLRGPSKAGWRTAAVIRELEDEIEIQNGDSYRFQQIGTVRGN

SEQ ID NO: 188864 - protein, 342 aa, Zea Mays
MALARLRLLDRYGLLSPALSATALRSLGDLRALCTLSTTLRSGAGEDEIERIRREFDDAKRNYLSIPAAIKDMPKMNPQGIYVNKNVKLDDLQVYGFDYDYTLSHYSEHLQCLIYDLAKRHLVNELKYPESCLQYEYDRTFPIRGLYYDRLKGCLLKLDFFGSIEPDGCFFGRQRLSLSEIKELYGTRHIGRDQARHLVGLMDVFCFSEACLIADIVQHFIDAKLEFDPSYIYEDVNQSIQHVHRSGLIHRQILSEPEKFLIKKSQVFRFLKMLKEKGKKLFLLTNSPFYFVDGGMRYLLEVLFLNLNLLVCFVHIVEHPKARFLTRTNFYLVYEIHICFLI

SEQ ID NO: 188865 - protein, 280 aa, Zea Mays
MDVFCFSESQVFRFLKMLKEKGKKLFLLTNSPFYFVDGGMRYLLEDQHFDGNSWRELFDVVIAQANKPTFYNSDHPFRVYDTQKDTLTFTAVDKFLPDQVYYHGCLKSFLQITKWKGSEVIYFGDHLLSDLRGPSKAGWRTAAVIRELEDEIEIQNGDSYRFQQAKLSIIHDLLGKVHAAVVSTEKGQVYKALLNELNAERRQCRSGMRDLFNTSFGATFLTDTGRESSFSYHIHQYADIYTSKLENFLSYAPESWLHPPHDIKIMPHNAKVPASLFSTS

SEQ ID NO: 188866 - protein, 264 aa, Zea Mays
MLKEKGKKLFLLTNSPFYFVDGGMRYLLEDQHFDGNSWRELFDVVIAQANKPTFYNSDHPFRVYDTQKDTLTFTAVDKFLPDQVYYHGCLKSFLQITKWKGSEVIYFGDHLLSDLRGPSKAGWRTAAVIRELEDEIEIQNGDSYRFQQAKLSIIHDLLGKVHAAVVSTEKGQVYKALLNELNAERRQCRSGMRDLFNTSFGATFLTDTGRESSFSYHIHQYADIYTSKLENFLSYAPESWLHPPHDIKIMPHNAKVPASLFSTS

SEQ ID NO: 188867 - protein, 337 aa, Zea Mays
MSTRPPYYCQACLIADIVQHFIDAKLEFDPSYIYEDVNQSIQHVHRSGLIHRQILSEPEKFLIKKSQVFRFLKMLKEKGKKLFLLTNSPFYFVDGGMRYLLEDQHFDGNSWRELFDVVIAQANKPTFYNSDHPFRVYDTQKDTLTFTAVDKFLPDQVYYHGCLKSFLQITKWKGSEVIYFGDHLLSDLRGPSKAGWRTAAVIRELEDEIEIQNGDSYRFQQAKLSIIHDLLGKVHAAVVSTEKGQVYKALLNELNAERRQCRSGMRDLFNTSFGATFLTDTGRESSFSYHIHQYADIYTSKLENFLSYAPESWLHPPHDIKIMPHNAKVPASLFSTS

SEQ ID NO: 188868 - protein, 257 aa, Zea Mays
MKNIFAYSNILCIDYFHNLVGQDQHFDGNSWRELFDVVIAQANKPTFYNSDHPFRVYDTQKDTLTFTAVDKFLPDQVYYHGCLKSFLQITKWKGSEVIYFGDHLLSDLRGPSKAGWRTAAVIRELEDEIEIQNGDSYRFQQAKLSIIHDLLGKVHAAVVSTEKGQVYKALLNELNAERRQCRSGMRDLFNTSFGATFLTDTGRESSFSYHIHQYADIYTSKLENFLSYAPESWLHPPHDIKIMPHNAKVPASLFSTS

SEQ ID NO: 188869 - protein, 73 aa, Zea Mays
MRDLFNTSFGATFLTDTGRESSFSYHIHQYADIYTSKLENFLSYAPESWLHPPHDIKIMPHNAKVPASLFSTS

SEQ ID NO: 188870 - protein, 117 aa, Zea Mays
MAKLSIIHDLLGKVHAAVVSTEKGQVYKALLNELNAERRQCRSGMRDLFNTSFGATFLTDTGRESSFSYHIHQYADIYTSKLENFLSYAPESWLHPPHDIKIMPHNAKVPASLFSTS

SEQ ID NO: 188871 - protein, 77 aa, Zea Mays
MHFYKMKQEQGRRRRETQLQLMTSPCVHCDRHCSGVCLCATTVYERRGGPHLWPQRSLANCDNDILALVVIVVFVGK

SEQ ID NO: 188872 - protein, 72 aa, Zea Mays
MHFYKIHVFCLTRRRKQEQGRRRRETQLQLMTSPCVHCDSGCLCLPGDDICCTRSLAVATRYNKASGDAIVS

SEQ ID NO: 188873 - protein, 76 aa, Zea Mays
MTSPCVHCDSWLLQLKESSRPTMQFSWSMIRILVCTADTALGSVYAQQRFMRGEVAPICGRKGAWPTATTTSWLWL

SEQ ID NO: 188874 - protein, 99 aa, Zea Mays
MHFYKMRRKQEQGRRRRETQLQLMTSPCVHCDSWLLQLKESSRPTMQFSWSMIRILVCTADTALGSVYAQQRFMRGEVAPICGRKGAWPTATTTSWLWL

SEQ ID NO: 188875 - protein, 54 aa, Zea Mays
MQFSWSMIRILVCTADTALGSVYAQQRFMRGEVAPICGRKGAWPTATTTSWLWL

SEQ ID NO: 188876 - protein, 79 aa, Zea Mays
MPALVTEMEHPLIVDMAACAMDELIWLAQAGKQIWVKGMRMTRGISQLRRLPICLFPTNAPQKFQMILPPLPSSPESPG

SEQ ID NO: 188877 - protein, 169 aa, Zea Mays
MKLKATARALQRWSDKRCRGFGPSSLICLLVPLLTIQCSVLKVQSTWTFSWCNQKQYPRYSSCTSTKFSHVFCLTRRRKQEQGRRRRETQLQLMTSPCVHCDSWLLQLKESSRPTMQFSWSMIRILVCTADTALGSVYAQQRFMRGEVAPICGRKGAWPTATTTSWLWL

SEQ ID NO: 188878 - protein, 133 aa, Zea Mays
MPSVLKVQSTWTFSWCNQKQYPRYSSCTSTKFSHVFCLTRRRKQEQGRRRRETQLQLMTSPCVHCDSWLLQLKESSRPTMQFSWSMIRILVCTADTALGSVYAQQRFMRGEVAPICGRKGAWPTATTTSWLWL

SEQ ID NO: 188879 - protein, 79 aa, Zea Mays
MCKQQGITEWALILSNSSSQMANLGGYPVSMGFGTLMTRFHSSKSNCYGKKGFILSIFGQNWRDSRKRGHRVVVAPTPS

SEQ ID NO: 188880 - protein, 99 aa, Zea Mays
MPSVLKVQSTWTFSWCNQKQYPRYSSCTSTKFSHVFCLTRRRKQEQGRRRRETQLQLMTSPCVHCDSGCLCLPGDDICCTRSLAVATRYNKASGDAIVS

SEQ ID NO: 188881 - protein, 56 aa, Zea Mays
MTSPCVHCDRHCSGVCLCATTVYERRGGPHLWPQRSLANCDNDILALVVIVVFVGK

SEQ ID NO: 188882 - protein, 79 aa, Zea Mays
MHFYKMRRKQEQGRRRRETQLQLMTSPCVHCDRHCSGVCLCATTVYERRGGPHLWPQRSLANCDNDILALVVIVVFVGK

SEQ ID NO: 188883 - protein, 423 aa, Zea Mays
MGAALLASWPWDNLGFYKYVLYGPLVGKAVASRAWEAASPDRWILLLLLLFGLRALTYQLWSSFSNMLFATRRRRVVRDGVDFDQIDKEWDWDNFLILHALMAAAALCAFPSLRHLPAWDGRGFAVALVAHAAATEPLSYLAHRALHGSSGRLYARYHSLHHSSRVPQPFTAGLATPLEHVALGALMSLPLAAARAAGCASVALAFAYVLAFDSLRAMGHCNVEVVPASLFRAIPALRYVLYTPTYVPRDSPHQEGGQLLSLHAAVRSAGWHNRPTLVGHAEEDERRCGRGAGLRVPGARGGRDAVAARALRHADLRLHALLRAALPAAHVALRLPRHARHVGLVQDLRHLLLQPPRTAAPDLGRPQIRLPVLLAVCQGRHQQTDRTGHPQGRQDGRQGPQPCSPEQERGAQRRRHVVREQAP

SEQ ID NO: 188884 - protein, 256 aa, Zea Mays
MAPPRSLAGAAIAATAAAIILSCNLSLFPHLIVSSSKFPASTSPPSPTCLSGYPTGLFYRRKCARLAARVRELEASLAVTAEKAAAERRGRVRAQQSLRALSQLEPGSDEARPTKAAASASYPLVPIGTVESCFSTRNGTPRQPLVVTLARATLVLDPARVPAAALEGLASYSHCWILYVFHLNTDLDKLWKDPARSKLKAKVRVPRLKGGKMGVLATRSPHRPNPIGLSVAKVEAVNGHTLLLSGVDLVDGTVPI

SEQ ID NO: 188885 - protein, 389 aa, Zea Mays
MAPPRSLAGAAIAATAAAIILSCNLSLFPHLIVSSSKFPASTSPPSPTCLSGYPTGLFYRRKCARLAARVRELEASLAVTAEKAAAERRGRVRAQQSLRALSQLEPGSDEARPTKAAASASYPLVPIGTVESCFSTRNGTPRQPLVVTLARATLVLDPARVPAAALEGLASYSHCWILYVFHLNTDLDKLWKDPARSKLKAKVEAVNGHTLLLSGVDLVDGTPVLDIKPYLPYSDSVKGAAVPSWLEVDGALAVESVHFSEHFISALSTCWMHVQQMSLYASADEFQDLIKQALSWDIRSISQRNRPHQVSVEADANGHCGEDTDDDHHHRDTGRYGVVYHLHLEGIDVSYRIDQGSNIFVEDATLLPDAVQKRHGYLAWRDKLGSSVL

SEQ ID NO: 188886 - protein, 569 aa, Zea Mays
MSYQLALKFFQLAKDEGMMGQGFVWITAYGLTDIFNVVGYPALDVMEGVVGIEPYVQETAKLNKFRQRWCEKYRSENPGTSINESITSGLYAYDTVWAIALAAEKAGYVNSDFVLSETNNGSTDFNKISTSRAAKKFHAAFLEVNFTGITGQFVIQDMQFQLVSTTYKIINVVGHERRAVGFWTPGLNISRILEKKDDISTIVWPGGSEKTPRGWLLPVNKVLKIGVPGKSGFSSFIRSEDGIPKGFCIDIFEEVISKLPYKVPKHYVEFGNGKGESNGTYDELVYKVYLKEFDAVVGDITILANRSLYVDYTLPYTESGVRMLVPVWDRRQKTAWTFLEPLTADLWLRTGAFIVFTGFVVWFIEHRTNQEFRGPPATQIGSLFYFSFSTFVFAHRERIVNNLSRITVVVWLFVVLILQQSYTASLSSILTVEQLQPTVTNLDEVIRRGDYVGYLSDSFMPELLKRLKINETKMIAFSSPEEYNDALSTRKVAVIVDEIPYLKVFLSKYCHNYTMVGPTYKFDGFGYAFPRGSPLTSEISRGILELASNGRMDELEKQLYGDTSCPDKD

SEQ ID NO: 188887 - protein, 81 aa, Zea Mays
MHYTSQFYQLIELCGGSIFPSCITVQKTKISLPLDGEVSWRVNGNQIETTARPYAFIKFGNQGLVICWSNTPMTLLHVVPS

SEQ ID NO: 188888 - protein, 136 aa, Zea Mays
MPLAAAVSLPSPTPGPREPRLRRTLDAVHRPSPPHCPHRRPPAGLAQIMEDVEATARGRVSQHHRHERGSRGLRALRRRRPRAPALRGNPWAQGVWCRRCPTASCSRYAIVVSVHARNLDTCNCQNSFGQLFVLTV

SEQ ID NO: 188889 - protein, 110 aa, Zea Mays
MPLAAAVSLPSPTPGPREPRLRRTLDAVHRPSPPHCPHRRPPAGLAQIMEDVEATARGRVSQHHRHERGSRGLRALRRRRPRAPALRGNPWAQGVWCRRCPTASCSRAWV

SEQ ID NO: 188890 - protein, 146 aa, Zea Mays
MPSTDLRRLTARIVDLPPGSPRSWRTWKQLRGGGFRNTIGMNVVLEACVRCGDVDRALRLFEEIRGPRGCGVDGVLRHPAQDELKKHCESNNRSILNMHDKDAYPGLGIARRIDAAFKILEWIGKDSSIGSPRLSSSHLWFSKFPY

SEQ ID NO: 188891 - protein, 115 aa, Zea Mays
MPLAAAVSLPSPTPGPREPRLRRTLDAVHRPSPPHCPHRRPPAGLAQIMEDVEATARGRVSQHHRHERGSRGLRALRRRRPRAPALRGNPWAQGVWCRRCPTASCSSNDGIVEMN

SEQ ID NO: 188892 - protein, 122 aa, Zea Mays
MPLAAAVSLPSPTPGPREPRLRRTLDAVHRPSPPHCPHRRPPAGLAQIMEDVEATARGRVSQHHRHERGSRGLRALRRRRPRAPALRGNPWAQGVWCRRCPTASCSSSQPKLKAYMDTPTLF

SEQ ID NO: 188893 - protein, 71 aa, Zea Mays
MSNHTKIVFLNITTPNIKCNCNRSNKLQAFNNYLTPITISKELNKVSRGGLSRYFFKDRIMRQPNILFKSR

SEQ ID NO: 188894 - protein, 109 aa, Zea Mays
MKRCWQACYLHMSEMVVTVNLCSRTNMFSCFWLFLFRFTAQCVSLQAVTIWHPISKPFKVFRCRSSIMDGRPISQGLEAMRFTSMLRQEAVGHLKVVWSHTALQKKLSG

SEQ ID NO: 188895 - protein, 483 aa, Zea Mays
MSYNKAPSITAETINPRVKIIRYAPCGEIVKHAARLEQEIEENPASIPFQEIIYCNLGNPQVLSLCDNPALMDRDEARALFSPCSIRRARRILNSIPSKDTGGYTDCRGIKCLRQVVADGITARDGFPSTADDIFLTDGATSAINLMMQILIRSHEDGILSPLPEYPLYSASIILHGGTMVPYNLTEDNGWGLEIFEVKRCLEEARSAGLTVRAMVVINPGNPTGQVLSVTNQEEIVEFCRKEGLVILADEVYQENIYAENKKFHSFKKVARSLAYDENDLTLVSLHSVSMSYGESGRRGGYMEVSGVAANVKDQIYKVASLTLCPNIAGQILVSLAMDPPKLGDESFESFDKEKEQIRSSFCKRAKTLEKAFSGLEGVTCNKLEGALYLFPRLHLPSAAIRAADFEGVSPDIFYAHRLLDATGIAVVPGSGFHQASGTIHIRCTILPDERKIEAMVARLRAFHKAFMNEFRGSQQVMNDLRR

SEQ ID NO: 188896 - protein, 239 aa, Zea Mays
MSYNKAPSITAETINPRVKIIRYAPCGEIVKHAARLEQEIEENPASIPFQEIIYCNLGNPQVLGQPPLTFFREVLSLCDNPALMDRDEARALFSPCSIRRARRILNSIPSKDTGGYTDCRGIKCLRQVVADGITARDGFPSTADDIFLTDGATSAINLMMQILIRSHEDGILSPLPEYPLYSASIILHGGTMVPYNLTEDNGWGLEIFEVKRCLEEARSAGLTVRAMVVINPGNPTGQL

SEQ ID NO: 188897 - protein, 491 aa, Zea Mays
MSYNKAPSITAETINPRVKIIRYAPCGEIVKHAAEIEENPASIPFQEIIYCNLGNPQVLGQPPLTFFREVLSLCDNPALMDRDEARALFSPCSIRRARRILNSIPSKDTGGYTDCRGIKCLRQVVADGITARDGFPSTADDIFLTDGATSAINLMMQILIRSHEDGILSPLPEYPLYSASIILHGGTMVPYNLTEDNGWGLEIFEVKRCLEEARSAGLTVRAMVVINPGNPTGQVLSVTNQEEIVEFCRKEGLVILADEVYQENIYAENKKFHSFKKVARSLAYDENDLTLVSLHSVSMSYGESGRRGGYMEVSGVAANVKDQIYKVASLTLCPNIAGQILVSLAMDPPKLGDESFESFDKEKEQIRSSFCKRAKTLEKAFSGLEGVTCNKLEGALYLFPRLHLPSAAIRAADFEGVSPDIFYAHRLLDATGIAVVPGSGFHQASGTIHIRCTILPDERKIEAMVARLRAFHKAFMNEFRGSQQVMNDLRR

SEQ ID NO: 188898 - protein, 470 aa, Zea Mays
MSYNKAPSITAETINPRVKIIRYAPCGEIVKHAARLEQEIEENPASIPFQEIIYCNLGNPQVLGQPPLTFFREVLSLCDNPALMDRDEARALFSPCSIRRARRILNSIPSKDTGGYTDCRGIKCLRQVVADGITARDGFPSTADDIFLTDGATSAINLMMQILIRSHEDGILSPLPEYPLYSASIILHGGTMVPYNLTEDNGWGLEIFEVKRCLEEARSAGLTVRAMVVINPGNPTGQVYQENIYAENKKFHSFKKVARSLAYDENDLTLVSLHSVSMSYGESGRRGGYMEVSGVAANVKDQIYKVASLTLCPNIAGQILVSLAMDPPKLGDESFESFDKEKEQIRSSFCKRAKTLEKAFSGLEGVTCNKLEGALYLFPRLHLPSAAIRAADFEGVSPDIFYAHRLLDATGIAVVPGSGFHQASGTIHIRCTILPDERKIEAMVARLRAFHKAFMNEFRGSQQVMNDLRR

SEQ ID NO: 188899 - protein, 279 aa, Zea Mays
MSYNKAPSITAETINPRVKIIRYAPCGEIVKHAARLEQEIEENPASIPFQEIIYCNLGNPQVLGQPPLTFFREVLSLCDNPALMDRDEARALFSPCSIRRARRILNSIPSKDTGGYTDCRGIKCLRQVVADGITARDGFPSTADDIFLTDGATSAINLMMQILIRSHEDGILSPLPEYPLYSASIILHGGTMVPYNLTEDNGWGLEIFEVKRCLEEARSAGLTVRAMVVINPGNPTGQLRLYQSFSSSTHLIPLVIGAIRHKPGGDSRVLSEGRSGYTC

SEQ ID NO: 188900 - protein, 412 aa, Zea Mays
MDRDEARALFSPCSIRRARRILNSIPSKDTGGYTDCRGIKCLRQVVADGITARDGFPSTADDIFLTDGATSAINLMMQILIRSHEDGILSPLPEYPLYSASIILHGGTMVPYNLTEDNGWGLEIFEVKRCLEEARSAGLTVRAMVVINPGNPTGQVLSVTNQEEIVEFCRKEGLVILADEVYQENIYAENKKFHSFKKVARSLAYDENDLTLVSLHSVSMSYGESGRRGGYMEVSGVAANVKDQIYKVASLTLCPNIAGQILVSLAMDPPKLGDESFESFDKEKEQIRSSFCKRAKTLEKAFSGLEGVTCNKLEGALYLFPRLHLPSAAIRAADFEGVSPDIFYAHRLLDATGIAVVPGSGFHQASGTIHIRCTILPDERKIEAMVARLRAFHKAFMNEFRGSQQVMNDLRR

SEQ ID NO: 188901 - protein, 88 aa, Zea Mays
MCLALCLPIVLLPFLLPALFLSLLIIIIGTLCNEMTSLTTFEVGAFSSCFVLVGVLLASFKRGLEVLDDKRHFIFIEPGSLHLCHLAW

SEQ ID NO: 188902 - protein, 296 aa, Zea Mays
MKLVLVVLAFIALVSSVSCTQTGGCSCGQQQSHEQQHQPPPQHHQQQQHQQQQVHMQPQKHQQQQEVHVQQQQQQPQHQQQQQQQQHQQQHQCEGQQQHHQQSQGHVQQHEQSHEQHQGQSHEQQHQQQFQGHDKQQQPQQPQQYQQGQEKSQQQQCHCQEQQQTTRCSYNYYSSSSNLKNCHEFLRQQCSPLVMPFLQSRLIQPSSCQVLQQQCCHDLRQIEPQYIHQAIYNMVQSIIQEEQQQQPCELCGSQQATQSAVAILTAAQYLPSMCGLYHSYYQNNPCSSNDISGVCN

SEQ ID NO: 188903 - protein, 241 aa, Zea Mays
MQPQKHQQQQEVHVQQQQQQPQHQQQQQQQQHQQQHQCEGQQQHHQQSQGHVQQHEQSHEQHQGQSHEQQHQQQFQGHDKQQQPQQPQQYQQGQEKSQQQQCHCQEQQQTTRCSYNYYSSSSNLKNCHEFLRQQCSPLVMPFLQSRLIQPSSCQVLQQQCCHDLRQIEPQYIHQAIYNMVQSIIQEEQQQQPCELCGSQQATQSAVAILTAAQYLPSMCGLYHSYYQNNPCSSNDISGVCN

SEQ ID NO: 188904 - protein, 139 aa, Zea Mays
MRVLLVALALLALAASATSTHTSGGCGCQPPPPVHLPPPVHLPPPVHLPPPVHLPPPVHLPPPVHLPPPVHVPPPVHLPPPPCHYPTQPPRPQPHPQPHPCPGQVAGLLAAQIAQQLTAMCGLQQPTPCPYAAAGGVPH

SEQ ID NO: 188905 - protein, 58 aa, Zea Mays
MTSTRHTGLIHHANISPFRHPPRVTIEPKLLIFFHIPSQAPRHSGQGERMARRAGKAP

SEQ ID NO: 188906 - protein, 80 aa, Zea Mays
MCGEASPEILADFSSSDFRPARLPAHMLAITRIAQLDELMCACSLRVLVCCFPCAFSFSPFPPPLHYCCKPGDGRRKNAD

SEQ ID NO: 188907 - protein, 1397 aa, Zea Mays
MGVGWGYGANMLTKYLVEVGESTPLTAAVCIDNPFDIEEATRSFPHHITLDEKLTAGLVDILRSNKELFQGKAKGFNVQKALSASCLRDFDVAISMVSHGFDTLHDFYAEISTRLSVAHVRIPLLFIQSDDGTVPLLAVPRSSISENPFTSLLFCSCVHSTMSMFQRYSVLWCQNLALEWLSAVEFALLKGRHPLIKDVDITINPSKGLAFVEPQVNQRKSPKGNSFRQHSELILYNNVAHGINGLLVDSANKYSGAQNKENGQLNNNGDIGTVDKDLEEELEESSEDVEKGQALQSASLVMNMLDATMPGTLNDDQKKKVLVAVEQGETLVKALEEAVPEDVRGKLTASVTEILHSKRETFSLGALNRLGWNNVRPTTTKTLAQEKLKDSDHESGLKDTKMVDQNRISATAFEGDLKDINMTNDDKPGESIESSQGKPSQTSEPVGTATEIGTEQPYKSDKANYGTNDSSEGQHITEQDNEMTPKQVSDDQSVANCNGPSKEREQSADATTDQNLQSNTTTEKEGDTSRTGEDKTAHNVNDQSTQVSKTEESKPSPITVTQALDALTGFDDSTQMAVNSVFGVLENMIDQFEKQQDSENGESADGNDGITSVDETESHVKENTENVSSGEDINHSSKQPEGSSPGKTDSIMSKYDCAFGEENPNLSIVSYGRGKMRYYRGNKVGDHVGADGIERVSGLPDYLLDIAVNSYLKAQYAMYLREFLYTELQLKSPESNSATDLFLDPQEGKWKIEEQMGNVQNDNFESSQESSKMDNAIEPPYFIPGKNPDIAYKSNKWNNTVATRSKPGNDLNEALTHFVRDELSSALKIEVGRKIGITDTKQLERSLANDVEQIAAEVSKTVVLDCELYSAIHVQRSPTTIKFGSTHGKNVVEAVSTAVQQSQHLRNILPVGVIVGVTLACLRNYFHVGVSKHGDHMIATMKSDIFGEEVIVQDSSKENVQDSGKANTNDNNIEKTSGENQQDMTKSQGQDMMVGAVTAALGASALVAHQQNKDENCKDFVEIEGAKHEETAQEKSQNSLMSSFAEKAMSVAGPVVPTKGDGEVDHERLVAVLAELGQKGGFLRFIGKIALLWGGIRGAMSLTDRLISFLRISERPLFQRIMGFSLMVLILWSPVVIPLLPTLVQSWTISASTGIIGYACIVGLYISIMILVMLWGKRIRGYEDPVEQYGMNIWSASRLREFFQGLVGGVTVVGLVHSISILLGFAAFRTGFSSSLARPLDLLKSSSNVFLLALRGLATATSIAVVEEMVFRSWLPEEIAVDLGYYNAILISGLVFSLIHRSLPSVPGFLLLSLVLFGLRQRTQGKLAAPIGLRSGIMTASYLIQSSGVLTSKPETPFWMISTYHLHPFDGVIGLSICSLLAIFFFPQKPVQKDTSV

SEQ ID NO: 188908 - protein, 1109 aa, Zea Mays
MGVGWGYGANMLTKYLVEVGESTPLTAAVCIDNPFDIEEATRSFPHHITLDEKLTAGLVDILRSNKELFQGKAKGFNVQKALSASCLRDFDVAISMVSHGFDTLHDFYAEISTRLSVAHVRIPLLFIQSDDGTVPLLAVPRSSISENPFTSLLFCSCVHSTMSMFQRYSVLWCQNLALEWLSAVEFALLKGRHPLIKDVDITINPSKGLAFVEPQVNQRKSPKGNSFRQHSELILYNNVAHGINGLLVDSANKYSGAQNKENGQLNNNGDIGTVDKDLEEELEESSEDVEKGQALQSASLVMNMLDATMPGTLNDDQKKKVLVAVEQGETLVKALEEAVPEDVRGKLTASVTEILHSKRETFSLGALNRLGWNNVRPTTTKTLAQEKLKDSDHESGLKDTKMVDQNRISATAFEGDLKDINMTNDDKPGESIESSQGKPSQTSEPVGTATEIGTEQPYKSDKANYGTNDSSEGQHITEQDNEMTPKQVSDDQSVANCNGPSKEREQSADATTDQNLQSNTTTEKEGDTSRTGEDKTAHNVNDQSTQVSKTEESKPSPITVTQALDALTGFDDSTQMAVNSVFGVLENMIDQFEKQQDSENGESADGNDGITSVDETESHVKENTENVSSGEDINHSSKQPEGSSPGKTDSIMSKYDCAFGEENPNLSIVSYGRGKMRYYRGNKVGDHVGADGIERVSGLPDYLLDIAVNSYLKAQYAMYLREFLYTELQLKSPESNSATDLFLDPQEGKWKIEEQMGNVQNDNFESSQESSKMDNAIEPPYFIPGKNPDIAYKSNKWNNTVATRSKPGNDLNEALTHFVRDELSSALKIEVGRKIGITDTKQLERSLANDVEQIAAEVSKTVVLDCELYSAIHVQRSPTTIKFGSTHGKNVVEAVSTAVQQSQHLRNILPVGVIVGVTLACLRNYFHVGVSKHGDHMIATMKSDIFGEEVIVQDSSKENVQDSGKANTNDNNIEKTSGENQQDMTKSQGQDMMVGAVTAALGASALVAHQQNKDENCKDFVEIEGAKHEETAQEKSQNSLMSSFAEKAMSVAGPVVPTKGDGEVDHERSVNIAIVVFLCLYFFFFFFPFLCENVYHVLTFCKQACCSSS

SEQ ID NO: 188909 - protein, 1236 aa, Zea Mays
MSMFQRYSVLWCQNLALEWLSAVEFALLKGRHPLIKDVDITINPSKGLAFVEPQVNQRKSPKGNSFRQHSELILYNNVAHGINGLLVDSANKYSGAQNKENGQLNNNGDIGTVDKDLEEELEESSEDVEKGQALQSASLVMNMLDATMPGTLNDDQKKKVLVAVEQGETLVKALEEAVPEDVRGKLTASVTEILHSKRETFSLGALNRLGWNNVRPTTTKTLAQEKLKDSDHESGLKDTKMVDQNRISATAFEGDLKDINMTNDDKPGESIESSQGKPSQTSEPVGTATEIGTEQPYKSDKANYGTNDSSEGQHITEQDNEMTPKQVSDDQSVANCNGPSKEREQSADATTDQNLQSNTTTEKEGDTSRTGEDKTAHNVNDQSTQVSKTEESKPSPITVTQALDALTGFDDSTQMAVNSVFGVLENMIDQFEKQQDSENGESADGNDGITSVDETESHVKENTENVSSGEDINHSSKQPEGSSPGKTDSIMSKYDCAFGEENPNLSIVSYGRGKMRYYRGNKVGDHVGADGIERVSGLPDYLLDIAVNSYLKAQYAMYLREFLYTELQLKSPESNSATDLFLDPQEGKWKIEEQMGNVQNDNFESSQESSKMDNAIEPPYFIPGKNPDIAYKSNKWNNTVATRSKPGNDLNEALTHFVRDELSSALKIEVGRKIGITDTKQLERSLANDVEQIAAEVSKTVVLDCELYSAIHVQRSPTTIKFGSTHGKNVVEAVSTAVQQSQHLRNILPVGVIVGVTLACLRNYFHVGVSKHGDHMIATMKSDIFGEEVIVQDSSKENVQDSGKANTNDNNIEKTSGENQQDMTKSQGQDMMVGAVTAALGASALVAHQQNKDENCKDFVEIEGAKHEETAQEKSQNSLMSSFAEKAMSVAGPVVPTKGDGEVDHERLVAVLAELGQKGGFLRFIGKIALLWGGIRGAMSLTDRLISFLRISERPLFQRIMGFSLMVLILWSPVVIPLLPTLVQSWTISASTGIIGYACIVGLYISIMILVMLWGKRIRGYEDPVEQYGMNIWSASRLREFFQGLVGGVTVVGLVHSISILLGFAAFRTGFSSSLARPLDLLKSSSNVFLLALRGLATATSIAVVEEMVFRSWLPEEIAVDLGYYNAILISGLVFSLIHRSLPSVPGFLLLSLVLFGLRQRTQGKLAAPIGLRSGIMTASYLIQSSGVLTSKPETPFWMISTYHLHPFDGVIGLSICSLLAIFFFPQKPVQKDTSV

SEQ ID NO: 188910 - protein, 999 aa, Zea Mays
MWTPSRGSNARRSGHRRIADYLADDQTTTTATDASDNESYTTAYGEEFFAAAAAGSGGAGGMLPAFLADQGDLVEVMLELDEESMVVRSVTPTSAALYGAASLPAPPSAGVLGVSPSPRRAPSEGGGRLSRCSSTSSRIRKKFAWLRSPSPSPSPYRPTPAELQREAAMAARERRREQAQLNRSRAGARRALKGLRFISRTTGSVEAAELWRRVEERFNDLAREGLLSRDDFGECIGMVDSKEFAVGIFDALARRRRQNLERITKEELYDFWLQISDQSFDARLQIFFDMVDTNVDGRITREEVQELIVLSASANKLAKLKEQAEEYASLIMEELDPEKLGYIELWQLEALLLQRDTYMNYSRPLSTASGAQWSQNLGVGGALTITGGGGDGGCGVDGDHPGPPRERRRSWGVRKAAARVRVAAEENWRRAWVLALWFAAMAALFVWKFVQYRRMAAFQVMGYCLPTAKGAAETLKLNMALVLLPVCRNTLTWLRSSWARFFVPFDDNITFHKMIATAIVVGITLHAGNHLACDFPRVIAASPEEYALVAGAFGADKPTYAGLLSGTEGVTGVAMVVLMTVSFTLATHPFRKGEPKGAGAAAGTSRLPAPLNRLTGFNAFWYSHHLLGIVYALLLAHGYFLFLVRRWYEKTTWMYISVPLLLYVGERMLRALRSNAYTVKILKVCLLPGNVLTITMSKPYGFRYRSGQYIFLQCPIISPFEWHPFSITSAPGDDYLSVHIRTNGDWTQELKRIFVENYFSPHLNRRASFSELGAAEPRSLPKLLVDGPYGAPAQDFRNYDVLLLVGLGIGATPFISILRDLLNNIKIADELMDLAMETSRSEDSANSFSVSTASSNRKRAYRTSRAHFYWVTREAGSFEWFKGVMNEVAEMDKKGIIELHNYLTSVYEERDARTTLLSMVQALNHAKHGVDIVSGTRVRTHFARPNWKEVFTRIASKHPNSTVGVFYCGAPTLAKELKALAHEMSHRTGTRFHFHKEYF

SEQ ID NO: 188911 - protein, 425 aa, Zea Mays
MHRNGGLQGVRGGHLRRAGAAAAAEPGADHQGGALRLLAPDLRSELRRAAPDLLRHLIVLSASANKLAKLKEQAEEYASLIMEELDPEKLGYIELWQLEALLLQRDTYMNYSRPLSTASGAQWSQNLGVGGALTITGGGGDGGCGVDGDHPGPPRERRRSWGVRKAAARVRVAAEENWRRAWVLALWFAAMAALFVWKFVQYRRMAAFQVMGYCLPTAKGAAETLKLNMALVLLPVCRNTLTWLRSSWARFFVPFDDNITFHKMIATAIVVGITLHAGNHLACDFPRVIAASPEEYALVAGAFGADKPTYAGLLSGTEGVTGVAMVVLMTVSFTLATHPFRKGEPKGAGAAAGTSRLPAPLNRLTGFNAFWYSHHLLGIVYALLLAHGYFLFLVRRWYEKTSEQLRRITVAMTMPLEIVAARQRA

SEQ ID NO: 188912 - protein, 666 aa, Zea Mays
MWTPSRGSNARRSGHRRIADYLADDQTTTTATDASDNESYTTAYGEEFFAAAAAGSGGAGGMLPAFLADQGDLVEVMLELDEESMVVRSVTPTSAALYGAASLPAPPSAGVLGVSPSPRRAPSEGGGRLSRCSSTSSRIRKKFAWLRSPSPSPSPYRPTPAELQREAAMAARERRREQAQLNRSRAGARRALKGLRFISRTTGSVEAAELWRRVEERFNDLAREGLLSRDDFGECIGMVDSKEFAVGIFDALARRRRQNLERITKEELYDFWLQISDQSFDARLQIFFDMVDTNVDGRITREEVQELIVLSASANKLAKLKEQAEEYASLIMEELDPEKLGYIELWQLEALLLQRDTYMNYSRPLSTASGAQWSQNLGVGGALTITGGGGDGGCGVDGDHPGPPRERRRSWGVRKAAARVRVAAEENWRRAWVLALWFAAMAALFVWKFVQYRRMAAFQVMGYCLPTAKGAAETLKLNMALVLLPVCRNTLTWLRSSWARFFVPFDDNITFHKMIATAIVVGITLHAGNHLACDFPRVIAASPEEYALVAGAFGADKPTYAGLLSGTEGVTGVAMVVLMTVSFTLATHPFRKGEPKGAGAAAGTSRLPAPLNRLTGFNAFWYSHHLLGIVYALLLAHGYFLFLVRRWYEKTVHMDVHFGPAAALRR

SEQ ID NO: 188913 - protein, 168 aa, Zea Mays
MDLAMETSRSEDSANSFSVSTASSNRKRAYRTSRAHFYWVTREAGSFEWFKGVMNEVAEMDKKGIIELHNYLTSVYEERDARTTLLSMVQALNHAKHGVDIVSGTRVRTHFARPNWKEVFTRIASKHPNSTVGVFYCGAPTLAKELKALAHEMSHRTGTRFHFHKEYF

SEQ ID NO: 188914 - protein, 248 aa, Zea Mays
MFENGVVQSFIYARTLSPADMKEPKIAAEIAKELRKFHQVDIPGSKEPQLWNDIFKFLKKAAALKFEDNEQQKRYVKISFTEIQDEVKELKDLLDILHAPVVYAHNDLLSGNLMLNDLEGKLYFIDFEYGSYSYRGYDIANHFNEYAGFDCDFNLYPDKDAQYHFFRNYLHPDRPSEAQDMEVLYVETNTFRLASHIYWALWALIQAKVSPIDFDYLGYFFLRYGEYKKQRDSCFALAQSFLSGLRNG

SEQ ID NO: 188915 - protein, 228 aa, Zea Mays
MKEPKIAAEIAKELRKFHQVDIPGSKEPQLWNDIFKFLKKAAALKFEDNEQQKRYVKISFTEIQDEVKELKDLLDILHAPVVYAHNDLLSGNLMLNDLEGKLYFIDFEYGSYSYRGYDIANHFNEYAGFDCDFNLYPDKDAQYHFFRNYLHPDRPSEAQDMEVLYVETNTFRLASHIYWALWALIQAKVSPIDFDYLGYFFLRYGEYKKQRDSCFALAQSFLSGLRNG

SEQ ID NO: 188916 - protein, 198 aa, Zea Mays
MKEPKIAAEIAKELRKFHQVDIPGSKEPQLWNDIFKFLKKAAALKFEDNEQQKRYVKISFTEIQDEVKELKDLLDILHAPVVYAHNDLLSGNLMLNDLEGKLYFIDFEYGSYSYRGYDIANHFNEYAGFDCDFNLYPDKDAQYHFFRNYLHPDRPSEVQAQDMEVLYVETNTFRLASHIYWALWALIQHLNAGKGIPN

SEQ ID NO: 188917 - protein, 293 aa, Zea Mays
MGSEGRVWNGAGVAAGSGYGGSVEAKATTAAPADVPTSAASVDISLPLPEMSPHIIGLCKELVKGWSSIDSSRFSIETVSGGITNLLLKVSVKGNNGNDSSVTVRLYGPNTDLVIDRKRELQAIPYLSAAGFGARLLGMFENGVVQSFIYARTLSPADMKEPKIAAEIAKELRKFHQVDIPGSKEPQLWNDIFKFLKKAAALKFEDNEQQKRYVKISFTEIQDEVKELKDLLDILHAPVVYAHNDLLSGNLMLNDLEGKLYFIDFEYGSYSYRGYDIANHFNEYAGFDCDFNL

SEQ ID NO: 188918 - protein, 384 aa, Zea Mays
MGSEGRVWNGAGVAAGSGYGGSVEAKATTAAPADVPTSAASVDISLPLPEMSPHIIGLCKELVKGWSSIDSSRFSIETVSGGITNLLLKVSVKGNNGNDSSVTVRLYGPNTDLVIDRKRELQAIPYLSAAGFGARLLGMFENGVVQSFIYARTLSPADMKEPKIAAEIAKELRKFHQVDIPGSKEPQLWNDIFKFLKKALKFEDNEQQKRYVKISFTEIQDEVKELKDLLDILHAPVVYAHNDLLSGNLMLNDLEGKLYFIDFEYGSYSYRGYDIANHFNEYAGFDCDFNLYPDKDAQYHFFRNYLHPDRPSEAQDMEVLYVETNTFRLASHIYWALWALIQAKVSPIDFDYLGYFFLRYGEYKKQRDSCFALAQSFLSGLRNG

SEQ ID NO: 188919 - protein, 391 aa, Zea Mays
MGSEGRVWNGAGVAAGSGYGGSVEAKATTAAPADVPTSAASVDISLPLPEMSPHIIGLCKELVKGWSSIDSSRFSIETVSGGITNLLLKVSVKGNNGNDSSVTVRLYGPNTDLVIDRKRELQAIPYLSAAGFGARLLGMFENGVVQSFIYARTLSPADMKEPKIAAEIAKELRKFHQVDIPGSKEPQLWNDIFKFLKKAAALKFEDNEQQKRYVKISFTEIQDEVKELKDLLDILHAPVVYAHNDLLSGNLMLNDLEGKLYFIDFEYGSYSYRGYDIANHFNEYAGFDCDFNLYPDKDAQYHFFRNYLHPDRPSEVQAQDMEVLYVETNTFRLASHIYWALWALIQVSKAKVSPIDFDYLGYFFLRYGEYKKQRDSCFALAQSFLSGLRNG

SEQ ID NO: 188920 - protein, 196 aa, Zea Mays
MKEPKIAAEIAKELRKFHQVDIPGSKEPQLWNDIFKFLKKAAALKFEDNEQQKRYVKISFTEIQDEVKELKDLLDILHAPVVYAHNDLLSGNLMLNDLEGKLYFIDFEYGSYSYRGYDIANHFNEYAGFDCDFNLYPDKDAQYHFFRNYLHPDRPSEAQDMEVLYVETNTFRLASHIYWALWALIQHLNAGKGIPN

SEQ ID NO: 188921 - protein, 342 aa, Zea Mays
MSPLPSYGYGREHKGPRYGSLIHGQDLKHVTITGHNGTINGQGQSWWVKFRRKLLNHTRGPLVQLMRSSNIIISNITLRDSPFWTLHTYDCKNVTISETTILAPIAGAPNTDGIDPDSCENVVIKNCYISVGDDGIAIKSGWDQYGIAYGRPSANITIQNVVIRSMVSAGVSIGSEMSGGVSDVLVENVHVWDSRRGVRIKTAPGRGAYVTNVIYQNITFENVRVGIVIKTDYNEHPDEGFDPKAVPTIGNISYTSIHGHRVRVPVRIQGSAQIPVKNVTFHDMSIGIVDKKHHVFQCSFVQGQVIGYVFPVPCKNLDLYDERRGLVKQSTLQNISDIDYSF

SEQ ID NO: 188922 - protein, 355 aa, Zea Mays
MLLIFKDERYWPLMSPLPSYGYGREHKGPRYGSLIHGQDLKHVTITGHNGTINGQGQSWWVKFRRKLLNHTRGPLVQLMRSSNIIISNITLRDSPFWTLHTYDCKNVTISETTILAPIAGAPNTDGIDPDSCENVVIKNCYISVGDDGIAIKSGWDQYGIAYGRPSANITIQNVVIRSMVSAGVSIGSEMSGGVSDVLVENVHVWDSRRGVRIKTAPGRGAYVTNVIYQNITFENVRVGIVIKTDYNEHPDEGFDPKAVPTIGNISYTSIHGHRVRVPVRIQGSAQIPVKNVTFHDMSIGIVDKKHHVFQCSFVQGQVIGYVFPVPCKNLDLYDERRGLVKQSTLQNISDIDYSF

SEQ ID NO: 188923 - protein, 498 aa, Zea Mays
MSRIRSGVEVVASRGCARMVIPGMHHNPSSAASVSSSAASRAAPAAGSGPAAHADGPFAGLVICVTGLSKEARVQVKEATERLGGEYSGSLHPKCTHLVVQSFAGRKFEHALKHGPRNGLFLVTLGWFVDCVRRNMRLDESLYAIKSIGENGVPPGEFSRLVGVPVNEKSCLPPLIFQDKACSDMTQKHSLQTPGNGGGHDGLVFMNDTIYIDPGISDEMRKKISDAVTREGGKLLEHWFIGCPTTYIVCEDVCVKRYVGHSENIVTPLWILKTVKEKNLQRLVHLSSDLARHVAMVLENVQTSEENRKLGSVPSINTSSCGRPSTKEEINEVHQAKQKFVEGAKKEVRDRRARRMQSCEVTIHPITPATLLDSICWTISEPTSSASIYMDSSWSDDANEQQSTTYFDANGDVRDPDQPNDNFSRPLKESERSELIFKNHFLTILFPVDRFGELGPSSKTFYNNGGFTCIQVLNHIYNFYQVYNYCTLIAQVWTLFVL

SEQ ID NO: 188924 - protein, 266 aa, Zea Mays
MSRIRSGVEVVASRGCARMVIPGMHHNPSSAASVSSSAASRAAPAAGSGPAAHADGPFAGLVICVTGLSKEARVQVKEATERLGGEYSGSLHPKCTHLVHSFAGRKFEHALKHGPRNGLFLVTLGWFVDCVRRNMRLDESLYAIKSIGENGVPPGEFSRLVGVPVNEKSCLPPLIFQDKACSDMTQKHSLQTPGNGGGHDGLVFMNDTIYIDPGISDEMRKKISDAVTREGGKLLEHWFIGCPTTYIVCEDVCVKRYVGHSENIVT

SEQ ID NO: 188925 - protein, 328 aa, Zea Mays
MSRIRSGVEVVASRGCARMVIPGMHHNPSSAASVSSSAASRAAPAAGSGPAAHADGPFAGLVICVTGLSKEARVQVKEATERLGGEYSGSLHPKCTHLVHSFAGRKFEHALKHGPRNGLFLVTLGWFVDCVRRNMRLDESLYAIKSIGENGVPPGEFSRLVGVPVNEKSCLPPLIFQDKACSDMTQKHSLQTPGNGGGHDGLVFMNDTIYIDPGISDEMRKKISDAVTREGGKLLEHWFIGCPTTYIVCEDVCVKRYVGHSENIVTPLWILKTVKEKNLQRLVHLSSDLARHVAMVLENVQTSEEETWKCTFYKHKLMWSSINQRGDQ

SEQ ID NO: 188926 - protein, 300 aa, Zea Mays
MPNCKRPCFLDCSCCSCPDLSCCYPSCKSCNKPCFGPNSCSCCDISCRKPDCPSCTSSCSSCCNRPCGNPDCSSCCTCNPSCCKPSCNSCCRPNCSSCCNLSCCKPSCSSCFSCCKANSSSCCKPKCSCFKALSCCKLQCSPNCCTCSLPSCSGCNPCGSCKQCCSCPSDCFDCKPNCGCFGAQCCSCVGCCSCSCPRCSSCFGCFKYFKCSNLFGCCSCKQCFKCQSSCCKGAPSCCKCQSSCCEGEDGSSSCWRSCCSVPKPDCPGCSCGCVWSCRKCTEGCRCSGCRKPCCATGCLC

SEQ ID NO: 188927 - protein, 69 aa, Zea Mays
MPQYHCKLLKVPPRPVSPPELKIRYPEKSFPMKLDDFPQVTHKVLPCYSSTSTTKIKVCNFGSKYAQGC

SEQ ID NO: 188928 - protein, 97 aa, Zea Mays
MSMFFWCAISGFNAAVAGCFFAIETVLRPLKPENSPPFTTAMIILASIISSTVSNVLLGARPAFIVPAYELKSAAGWNGCYTSFSLFSPIDFSTASL

SEQ ID NO: 188929 - protein, 60 aa, Zea Mays
MVYPTGSSRTHGALTGVMRVTSRWKWARTCAVLLRVHPTLLSHEALTKCYMVCLASIMHV

SEQ ID NO: 188930 - protein, 192 aa, Zea Mays
MLSTTGALEAAYTQATGKPISLSEQQLIDCGFAFNNFGCNGGLPSQAFEYIKYNGGLDTEESYPYQGVNGICKFKNENVGVKVLDSVNITLGAEDELKDAVGLVRPVSVAFEVITGFRLYKSGVYTSDHCGTTPMDVNHAVLAVGYGVEDGVPYWLIKNSWGADWGDEGYFKMEMGKNMCGVATCASYPIVA

SEQ ID NO: 188931 - protein, 119 aa, Zea Mays
MASSPSLRPTDRLRRPPASPAFCSFSAVSLRGLVSLSSASRVLSVSFRQRLLTAVRSSRDPGEIDVASGEGTELPGGSTGPRKDGKETAKSFSTKEYSLTVNPNVNDDKSAISYLDVMV

SEQ ID NO: 188932 - protein, 221 aa, Zea Mays
MASSPSLRPTDRLRRPPASPAFCSFSAVSLRGLVSLSSASRVLSVSFRQRLLTAVRSSRDPGEIDVASGEGTELPGGSTGPRKDGKETAKSFSTKDDRLLEKLKRYGVAGVLSYGLLNTVYYVTAFLLVWFYVAPAPGRMGYGAAVERFVKLMAMVWAGSQVTKIFRAGGALALAPFVERGLKWFTVKFNFKSEGKAFMTIVGLCFAVAALMFFGLTILWA

SEQ ID NO: 188933 - protein, 442 aa, Zea Mays
MEVSQISACERERAPTRPNGKAVIAVPRLTVSLCVCLLTPVSRLLFSHYAVFARSSSSVLTSPPSSINGASPNFAISAETTWGLGRKGYCHFRGRPGRLHRIHMGYQPMHGNGGTAGAGTSGSGGGGGGDHLRHHQQQRLHSPRMAGGGSMTRRASSFKRGGGGEIELQIGSPRSPRCDGLGSPPSDSVESSGSGLLLHQSQQNQHLRFRLFKPPVSGGSAVGLGLGIRERRKLGNMLFLAFCGVCLLLGVVKILAGGWFALPGNDKDADLKDLSISFSGEKVHQADHHFVYMGGKESDRTLMTVESSIGGREDGVAEASDIWSQPSSTNFRQCIVSNSHKKQDSHTNGYILINANGGLNQMRFGICDMVAVAKILKATLVLPSLDHTSYWADDSEFKDLFNWRHFIESLKEDIDIVETLPPEYSDIEPLAKAPVSWSKVEA

SEQ ID NO: 188934 - protein, 519 aa, Zea Mays
MSFLRRRKPLPPSDGDESDHDDNDKGKKPSSSSGSPSKEPTKRTKAKWSCVDSCCWLVGCVCSAWWLLLFLYNAMPASFPQYVTEAITGPLPDPPGVKLQKEGLRVKHPVVFVPGIVTGGLELWEGHHCAEGLFRKRLWGGTFGDVYKRPLCWVEHMSLDNETGLDKPGIRVRPVTGLVAADYFVPGYFVWAVLIANLARIGYEEKTMYMAAYDWRLSFQNTEVRDQTLSRIKSNIELMVATNGGNRVVVIPHSMGVLYFLHFMKWVEAPPPMGGGGGPDWCEKHIKAVMNIGGPFLGVPKAVAGLFSSEAKDVAVARAIAPDVLDSDFLGLQTLRHLMRMTRTWDSTMSMIPKGGDTIWGNLDWSPEDGIECKAKKHKANDTGVSKDSNGGNIEVQPEPINYGRLVSFGKDVAEAPSSEIEQIEFRDAVKGNNIAHSNTSCREIWTEYHELGWGGIKAVADYKVYTASSVVDLLHFVAPRMMQRGNVHFSYGIADNLDDPKYQHYKYWSNPLETKHSY

SEQ ID NO: 188935 - protein, 391 aa, Zea Mays
MLTCIACSKQQFAGGGPPLHEPPEDDDVVDGGGGGTATPRTRHAIKALTAQIKDMALKASGAYRHCKPCAGSSAAASRRHHPYHHRGGSAFGGSDAGSASDRFHYAYRRAGSSADATTSMSVRTDFPAGDGEDDEVASEAAGGCGGKDDDAKEWVAQVEPGVLITFVSLAQGGNDLKRIRFSREIFNKWQAQRWWAENYDRIMELYNVQRFNQTVPLVPTTPKSEDESSKDDSPVTPPLDKERLPRTFHRQAMGYSSSDSLEHHSNRYCTGLLHQHGHQCCDSMGLASTPKLSSISGAKTETSSMDASMRTSSSPEEVDRSGELTVSISNASDQEREWVEEDEPGVYITIRALPGGTRELRRVRFSREKFSERHARLWWEENRARIHEQYL

SEQ ID NO: 188936 - protein, 342 aa, Zea Mays
MALKASGAYRHCKPCAGSSAAASRRHHPYHHRGGSAFGGSDAGSASDRFHYAYRRAGSSADATTSMSVRTDFPAGDGEDDEVASEAAGGCGGKDDDAKEWVAQVEPGVLITFVSLAQGGNDLKRIRFSREIFNKWQAQRWWAENYDRIMELYNVQRFNQTVPLVPTTPKSEDESSKDDSPVTPPLDKERLPRTFHRQEKLGAAMGYSSSDSLEHHSNRYCTGLLHQHGHQCCDSMGLASTPKLSSISGAKTETSSMDASMRTSSSPEEVDRSGELTVSISNASDQEREWVEEDEPGVYITIRALPGGTRELRRVRFSREKFSERHARLWWEENRARIHEQYL

SEQ ID NO: 188937 - protein, 161 aa, Zea Mays
MDPKEKPNVSSSPPTPRLDCIKCFDMLWFCYSPFHQMQNYYRYGEFDTCFGKWGDLMGCLALKTKRKAEVEEILIAREKAKPHIWTYRTVDEASENWWRMYKHAVMMSPLPGSAQLPRVPKPTSECAACPSPDGSSAWASAEGGEARRPEPSVREVEVPRP

SEQ ID NO: 188938 - protein, 105 aa, Zea Mays
MGCLALKTKRKAEVEEILIAREKAKPHIWTYRTVDEASENWWRMYKHAVMMSPLPGSAQLPRVPKPTSECAACPSPDGSSAWASAEGGEARRPEPSVREVEVPRP

SEQ ID NO: 188939 - protein, 74 aa, Zea Mays
MSAGSERPYAFSPPSAVPGPFSRGSGSAPTTAATDSTGRSSSSVAPTKSRKPPFRPAVDDTKPVLRDPFFAQPY

SEQ ID NO: 188940 - protein, 626 aa, Zea Mays
MTDQQTQDLVKELVHRLLSAAESGGRGGGRDTGGALRFAHRILSSRLAPAVLPDEHALAESIKRRLAASGRPDDALSFADLHSKLSVRARPASLWPLLYLLDSLSSQYRAAAAASCLPNLPIAALPQNATSGTAPGAGVRPGSRTHGAPPGGLVLVSKDPDNIREIALREYTELVIDETEVSEAALVRDVLYACQGIDGRYVRYDKSVDSYDLPDGVRVPRSTRTLVRKLCELGWLFSKVRGFISDNISRSPSDAATEVGTVTQAFCSALQEELSDYYKLLAVLESYSLNPIPTPGSDSGVSSNYLSLRRLAVWLAEPAVRMRLMAVLVDGCRGLRGGAMAGVIHGHAQHGDPMFQEFMGRLLRRVCSPLFEMVRSWVLEGELEDVFAEFFIVGQPVKAESLWREGYLIQSDMLPAFISPVLAKRILRTGKSINFLRVCCDDSGWADAAAEAAAYVGTTTSRGGLGYGETDALEALVVEAAKRIDRHLMDVIHKRYRFKDHCLAIKRYLLLGQGDFVQYLMDVVGPELSEPANRISSFQLAGLLETAIRASNAQYDDCDILDRIKVKMMDHGDGDRGWDVFSLEYDARVPLDTVFTASVMKMYLKEQASELNLYQFFVNVKFYSMR

SEQ ID NO: 188941 - protein, 357 aa, Zea Mays
MQLESCKAAMEWLCFRLDMLSSFVFSFTLILLVSSPSALIDPKTAGLAVTYGLSLNMLQGWAIAVLCSLENRMISVERMLQYTTIPSEPPLTISERQPNRQWPTKGEIEFLNLHVRYAPQLPFVLKGLTCTLLGGKKTGIVGRTGGGKSTLIQALFRIVDPCIGQVFIDGTDICTIGLHDLRTRLSIIPQDPVMFEGTLRTNIDPLGEYSDEKIWEALDSCHLGDEVRKNELKLDSTVTEKGKNWSTGQRQLVCLGRVILKRRKILVLDEATSSVDPITDSLIQKTLKQQFLKCTMITIAHRITSVLDSDKVLLLDNGEIAEHDAPAKLLEDSSSLFSKLVSEYTMGSDKWRMQESS

SEQ ID NO: 188942 - protein, 141 aa, Zea Mays
MQQGTARARGRAGTPPLPRTSAPSLKRATREESSSEHAAAAAAEECSQSGGGSKRRKGAGVVRPFALLKPDGLDGGATLADINARILMRPARPVRHPVGEFACAPRVSADQPGFSGKAVASLTRLHTPGGRGTITIIRTRG

SEQ ID NO: 188943 - protein, 230 aa, Zea Mays
MEREVQLMEGRQAWPLHMMGMAAAGTTATCFDNYSSSGSGGGGGDCFVLGWEQLAPAPFGCFGLLTADVHDLFPLFATGMEPALPALPPSAHDVAAAIPGELDDLLLSFWDASCHDGDVGEPLKAQQQAAFNSSCCVTHERGEDYCTPTTDSFVHCERAPPFESTPPPPLPLSQLKLTGFRRRLQCRRTDLLDFRSCWSLAPRVKYTHPVVGGWVGVGVGRRPRTEPARS

SEQ ID NO: 188944 - protein, 234 aa, Zea Mays
MSPIVPPKPLPFLTTLTTRFSLACLPTRRFTQTCCSSAGHRGPAVAATPRPGGVCRVHSPLRSLLLASAATSARTAAAAEDMSDPELRLVLELATDEELMEVEEILYGTRGWRPSYRDVLLRVRKKIGVQCSSKLCTADLEAEIFLHLVNEYSSHQKDRLSFPWDKRKSPNNISSLGANKWKMLTDVAWRIGTKGMESTFLKGGSALTMKTIYESIDWKTAEGGCKLQDKERTC

SEQ ID NO: 188945 - protein, 287 aa, Zea Mays
MSPIVPPKPLPFLTTLTTRFSLACLPTRRFTQTCCSSAGHRGPAVAATPRPGGVCRVHSPLRSLLLASAATSARTAAAAEDMSDPELRLVLELATDEELMEVEEILYGTSPLLKSIARRPNSDGVVVLDDIEERDHFISKLESRFLYLAADARFVMRGWRPSYRDVLLRVRKKIGVQCSSKLCTADLEAEIFLHLVNEYSSHQKDRLSFPWDKRKSPNNISSLGANKWKMLTDVAWRIGTKGMESTFLKGGSALTMKTIYESLANRLTGKLLKEAANYKIKKELVKQ

SEQ ID NO: 188946 - protein, 173 aa, Zea Mays
MSPIVPPKPLPFLTTLTTRFSLACLPTRRFTQTCCSSAGHRGPAVAATPRPGGVCRVHSPLRSLLLASAATSARTAAAAEDMSDPELRLVLELATDEELMEVEEILYGTSYFSPLLKSIARRPNSDGVVVLDDIEERDHFISKLESRFLYLAADARFVMSKWWQERSEGFQVA

SEQ ID NO: 188947 - protein, 268 aa, Zea Mays
MSPIVPPKPLPFLTTLTTRFSLACLPTRRFTQTCCSSAGHRGPAVAATPRPGGVCRVHSPLRSLLLASAATSARTAAAAEDMSDPELRLVLELATDEELMEVEEILYGTSYFSPLLKSIARRPNSDGVVVLDDIEERDHFISKLESRFLYLAADARFVMRGWRPSYRDVLLRVRKKIGVQCSSKLCTADLEAEIFLHLVNEYSSHQKDRLSFPWDKRKSPNNISSLGANKWKMLTDVAWRIGTKGMESTFLKGGSALTMKTIYESPID

SEQ ID NO: 188948 - protein, 329 aa, Zea Mays
MSPIVPPKPLPFLTTLTTRFSLACLPTRRFTQTCCSSAGHRGPAVAATPRPGGVCRVHSPLRSLLLASAATSARTAAAAEDMSDPELRLVLELATDEELMEVEEILYGTRGWRPSYRDVLLRVRKKIGVQCSSKLCTADLEAEIFLHLVNEYSSHQKDRLSFPWDKRKSPNNISSLGANKWKMLTDVAWRIGTKGMESTFLKGGSALTMKTIYESLANRLTGKLLKEAANYKIKKELVKQGGRLAAVNLESRAGLLAARQGLVRAASRYVGLRSVVTFLGPILWGTLLADIVIQMLGTDYARIVQAVYAFAQIRLTRTSYVESDGEGPE

SEQ ID NO: 188949 - protein, 97 aa, Zea Mays
MSEHGRQELRTNEYQLDDDDEPFWLAVVRDLAVGFKGLVAFLAEQPRQLKHLEWPGFLHTLKTATLTLVLVAMFIVALSTIDAALCYMLAWLLRKSA

SEQ ID NO: 188950 - protein, 212 aa, Zea Mays
MSKYKVEGFPTILVFGADKESPFPYQGARVASAIESFALEQLEANSGPAEVSELTGPDVMEEKCASAAICFVSFLPDILDSKAEGRNKYLELLLSVAEKFKKSPYSFVWTAAGKQANLENQVGVGGYGYPAMVALNVKKGAYAPLRSAFQRDEIIEFVKEAGRGGKGNLPLNDAPTVVASEPWDGKDGEVIEEDEFSLDELMGDSSSANDEL

SEQ ID NO: 188951 - protein, 359 aa, Zea Mays
MRPAVVTVLLLVAAAASPAAALYSAGSPVLQLNPNNFKSKVLNSNGVVLVEFFAPWCGHCKQLAPAWEKAAGVLKGVATVAALDADAHQALAQEYGIKGFPTIKVFSPGKPPVDYQGARDVKPIVEFALSQVKSLLRDRLSGKASAGSNGKTSGGSSEKSEPSASVELNSRNFDELVVKSKDLWIVEFFAPWCGHCKKLAPEWKKAAKNLKGQVKLGHVDCDAEKSLMSKYKVEGFPTILVFGADKESPFPYQGARVASAIESFALEQLEANSGPAEVSELTGPDVMEEKCASAAICFVSFLPDILDSKAEGRNKYLELLLSVAEKFKKSPYSLSGQLLASKLISRTRLVWAATAIPPW

SEQ ID NO: 188952 - protein, 349 aa, Zea Mays
MAPKRPAAAAAAASGSASEASDAEADVGHQPSSPSPSKTPPTNPNPKSAAAGPAEDSTAAGSDSEAAYDSDADHRPAHRKAAVAASPSRKPRSPRPRSRSRSPDAASYSDGAASDADADPAARDGADSADDGNASPLALPRLSRAEAAAIKPLSSRPMDPPRRSMLSDKVRRLKQKYNQLASRGKNGRDPDLPTQHEQSVYEIGKKVWGTSTGGDGYEIGGDSQEEHEIGESDEDVESGWDERARKNRRLMPITMANGHGSGFGAGRGKFDVEKGKDAYPYLWETVEDLSKEHPNGVAFKKAFELIEGARARGMEEKLRKFRLTEIRHQLRRMELMKETVKMVLDALEG

SEQ ID NO: 188953 - protein, 513 aa, Zea Mays
MRGGGGASWLSFRGVVVEEEEAVVSAPEKPMRRGRRRWGAEVDDGYSPSSTGGGGSSCCDSFGCDSPLAGFVRPDGDPDTDLETDGLATSTSSAFTERQDDEAEEALYGVKEEEWAQIQEPAKNPAFRATPECHKQRYRTDAAVLLHGRKGSKQRPASLDLGSPGFHGATFSPSFVIGGVGLMNKGLGASVIRSDVFHSPGTPNYPRHRASVLGCHKGWSSERVPHPSKGNRRYPGSSMAFPYSNGRTLPSKWEDAERWIFSPNSSDALGRTTVAHARRPKSKSGPLGPPGRLGGQYSSVSSVSLLDNGRAGPITANSPFAAGVLMPEHVCEGKSTNGTYSSRPIGNEINIGRGVKICPLNGGSHPVRTSRVRQRLDYAVESSVSLPSTQESVQDEQVEITEDSASTIASIISRKDAATQTSPELSRSSSPNTRPTFNGSLSTEQVKEKGSCLSDLDIRDVQMDDRVTLTRWSKKNVTRSSNKNSTNIIEWSEKTVESKSSSWGFAKAKCISK

SEQ ID NO: 188954 - protein, 398 aa, Zea Mays
MRGGGGASWLSFRGVVVEEEEAVVSAPEKPMRRGRRRWGAEVDDGYSPSSTGGGGSSCCDSFGCDSPLAGFVRPDGDPDTDLETDGLATSTSSASAAFTERQDDEAEEALYGVKEEEWAQIQEPAKNPAFRATPECHKQRYRTDAAVLLHGRKGSKQRPASLDLGSPGFHGATFSPSFVIGGVGLMNKGLGASVIRSDVFHSPGTPNYPRHRASVLGCHKGWSSERVPHPSKGNRRYPGSSMAFPYSNGRTLPSKWEDAERWIFSPNSSDALGRTTVAHARRPKSKSGPLGPPGRLGGQYSSVSSVSLLDNGRAGPITANSPFAAGVLMPEHVCEGKSTNGTYSSRPIGNEINIGRGVKICPLNGGSHPVRTSRVRQRLDYAVESSVSLPSTQESVQG

SEQ ID NO: 188955 - protein, 538 aa, Zea Mays
MRGGGGASWLSFRGVVVEEEEAVVSAPEKPMRRGRRRWGAEVDDGYSPSSTGGGGSSCCDSFGCDSPLAGFVRPDGDPDTDLETDGLATSTSSAFTERQDDEAEEALYGVKEEEWAQIQEPAKNPAFRATPECHKQRYRTDAAVLLHGRKGSKQRPASLDLGSPGFHGATFSPSFVIGGVGLMNKGLGASVIRSDVFHSPGTPNYPRHRASVLGCHKGWSSERVPHPSKGNRRYPGSSMAFPYSNGRTLPSKWEDAERWIFSPNSSDALGRTTVAHARRPKSKSGPLGPPGRLGGQYSSVSSVSLLDNGRAGPITANSPFAAGVLMPEHVCEGKSTNGTYSSRPIGNEINIGRGVKICPLNGGSHPVRTSRVRQRLDYAVESSVSLPSTQESVQDEQVEITEDSASTIASIISRKDAATQTSPELSRSSSPNTRPTFNGSLSTEQVKEKGSCLSDLDIRDVQMDDRVTLTRWSKKNVTRSSNKNSTNIIEWSEKTVESKSSSWGFAKAKCISKLIERTQKLLHGRILKKQKLMQQFRS

SEQ ID NO: 188956 - protein, 579 aa, Zea Mays
MRGGGGASWLSFRGVVVEEEEAVVSAPEKPMRRGRRRWGAEVDDGYSPSSTGGGGSSCCDSFGCDSPLAGFVRPDGDPDTDLETDGLATSTSSAFTERQDDEAEEALYGVKEEEWAQIQEPAKNPAFRATPECHKQRYRTDAAVLLHGRKGSKQRPASLDLGSPGFHGATFSPSFVIGGVGLMNKGLGASVIRSDVFHSPGTPNYPRHRASVLGCHKGWSSERVPHPSKGNRRYPGSSMAFPYSNGRTLPSKWEDAERWIFSPNSSDALGRTTVAHARRPKSKSGPLGPPGRLGGQYSSVSSVSLLDNGRAGPITANSPFAAGVLMPEHVCEGKSTNGTYSSRPIGNEINIGRGVKICPLNDEQVEITEDSASTIASIISRKDAATQTSPELSRSSSPNTRPTFNGSLSTEQVKEKGSCLSDLDIRDVQMDDRVTLTRWSKKNVTRSSNKNSTNIIEWSEKTVESKSSSWGFAKAKCISKIDREDTEITAWENIEKAKADAAIQKLVIKLEKKRSSSLDKILNTLKSAQRKSQVMHEHERDAVTANQDGKGSRKAKKRAQLSKNGQISSLSGCFTCHAF

SEQ ID NO: 188957 - protein, 269 aa, Zea Mays
MLCGRRASLPGSYRTVFQGVYAWFPKGGAGPVGVRERQLPSRRAGSPVRHPPPQVNGAADVQVRIRRQRRRERHVPPASAPSASRVGHHVRRPRAQLVVGVVATAGARPGQRERAAQEGQPHAVRRAGAGAPALRGAPGLPLALPRRPAARPPAAHAGGRASGGKRRRRTAPRARSGQPAGARRRRGGEEREAVRRTLKGRREEEGPVRGSGGQRAAHQDDQGRRAVGRRPVVGPGPVRRRELTVIQCEVDDKDSFIHHIEQVTKPVLW

SEQ ID NO: 188958 - protein, 471 aa, Zea Mays
MELKPGMSALVTGGASGIGKALCIAFARRGLFVTVVDFSEENGREVATLVQKENSKFHGDLRIPSSIFVKCDVSNADNLAACFEKHVQTYNGLDICINCAGIANKTLVYDDTSDGTRTWRHAVNVNLVAVIDGTRIASQIMRNQKKPGVIINIGSAAGLYPMFLDPVYSAAKGGVVMFTRSLSPLKRHGVRVNVLCPEFVQTNMAEQMSRKVIDSSGGYLEMEDVVNGTFELIQDESKAGACLWITKRRGMEYWPTPEEQRKYMVNPNKSKRMLTNNIYPSIRMPEFFEKIVVHTLSHNFRNATRLERVQLRFPIKAHSALVKIIYAGVNASDVNFSSGRYFSGNPKETASRLPFDAGFEGVGIVAAVGDSVSHIKVGTPVALMTFGSYAEFTEVPAKHLLPVPRPDPEVVAMLTSGLTASISLEKAGQMTSGQVVLVTAAAGGTGQFAVQFLGTYFGSLYFYWIEQWARY

SEQ ID NO: 188959 - protein, 594 aa, Zea Mays
MELKPGMSALVTGGASGIGKALCIAFARRGLFVTVVDFSEENGREVATLVQKENSKFHGDLRIPSSIFVKCDVSNADNLAACFEKHVQTYNGLDICINCAGIANKTLVYDDTSDGTRTWRHAVNVNLVAVIDGTRIASQIMRNQKKPGVIINIGSAAGLYPMFLDPVYSAAKGGVVMFTRSLSPLKRHGVRVNVLCPEFVQTNMAEQMSRKVIDSSGGYLEMEDVVNGTFELIQDESKAGACLWITKRRGMEYWPTPEEQRKYMVNPNKSKRMLTNNIYPSIRMPEFFEKIVVHTLSHNFRNATRLERVQLRFPIKAHSALVKIIYAGVNASDVNFSSGRYFSGNPKETASRLPFDAGFEGVGIVAAVGDSVSHIKVGTPVALMTFGSYAEFTEVPAKHLLPVPRPDPEVVAMLTSGLTASISLEKAGQMTSGQVVLVTAAAGGTGQFAVQVLKKEFPRGVDIIYESVGGEMFDLCLNALAVHGHLIVIGMISQYQGEDGWKPKNYTGLCEKILAKSQTVAGFFLVQYAHLWQDHLNKLFDLYASGKLKVSLDPKQFLGVASVVDAVEYLHSGKSVGKVVVCIDPSYGQIVAKL

SEQ ID NO: 188960 - protein, 623 aa, Zea Mays
MELKPGMSALVTGGASGIGKALCIAFARRGLFVTVVDFSEENGREVATLVQKENSKFHGDLRIPSSIFVKCDVSNADNLAACFEKHVQTYNGLDICINCAGIANKTLVYDDTSDGTRTWRHAVNVNLVAVIDGTRIASQIMRNQKKPGVIINIGSAAGLYPMFLDPVYSAAKGGVVMFTRSLSPLKRHGVRVNVLCPEFVQTNMAEQMSRKVIDSSGGYLEMEDVVNGTFELIQDESKAGACLWITKRRGMEYWPTPEEQRKYMVNPNKSKRMLTNNIYPSIRMPEFFEKIVVHTLSHNFRNATRLERVQLRFPIKAHSALVKIIYAGVNASDVNFSSGRYFSGNPKETASRLPFDAGFEGVGIVAAVGDSVSHIKVGTPVALMTFGSYAEFTEVPAKHLLPVPRPDPEVVAMLTSGLTASISLEKAGQMTSGQVVLVTAAAGGTGQFAVQLAKLAGNKVVATCGGESKAELLASLGVDRVINYRNERVKDVLKKEFPRGVDIIYESVGGEMFDLCLNALAVHGHLIVIGMISQYQGEDGWKPKNYTGLCEKILAKSQTVAGFFLVQYAHLWQDHLNKLFDLYASGKLKVSLDPKQFLGVASVVDAVEYLHSGKSVGKIVAKL

SEQ ID NO: 188961 - protein, 350 aa, Zea Mays
MKFRESMVVHTLSHNFRNATRLERVRLRLPIEPHNTLVKIIYAGVNASDVNFSSGRYFSVNSKEAASHLPFDAGFEAVGIVASVGDSVKHIKVGTSVALMTFGSYAEFVLISAKSLIPVPRPDPEVVAMLTSGLTASIALEKAGQMISGQVVLVTAAAGGTGQFAVQLAKLAGNKVVATCGGESKSMFLTSLGVDRVINYQSEKIKDVLKKEFPRGVDIIYESVGGETFDVCLNALAVYGRLIVIGMISQYQGEGGWKPQNYTGLCEKILGKSQTVAGFFLVQYAHLWQDHLEKLFNLYSSGKLKVFVDPKKFVGVASVADAVEYLHSGRSVGKVVVCMDLSYGQTLAKL

SEQ ID NO: 188962 - protein, 75 aa, Zea Mays
MIVESAAGALELLYPCRCGDYFSITSGELSGMGIVVTGDGEEVEGLQASDSGSASVVLGCGSCSLKIRLVIDGTS

SEQ ID NO: 188963 - protein, 265 aa, Zea Mays
MPNTDQPFRLNWASFSMGDRRSDSASDHSIFVGDLASDVNDATLLEAFSSRYSSVKGAKVVIDANTGRSKGYGFVRFGDDSEKTQAMTEMNGVYCSSRPMRIGPATPRKSSGTSGSNGSAARSDGGDLTNTTVFVGGLDPNVSEEDLRQTFSQYGEISSVKIPIGKQCGFVQFAQRKNAEDALQGLNGSTIGKQNVRLSWGRNPANKQFRGDNGNQWNNGGMYYAAPPFYNGYGYPAAAPFPDPGMYAAPAYGAYPFYGNQQQVS

SEQ ID NO: 188964 - protein, 270 aa, Zea Mays
MHTAPQMNARSRRPAAARGAKAPPKSDSRVTETDPRKTVTPVKGSGNAGTRGTMNRIQSRRERKLALQQDVDKLKKKLRHEENVHRALERAFTRPLGALPRLPPYLPSQTLALLAEVAVLEEEVVRLEEQVVSFRQGIYQEATVFSSAKNTQLPGGDAPVPAQLTPPNPVLNSDISPATESHHPPNARPSSPHNGVANGKQTPTKPVVNTTSPSQDDRSGAGKENQSCSNSSSTSGRRTPKSRPTATPPDRRSRATPSQLNLKKQTAEHL

SEQ ID NO: 188965 - protein, 119 aa, Zea Mays
MHTAPQMNARSRRPAAARGAKAPPKSDSRVTETDPRKTVTPVKGSGNAGTRGTMNRIQSRRERKLALQQDVDKLKKKLRHEENVHRALERAFTRPLGALPRLPPYLPSQIRLPGDRVAV

SEQ ID NO: 188966 - protein, 219 aa, Zea Mays
MNRIQSRRERKLALQQDVDKLKKKLRHEENVHRALERAFTRPLGALPRLPPYLPSQTLALLAEVAVLEEEVVRLEEQVVSFRQGIYQEATVFSSAKNTQLPGGDAPVPAQLTPPNPVLNSDISPATESHHPPNARPSSPHNGVANGKQTPTKPVVNTTSPSQDDRSGAGKENQSCSNSSSTSGRRTPKSRPTATPPDRRSRATPSQLNLKKQTAEACIL

SEQ ID NO: 188967 - protein, 123 aa, Zea Mays
MNWIQQYSPMKVDWANKWAVIPYNGSPAYLQGVQVTLPAGAVTELLLLSVESQATPAGQSVDPKVQAVLDQFVEVFEDPVGLPPSRTCDHTIPLVPGTNVCVLPLSSKVFRDCSCILPLSFKV

SEQ ID NO: 188968 - protein, 127 aa, Zea Mays
MEPSPTSSSPAVARRLSPEVRRVPKRALEELLEQVQRAVEMLRDADADLAISLSEETAAASPEAEDRKDDVGVDGDGMATSSVASDSDYETTQMCDLLKSKVGSLEFLQKLNGIQKSVDQNCAGRCG

SEQ ID NO: 188969 - protein, 169 aa, Zea Mays
MATSSVASDSDYETTQMCDLLKSKVGSLEFLQKLNGIQKSVDQNCAVEPDTSWDIIKSDLWEDGDSDDGYVLVKQEDVVDGITSFMAACLLSLKRTKDLPPDQLQKALRKMFSAEKKKSKIRKAWDGTKLIYNVTSWGATAVGFYNNRALLTVASTAFRTSCRVISKFL

SEQ ID NO: 188970 - protein, 238 aa, Zea Mays
MEPSPTSSSPAVARRLSPEVRRVPKRALEELLEQVQRAVEMLRDADADLAISLSEETAAASPEAEDRKDDVGVDGDGMATSSVASDSDYETTQVGSLEFLQKLNGIQKSVDQNCAVEPDTSWDIIKSDLWEDGDSDDGYVLVKQEDVVDGITSFMAACLLSLKRTKDLPPDQLQKALRKMFSAEKKKSKIRKAWDGTKLIYNVTSWGATAVGFYNNRALLTVASTAFRTSCRVISKFL

SEQ ID NO: 188971 - protein, 275 aa, Zea Mays
MAPSSYEVAASILLCAEDSSSILDLEAEAEEEALLARSGEPGGGAEFPVPSEECVAGFLESEAAHMPREDYAERLRSGGMDLRVRTDAIDWIWKVHTCYGFGPLTACLAVNYLDRFLSLYQLPEGKAWMTQLLSVACLSLAAKMEETYVPSSLDLQQAGDARYVFEAKTIQRMELLVLSTLKWRMQAVTPLSYVDYFLHRLRGGAAPSRRAVLRSAELILCIARGTHCLDFRPSEIALAVAATVAGEERAVDIDRAFTHRVHKVYACTCLSRRSR

SEQ ID NO: 188972 - protein, 115 aa, Zea Mays
MFGVAGSPAYVAPEVLSGSYSEKVDIWGAGVLLHVLLLGSLPFQGGSLDAVFESIKTLELDFSSTPWESISVLGRDLIGRMLNRDVSCRMTADEVLSRSPMGRILHRMPPEGGSC

SEQ ID NO: 188973 - protein, 335 aa, Zea Mays
MALEAVVLSQQGSRFGCGAMAAGGPWSGLFFSGMEGVVEIGSGAGGGRDVAGCSPPQLLQEPAARALPVASSVGSASGGAGQDAPAALAVTATAAAGTGRRKRRRMRPLKNEEEVESQRMVHIAVERNRRKQMNEYLAALRSLMPPAYTQRGDQASIVGGAINFVKELEQLLQSLEAQQRRSSRRQGPACAVDPDDAGPFADFFTFPQYSMCAAAAAPSENPGADADAEQEASGSKPSGVADVEATMVESHANLRVLSRRRPRQLLRLVLGLQGHRLTVLHLNMSSAGHMVLYSFSLKVTPQDHNHNLPPPPTFPRKQSQAEIKLATRWLSVQGV

SEQ ID NO: 188974 - protein, 418 aa, Zea Mays
MADGGAGAYREFKALAEAADRKFARARDLPLYGGGDHHSRKAFKAYTRLWRLQQERRRELVAAGLRRWEIGEVASRIGQLYYARYLRAAEPRSLVGAYVFYEAIYSRGYFGAAAAAVGTDGGGGGVSRHQALLIRYKELRFIARFLVVAMLMRRAEAVDHLAARLRALVEETKAAYPKTNFKEWKQVLQELGRFLKADGAYKGSRSLRYDNLFDSYPSNLVSIARFHSKRVLKLKEAVLTSYRRNEIKFTELTLDTFRMLQCLEWEPTGSYQIAAKELTENGTVSDQSGPSGLIDIQLSTEISDGSLPSNPQKVLATICEELSQDSILLIYISASGSAEQSFASQKFGSSSSRARAASAFPTDKPNSHNSSDNHLWLGPRGSGGPNNLYPDDLIPFTRYPLFLVIDSENSHAFKAGHT

SEQ ID NO: 188975 - protein, 582 aa, Zea Mays
MADGGAGAYREFKALAEAADRKFARARDLPLYGGGDHHSRKAFKAYTRLWRLQQERRRELVAAGLRRWEIGEVASRIGQLYYARYLRAAEPRSLVGAYVFYEAIYSRGYFGAAAAAVGTDGGGGGVSRHQALLIRYKELRFIARFLVVAMLMRRAEAVDHLAARLRALVEETKAAYPKTNFKEWKQVLQELGRFLKADGAYKGSRSLRYDNLFDSYPSNLVSIARFHSKRVLKLKEAVLTSYRRNEIKFTELTLDTFRMLQCLEWEPTGSYQIAAKELTENGTVSDQSGPSGLIDIQLSTEISDGSLPSNPQKVLATICEELSQDSILLIYISASGSAEQSFASQKFGSSSSRARAASAFPTDKPNSHNSSDNHLWLGPRGSGGPNNLYPDDLIPFTRYPLFLVIDSENSHAFKVIHNSEKGEPAALLLSPRTSSAMPGVESTAHGSQFTYFLTAPMQAFCQLAGITSDIDTDTYANAENILFSALEEYEGILCTSVGLNNVWGQILPDPFLRRLILRFIFCRAVLFYFHSDEHEYLPTCLPSLPESVSPHAEAIRTPILSLAENLVVSDRFDFRDSTRNKK

SEQ ID NO: 188976 - protein, 547 aa, Zea Mays
MADGGAGAYREFKALAEAADRKFARARDLPLYGGGDHHSRKAFKAYTRLWRLQQERRRELVAAGLRRWEIGEVASRIGQLYYARYLRAAEPRSLVGAYVFYEAIYSRGYFGAAAAAVGTDGGGGGVSRHQALLIRYKELRFIARFLVVAMLMRRAEAVDHLAARLRALVEETKAAYPKTNFKEWKQVLQELGRFLKADGAYKGSRSLRYDNLFDSYPSNLVSIARFHSKRVLKLKEAVLTSYRRNEIKFTELTLDTFRMLQCLEWEPTGSYQIAAKELTENGTVSDQSGPSGLIDIQLSTEISDGSLPSNPQKAIIYHPTAAHLLAVLATICEELSQDSILLIYISASGPNNLYPDDLIPFTRYPLFLVIDSENSHAFKVIHNSEKGEPAALLLSPRTSSAMPGVESTAHGSQFTYFLTAPMQAFCQLAGITSDIDTDTYANAENILFSALEEYEGILCTSVGLNNVWGQILPDPFLRRLILRFIFCRAVLFYFHSDEHEYLPTCLPSLPESVSPHAEAIRTPILSLAENLVVSDRFDFRDSTRNKK

SEQ ID NO: 188977 - protein, 950 aa, Zea Mays
MGGGRKRGRTQRRHFKQGRENVWKHNPQRPPAGEGGEAREDNPSWQPFATENPAFEEYYKEQQIVSEEEWDSFMSMLRKPLPATFRINASCQFFQDICSQLENDFRKSLETEVTDDHEEDAIRPLPWYPGNLAWHLNFSRMQLRRNQALERRGAYHYIKKKNSQGRSGQYKKLSLMEARPPDADAATTDTSIREALSGITFKAGMQPENTTVWNRTLWLGVFLGKGFHEFLKRENEVGNITRQEAVSMVPPLFLNVQPDHHILDMCAAPGSKTFQLLEMIHQSTKPGLLPNALVVANDVDVQRCNLLIHQTKRMCTANLIVTNHEAQNFPGCNLAKFCSKMCMDEAKVQRLEFDRVLCDVPCSGDGTVRKAPDMWRKWNAGMGNGLHHLQVEIAMRGMSLLKVGGRMVYSTCSMNPVENEGVVAEILRRCGDSVELLDVSNELPELARRPGLSTWKVRDRGSWFGVHEDVPRYRKHVISASMFPSGKGSKDSGTGSSSVEVNTDVADADMKDSTDMGEGEQETTVTIDDSNNGDNLKTEEGTKVDCESGEVTTSSSYKKLNSTSIRTEHSDYPLHRCMRIVPHDQNSGAFFIAVLHKLSPLNENQVVDGVRIDQNISKDKTEKLEKDLVSHKASSEENTVHQQVIDNANVLDGEQNRDRDNKSSEDKSSEDSKVNVNEAAKGQAGTRDRRRQQNQGRWRGVDPVIFFKDEVTVKSIVSFYGITDSFPLEGHLVTRNPDTSHVKRIYYVSKSVQDVLELNIKIGERLKITSLGLKIFERQSSKEGSPCTFRLSSEGLPLLLPYITKQILYASAIDFQHLLQYRTIKFPDFVDAKFGEEASALLPGCCVVVLREGHQDIGSIATDPSAIAIVCWKGKTNLCVMVSPLDGKELLERISLRHGLKIPKGDKEKPSQEIAGSDELLDCATEVDDQESLPESKASDIEISDAKEAE

SEQ ID NO: 188978 - protein, 203 aa, Zea Mays
MSLLKVGGRMVYSTCSMNPVENEGVVAEVRDRGSWFGVHEDVPRYRKHVISASMFPSGKGSKDSGTGSSSVEVNTDVADADMKDSTDMGEGEQETTVTIDDSNNGDNLKTEEGTKVDCESGEVTTSSSYKKLNSTSIRTEHSDYPLHRCMRIVPHDQNSGAFFIAVLHKLSPLNGNIVPLSFILHIAVHDIKLTYITVLVSTS

SEQ ID NO: 188979 - protein, 735 aa, Zea Mays
MQLRRNQALESFHEFLKRENEVGNITRQEAVSMVPPLFLNVQPDHHILDMCAAPGSKTFQLLEMIHQSTKPGLLPNALVVANDVDVQRCNLLIHQTKRMCTANLIVTNHEAQNFPGCNLAKFCSKMCMDEAKVQRLEFDRVLCDVPCSGDGTVRKAPDMWRKWNAGMGNGLHHLQVEIAMRGMSLLKVGGRMVYSTCSMNPVENEGVVAEILRRCGDSVELLDVSNELPELARRPGLSTWKVRDRGSWFGVHEDVPRYRKHVISASMFPSGKGSKDSGTGSSSVEVNTDVADADMKDSTDMGEGEQETTVTIDDSNNGDNLKTEEGTKVDCESGEVTTSSSYKKLNSTSIRTEHSDYPLHRCMRIVPHDQNSGAFFIAVLHKLSPLNENQVVDGVRIDQNISKDKTEKLEKDLVSHKASSEENTVHQQVIDNANVLDGEQNRDRDNKSSEDKSSEDSKVNVNEAAKGQAGTRDRRRQQNQGRWRGVDPVIFFKDEVTVKSIVSFYGITDSFPLEGHLVTRNPDTSHVKRIYYVSKSVQDVLELNIKIGERLKITSLGLKIFERQSSKEGSPCTFRLSSEGLPLLLPYITKQILYASAIDFQHLLQYRTIKFPDFVDAKFGEEASALLPGCCVVVLREGHQDIGSIATDPSAIAIVCWKGKTNLCVMVSPLDGKELLERISLRHGLKIPKGDKEKPSQEIAGSDELLDCATEVDDQESLPESKASDIEISDAKEAE

SEQ ID NO: 188980 - protein, 205 aa, Zea Mays
MRRESKATWTTGGNTWNTALQANVLPAAFGSNRRSRSENKKAFFEVGLLRCSEELTGDNAEECNSNESGWTMYLGSPVNSDDLKANGSKWSNVGSGCSNGRSKNDNMDYDDGDYDSLASDASTGPAQVKVLNGKEKKIHEKRDNSIEEQDSDEQDEQTKLPNNCDKKAGKMKKEEKTTRRSHNKRRSSCSSRTSFFRCIPKEEIR

SEQ ID NO: 188981 - protein, 493 aa, Zea Mays
MPPPTVPFFLTSTTLATTAKKPQPQSPLCDAQAQAAAASLASAASASYAARMRLNPHLALRLFDHLLRSGADPDPAAYELAFASCARARDRATAAQLHAHAAKRGLVASHRRVRCRLVHAYAVCGMLPHARRVFDGGTDNDMVAWNCLLRGYAQEGGDEDLLRDFFARMPSRDSVSWNTVLSWCVVNGEYDEAIAVFREMLASQECQPDRVTLVSVVSAIAYLGALAHGLWAHAYVFRKCIEVEEKLSSALINMYSKCGFIEGAVYVFDNVGGKRSLDTWNAMLAGFTANGYSERALELFTRMESTRLMPNKITFNTVLNACSHGGLVEEGMKYFQRMSRFYGIEPDIAHYGCMVDLFCRAGMFEKAEEIIQTMPMEPDASMLKALLGACRTHKNLELGKKVGHRLIEAAANDHAGYVLLSNIYALDGNWGGVHKVRKLMLDRGVLKTPGSSSVELNGVIHEFISGDKSHSRKRDIYKMLGGCSCDDRQVLKV

SEQ ID NO: 188982 - protein, 585 aa, Zea Mays
MPPPTVPFFLTSTTLATTAKKPQPQSPLCDAQAQAAAASLASAASASYAARMRLNPHLALRLFDHLLRSGADPDPAAYELAFASCARARDRATAAQLHAHAAKRGLVASHRRVRCRLVHAYAVCGMLPHARRVFDGGTDNDMVAWNCLLRGYAQEGGDEDLLRDFFARMPSRDSVSWNTVLSWCVVNGEYDEAIAVFREMLASQECQPDRVTLVSVVSAIAYLGALAHGLWAHAYVFRKCIEVEEKLSSALINMYSKCGFIEGAVYVFDNVGGKRSLDTWNAMLAGFTANGYSERALELFTRMESTRLMPNKITFNTVLNACSHGGLVEEGMKYFQRMSRFYGIEPDIAHYGCMVDLFCRAGMFEKAEEIIQTMPMEPDASMLKALLGACRTHKNLELGKKVGHRLIEAAANDHAGYVLLSNIYALDGNWGGVHKVRKLMLDRGVLKTPGSSSVELNGVIHEFISGDKSHSRKRDIYKMLGEICQQLKSSGYTPDTSQVLLDIDDEDVKESSLALHSEKLAIAFGLISTAPGTPIRVVNNLRICGDCHNAIKLISKIYGRCIIVRDANRFHHFRKGSCSCGDYWF

SEQ ID NO: 188983 - protein, 241 aa, Zea Mays
MGGDQVQSSNLPADSANESVHSKDKGEESSLATTTTGPGKSKGKGARETSESQKEDYIHVRARRGQATNSHSLAERLRREKISERMKLLQDLVPGCSKVTGKAVMLDEIINYVQSLQRQVEFLSMKLATVNPRLDLNIEGLLSKDLLRFPGVPSSSLGFSPEMMHPQLQLSQPGLIQGGAAGMANPDVFRRIMQAQLSAKDGSQMPPHALNGAFSDVAQQQMAYPSSQDLSIGPSQDGFQM

SEQ ID NO: 188984 - protein, 434 aa, Zea Mays
MGIQGNKAATHEHDFLSLYAAAAAKDAPLLLHDSKAPPPSQGNFLLKTHDFLQPLDQKPGAPPEPSPLPASAAESRHQPQQQVVVANQHALPLPGGVGTFSISPAPVSVALPAAVVKSEPPFVLWGQPAATLHPGARDLTVRVDRKGGSCSDGGTDQRPNTPRSKHSATEQRRRSKINDRFQILRELLPHSDQKRDKATFLLEVIEYIRFLQEKVQKYEATFPEWNQENAKMLPWSKGQISGDSPPDPSHFMRNGSSPGSNFTGKLDDNHNIVTSAAASGAQDQVETDHMASGCYRSAETTANFTNNAMSQSQPQWTGPSPVDDSAVNSETLNNQQLVIDEGTIRVSSNYSQELLNSLTHALQSSGVDLSQANISVQINMGKRAAKRPAAGVSSNSKEPADPASSNELGHQLTLSGAGADCLSHATKRHKRSNS

SEQ ID NO: 188985 - protein, 1559 aa, Zea Mays
MEHLFMQAFESRDRVAAQVQQQADFYSQTLASSLLAAGHQPPEWLIPSTTLPQELNGKPIVLTGRQITTPAINRTVFLPLAIPSTLSTKSGDPNGYDGYPNTNCTAMGTNQHEEEHQEQSSLAQELTESCTADKMFSRIQRSRTRQMHIEDRVHGQDQAAKSGSCDGMHRSNLKTVGSNRAAASSLMPCDDVPNLAATTSDPGQGSGFCAIQGKSIDFLKCNNNPEDQGVKLDGFPPLIVENKIICSDSDIGVSNNCSIRDSLGAPLPDFSKPNTADSVCLCHRIPETHLLVEPKILQFDVAESVCMNPSSEQTGQQQESSLKSNHLDLAFTNPSSEDPSSTSSQGPHSMGRLLLNHVKSRNLNPDSEPVEQHHKYTSECGHPDLTSMHSPNKKPSLTCPVEAPNSMGEPLLHKDTEHIPETNSLGRAYSKFSQPLKIDTSNSNETNCSVVNSLLDNDTLQATEDTDKLKSHVSPPYSGPLQLPTQLADARFGAHTSPGILPNSLLGVDGCNHLSNLQKNDTNSRCSRYRSAVSLELLPPQNFISTDACQSRLLSYRTQSNDKHSSSVASAMNASKSADSKLPQEQYLLVRPSLEFNGSISDAETPLGRSPLGMQNEMLQADPVYDSANCSPGILGDDAHVSKAYGGSADNRKNISVVPKVGPISSSRIRDMQITEKNVVASSEKNNGKLQEGKAQETPHPKDDVQVNADSCTAENIEKMKSPCTSESCEENNKHQEDRGHAQKKSAADVVQINGGMSSKRKRMKCQDIAFPSSQDTNPLFPNHQDGIGTHVVIAEKISMEIQPSDPYILRSTGFDDFMLLKSETKNDAVNHSISVASDVQQNESSSPKLRNRFSLAEVALCNSSRAKALSPNFSCDISSRNVAEEMDLQNYQAQLQNTFDVATSSIMPSRSDISLDSVELCSQEENTYLKGEGLSVSNSNVEHSRMAPQMDEILSQSVILNPANYLSTDSTNIFLNYALDQHGKHAPSPVKKLSYGSGVEADRKFRSEDLTGCLLYDGTTSRKKDSDSVKFNDAMPQFESFDFSLPLDSSTTEEKAFGSVHDSIQFGTFNSDPANKHEMSAVSGMYQLLATMSGKATNCLFNDDERQPGESIDGSVTDIFGSSGLGHKGSFITPDFAASCSSNAANKKDNGENPLTPSVEKYCLGKLSEKNGSVSEHMGSIPELLCFRIDEDNDIAEGNDYREILPRSIGNQEQSGRKALQDITGLCQSIGNSASYSIGMSMDTGDTDMTVETCSSELNHHPDLRNDGDNKKPKESCGSLLKKGGKMSRSLHNRLSKTETRHMNEANPGKRSKPSNIVANVASFIPLVKPKVQPTACVKKDVRVKALETAEAAKRLEEKKRSEREMRKAAAKLEREKLKQEKELKQKEEEEQKKKRGADVATRKRQRDEEERREKERKRKCIEEARKQQKRPIERKHANINNAHPEGHDNKELQQNSAEAVKGPVKFDEMTGLGGNATNSNNEMVVITDERPAISGPNCQENIPNSIEESYIMTPYKDSDDDDDEDFEHIEHSRRRRKLVPSWARYVSTLQFQNLLIT

SEQ ID NO: 188986 - protein, 1585 aa, Zea Mays
MEHLFMQAFESRDRVAAQVQQQADFYSQTLASSLLAAGHQPPEWLIPSTTLPQELNGKPIVLTGRQITTPAINRTVFLPLAIPSTLSTKSGDPNGYDGYPNTNCTAMGTNQHEEEHQEQSSLAQELTESCTADKMFSRIQRSRTRQMHIEDRVHGQDQAAKSGSCDGMHRSNLKTVGSNRAAASSLMPCDDVPNLAATTSDPGQGSGFCAIQGKSIDFLKCNNNPEDQGVKLDGFPPLIVENKIICSDSDIGVSNNCSIRDSLGAPLPDFSKPNTADSVCLCHRIPETHLLVEPKILQFDVAESVCMNPSSEQTGQQQESSLKSNHLDLAFTNPSSEDPSSTSSQGPHSMGRLLLNHVKSRNLNPDSEPVEQHHKYTSECGHPDLTSMHSPNKKPSLTCPVEAPNSMGEPLLHKDTEHIPETNSLGRAYSKFSQPLKIDTSNSNETNCSVVNSLLDNDTLQATEDTDKLKSHVSPPYSGPLQLPTQLADARFGAHTSPGILPNSLLGVDGCNHLSNLQKNDTNSRCSRYRSAVSLELLPPQNFISTDACQSRLLSYRTQSNDKHSSSVASAMNASKSADSKLPQEQYLLVRPSLEFNGSISDAETPLGRSPLGMQNEMLQADPVYDSANCSPGILGDDAHVSKAYGGSADNRKNISVVPKVGPISSSRIRDMQITEKNVVASSEKNNGKLQEGKAQETPHPKDDVQVNADSCTAENIEKMKSPCTSESCEENNKHQEDRGHAQKKSAADVVQINGGMSSKRKRMKCQDIAFPSSQDTNPLFPNHQDGIGTHVVIAEKISMEIQPSDPYILRSTGFDDFMLLKSETKNDAVNHSISVASDVQQNESSSPKLRNRFSLAEVALCNSSRAKALSPNFSCDISSRNVAEEMDLQNYQAQLQNTFDVATSSIMPSRSDISLDSVELCSQEENTYLKGEGLSVSNSNVEHSRMAPQMDEILSQSVILNPANYLSTDSTNIFLNYALDQHGKHAPSPVKKLSYGSGVEADRKFRSEDLTGCLLYDGTTSRKKDSDSVKFNDAMPQFESFDFSLPLDSSTTEEKAFGSVHDSIQFGTFNSDPANKHEMSAVSGMYQLLATMSGKATNCLFNDDERQPGESIDGSVTDIFGSSGLGHKGSFITPDFAASCSSNAANKKDNGENPLTPSVEKYCLGKLSEKNGSVSEHMGSIPELLCFRIDEDNDIAEGNDYREILPRSIGNQEQSGRKALQDITGLCQSIGNSASYSIGMSMDTGDTDMTVETCSSELNHHPDLRNDGDNKKPKESCGSLLKKGGKMSRSLHNRLSKTETRHMNEANPGKRSKPSNIVANVASFIPLVKPKVQPTACDVRVKALETAEAAKRLEEKKRSEREMRKAAAKLEREKLKQEKELKQKEEEEQKKKRGADVATRKRQRDEEERREKERKRKCIEEARKQQKRPIERKHANINNAHPEGHDNKELQQNSAEAVKGPVKFDEMTGLGGNATNSNNEMVVITDERPAISGPNCQENIPNSIEESYIMTPYKDSDDDDDEDFEHIEHSRRRRKLVPSWARGENLEKILLSNYVLDPRKIFARKRSSDLSEICPAHIPQRGFR

SEQ ID NO: 188987 - protein, 60 aa, Zea Mays
MFFSVSHCFFCYLVVTAWRGQHPAVLRTFSQRLSRFVICERSLTQSTGGPSGPNTPNFVR

SEQ ID NO: 188988 - protein, 239 aa, Zea Mays
MLKHFGVPLDGFDLNIDSRGSPPLGGGEVFLRVRNINSTLTAANWVDEGMVKRIRGVSFSTRVSPQLENRIIYAARGIFNRFIPDVHIHTDHRSGSAGGRSPGYGVSLVAETTTGCLLSVDVTVSYPSVDEINEESEKPELTSPEDLGVQAASMLLEEVAQGGVVDSTHQGLLFILCALCPPDVSKVRVGQLTPYGIETLRNIRDFLDVKFIIKPDPNSNTVTLKCVGAGVKNLARKIS

SEQ ID NO: 188989 - protein, 452 aa, Zea Mays
MDREFPAYLVLDNNKRIKGQSLSRTRLPANKYYQLISSEEAKGANATVTQAKLCIGGSLDKAKVKGKIVVCVRGKNARVEKGEAVHRAGGAGMVLANDEASGNEVIADAHVLPATHITYADGVTLLAYLKATRLASGYITVPYTALDAKPAPFMAAFSSQGPNTVTPEILKPDITAPGVSILAAFTGEAGPTGLAFDDRRVLFNAESGTSMSCPHVAGIAGLLKAVHPDWSPAAIKSAIMTTGQHEEADEQLVLPPRDAVRLRRGARAAQPRRRPGPCLRRQHHGLPQLPLRAGLQLLGDRHVHGRRRRRPRGPRLPSPPEAGGPQLPVSRSAAPVPHRRRAHRDEEGEERRPRWRHVRREGPRAARRGGGRAAKAARVRRGGGGEAVHRHVQGQGRVLPAGGVRVWPAGVVGRTRQAPREEPLGGEGREHQEEAHFHSLTNSLRISCMVMS

SEQ ID NO: 188990 - protein, 409 aa, Zea Mays
MKKHHKFLFFFHRYIHRRTSKPYTSAAHRAVPISFPSSPASSTGLRELDLLHAGELAPTPRLYHSIIAACAQFKNLAGARAIHAHLSRSCLAGDAFLLNSLIHMYCKCGAVSDARHVFDKMPSRDVVSWTYLIAGYAQNYMPAEAIGLLPDMLRARFRPNGFTFTSLLKATGACGGCSIGEQMHALAVKYNWDEDVYVGSALLDMYARCEQMDMAIMVFDRLVSKNEVSWNALIAGFARKADGETTLMKFAEMQRNGFGATHFTYSSMFSAFARIGALEQGRWVHAHLIKSGQKLTAFVGNTMLGMYAKSGSMVDARKVFDRMDKRDLVTWNTMLTALAQYGLGKEAVAHFEEIRKCGIQLNQITFLSVLTACSHGGLVKEGKHYFDMMKDYNVQPEIDHYVNGMMLLE

SEQ ID NO: 188991 - protein, 184 aa, Zea Mays
MSSVYRLPSTPPRQAARKTSPIRSCSPLSSRPYERPPERNAKRAREEEIHAAPAQPDFPFEEEEEEEEEEEEAAAGAGEASRRPPGVFQFPWQKCRGGLGVSAAGSSRELRDVFFRSLVDGGAAAIGVPGDRLVSPPPGRRALLEGVDAWLAAAADGEVDPVWRSALMARSSRMDGRGPSPRML

SEQ ID NO: 188992 - protein, 84 aa, Zea Mays
MPTLPRLLPGIPPILAKKTKNETFFTIAVAFGRMESCHQCPEAHRHRITTKVGHLTAGIGQNKSPLCYALLLAHAFSRLKEYHR

SEQ ID NO: 188993 - protein, 469 aa, Zea Mays
MASVTRRALSRGCCLAAVLALAVVASVAAEDETTSGPSWHVVSVTAMLPSADCTPARAASNSSALSVVHRHGPCSPLLARGGEPSHAEILDRDQDRVDSIHRMTAGPWTAGQSSASKGVSLPAHRGLRLGTANYIVSVGLGTPRRDLLVVFDTGSDLSWVQCKPCNNCYKQHDPLFDPSQSTTYSAVPCGAQECLDSGTCSSGKCRYEVVYGDMSQTDGNLARDTLTLGPSSDQLQGFVFGCGDDDTGLFGRADGLFGLGRDRVSLASQAAARYGAGFSYCLPSSWRAEGYLSLGSAAAPPHAQFTAMVTRSDTPSFYYLDLVGIKVAGRTVRVAPAVFKAPGTVIDSGTVITRLPSRAYSALRSSFAGFMRRYKRAPALSILDTCYDFTGRTKVQIPSVALLFDGGATLNLGFGGVLYVANRSQACLAFASNGDDTSVGILGNMQQKTFAVVYDLANQKIGFGAKGCS

SEQ ID NO: 188994 - protein, 539 aa, Zea Mays
MATGLALAAAPHVASVTGSGTVEEQAAGVGILLQISMLVLSFVLGHILRRRKFYYIPEASGSLLIGMIVGGLANISNTQKSIRRWFNFREDFFLLFLLPPIIFQSGFSLAPKPFFSNFDAIITFAILGTFIASIVTGLLVYLGGLLYIVYRLPLVECMMFGALVSATDPVTVLSIFQELGTDTNLYALVFGESVLNDAVAISLYRSMASMRTHHSGKNFFLVILRFLENFVGSMSSGIGVGLISALLFKYAALGVENLHNLESCLFVLFPYFSYMLAEGIGLSGIISILFTGIVMKRYTFSNLSDDSQRFTARFFHLLSSLAEAFVFIYMGFDIAIERQSWSHIGFIFFSIIFILVARAANVFSCAYILNLARPPHCQIPRQYQQALWYSGLRGAMAFALALQSVHDLPDGHGETIFTATTSIVVLTVLLIGGSTGTMLEALQVVGDSNRYCQLYEESSNGNDTGYTGQNYDEGASTSSKFRSKLRDLRRSTSSFALLDRNYLTPIFTSQNGDCNDNTTESPNEELTIFRGPGDLEVHD

SEQ ID NO: 188995 - protein, 275 aa, Zea Mays
MMFGALVSATDPVTVLSIFQELGTDTNLYALVFGESVLNDAVAISLYRSMASMRTHHSGKNFFLVILRFLENFVGSMSSGIGVGLISALLFKYAALGVENLHNLESCLFVLFPYFSYMLAEGIGLSGIISILFTGIVMKRYTFSNLSDDSQRFTARFFHLLSSLAEAFVFIYMGFDIAIERQSWSHIGFIFFSIIFILVARAANVFSCAYILNLARPPHCQIPRQYQQALWYSGLRGAMAFALALQSVHDLPDGHGETIFTATTSIVVLTVGCWV

SEQ ID NO: 188996 - protein, 374 aa, Zea Mays
MATGLALAAAPHVASVTGSGTVEEQAAGVGILLQISMLVLSFVLGHILRRRKFYYIPEASGSLLIGMIVGGLANISNTQKSIRRWFNFREDFFLLFLLPPIIFQSGFSLAPKPFFSNFDAIITFAILGTFIASIVTGLLVYLGGLLYIVYRLPLVECMMFGALVSATDPVTVLSIFQELGTDTNLYALVFGESVLNDAVAISLYRSMASMRTHHSGKNFFLVILRFLENFVGSMSSGIGVGLISALLFKYAALGVENLHNLESCLFVLFPYFSYMLAEGIGLSGIISILFTGIVSSTPIICHISCFRIYKLKFVTVFIKCFYVSYEFWCCIYKSCKGSLCESEEIKRVCADATSYYPHLLFFFSNTQEHCTSLY

SEQ ID NO: 188997 - protein, 260 aa, Zea Mays
MATGLALAAAPHVASVTGSGTVEEQAAGVGILLQISMLVLSFVLGHILRRRKFYYIPEASGSLLIGMIVGGLANISNTQKSIRRWFNFREDFFLLFLLPPIIFQSGFSLAPKPFFSNFDAIITFAILGTFIASIVTGLLVYLGGLLYIVYRLPLVECMMFGALVSATDPVTVLSIFQELGTDTNLYALVFGESVLNDAVAISLYRSMASMRTHHSGKNFFLVILRFLENFVGSMSSGIGVGLISALISFNLTLLHKNEHD

SEQ ID NO: 188998 - protein, 524 aa, Zea Mays
MLSTSPKMLEYLEERRLKDLVKKHSEFISYPISLWTEKTTEKEISDDEDEEEKKDAEEGKVEDVDEEKEEKEKKKKKIKEVSHEWSLINKQKPIWMRKPEEITKEEYAAFYKSLTNDWEEHLAVKHFSVEGQLEFKAVLFVPKRAPFDLFDTRKKQNNIKLYVRRVFIMDNCEELIPEWLSFVKGIVDSEDLPLNISRETLQQNKILKVIRKNLVKKCVELFFEIAENKEDYNKFYEAFSKNLKLGIHEDSQNRGKIAELLRYHSTKSGDELTSLKDYVTRMKEGQNDIYYITGESKKAVENSPFLEKLKKRGYEVLYMVDAIDEYAVGQLKEFEGKKLVSATKEGLKLDETEDEKKRKEELKEKFEGLCKIIKEVLGDKVEKVVVSDRVVDSPCCLVTGEYGWTANMERIMKAQALRDSSMSGYMSSKKTMEINPENPIMDELRKRAEADKNDKSVKDLVMLLFETALLTSGFSLDDPNTFGTRIHRMLKLGLSIDEDKSAEAEAEMPPLEDDAGESKMEEVD

SEQ ID NO: 188999 - protein, 350 aa, Zea Mays
MSKRMTPATHSRRNQVWGAGEARTPHMARTDPQPQVSSPLENQAACCGGEQQGTGNADGARVARGAGGVTLAARQPAGLAGRRAGGVGRAGLRGGRGHRRQRRVLAEELHGQEHLVERVDGDGPGGVHAAGDLGPGPHGLHVDAAHVVGEVERVGRPGEGVHRVERAQVLELGQGVELGQRVVQQQRLQLVGGEVGEGGLLQRRERRVLGHEHGDAHLGVVGLPLEGLDHVALLQVVEERVERARHAQELREVHVVRRRRRCRGRRQRHGRRRRRAALLTQCRGEEDGQYSRGKNNCCLGLHHCSVCLAHLILSTTFSDASPCPDEITHEVYVVSRFDLVDRSRLRVLHN

SEQ ID NO: 189000 - protein, 195 aa, Zea Mays
MEDLLKMTEWTEERPLRVVTGFGYLGNKFLREKGFKHVRFLSADGALESYPPMGMADAIVDLVSSGTTLRENNLKEIDGGVVLESQATLVASRKSLHKRKGVLEVTHELLERLEAHLRATAELMGPTVSPVYRRRDGKVDVEYYAINVVVPQKLLYKSIQQLRSIGGSGVLVTKLTYIFDEETPRWRNLLSELGL

SEQ ID NO: 189001 - protein, 53 aa, Zea Mays
MVNFGSLLQVPICTAPHSFVSTEACKPICRSETVWYLFCTSSLQEILACILTI

SEQ ID NO: 189002 - protein, 149 aa, Zea Mays
MATAEVQTPTVVAAEEAPVVETPPPAVVPEESAPAEAEAEAEAEAAAPAGAEEPAAADPAAEAEAAAPAGPEETPAAEQEAAAEEEAAAAPPAGAEEPAAAEPVAEAEAAAPEELAADEPEAPAPAGPQEPAAEAEEVAAPEEPEKASE

SEQ ID NO: 189003 - protein, 234 aa, Zea Mays
MTSQRDPGAVTHEDFEGHRGTIKAGDVQWMTAGRGIVHSEMPAGPGTSRGLQLWVNLSSANKMVEPGYQEIQSKDIACTSDGDGGVTVRVIAGHAMGVRSPVRTRTPTMYLDFTVRPRGAVRQPVRASWNAFAYVLEGEGVFGAERCAPVGAHHLLLLGHGDGLEVWNKLPDRPLRFLLVAGEPIGEPVAQLGPFVMNTEEEIDMTVNDFECYANGFEKARHWKSQAMLALGVE

SEQ ID NO: 189004 - protein, 330 aa, Zea Mays
MYGAPLPKDLNLPAALPQPTRTPPQQQMGSPGLLRYRSAPSTLLGEVMCGGDQDFPAAGGAGHGPPDHAAADNVLARFLAGHHSETRDCKPPRPAAAAHFMDEAAVASMAASQQQQLMYQSQQEQQMAAMEGLYRNVSSGGTEHGAAVGAGNNSLIRQSSSPAGFLNHLNMDNGYGSMLRVGMGGGGFRNGVSDARLKGQLSFSSRQGSVMSQISEVGSEELDGGGGSGSPEAAGSNASGAARGYSGIPGYPMGGLASGAWPDEASPSPTSGAKRPRDSGPALQQPLAPQLSLPSGKNKGGRAASAEMAAIEKFLQFQDAVPCKIRAKRG

SEQ ID NO: 189005 - protein, 318 aa, Zea Mays
MAEPGDGSRRRREAEAPVVALECVAGSSKAEEWGGGAGVVQEGDVVEAVRVGRGSGGGGAAAALELEAPFKGGRAGLHKALHAAFKRGDTSVEVRVRGGRQLQACIVPHHASPGAGGGGVRKQYVLRSLHDPNYLLGFVDRLESECLVLQGTRSTRVASALSKAQLQDGYVAYPWDKKMRDTLHTPNSSCYLSMLVLPKALDSNACHYESFDDTVARANAWFYSSQAAGIPIDFMNVQSEALLTKISGETASASVNSSSLSDLSNVTNATLYGFEDYHGVDIGVVKAARLWYSCVGGELLLEIPLEEGLYLHIICSGR

SEQ ID NO: 189006 - protein, 219 aa, Zea Mays
MKAVGYNLYDSSGTDDDLPPAQNRGLRGRVFSGNGRASAGAFPYMRANNDLESEIHRVEQDAYTGVLRAFKVQSDAISWEKESLITELRKELRVSDEEHRELLNKVNEDGSIRQMRELRQAGGIPSGLHRGNRVLYDAEPGPTTKRQRASHSIPSQSAGLQSPMMPSHSVSSAKWGPLSARGKKAKMGELKFAWLIITLPLIIQLKIDKHSLNRWHLKI

SEQ ID NO: 189007 - protein, 335 aa, Zea Mays
MKAVGYNLYDSSGTDDDLPPAQNRGLRGRVFSGNGRASAGAFPYMRANNDLESEIHRVEQDAYTGVLRAFKVQSDAISWEKESLITELRKELRVSDEEHRELLNKVNEDGSIRQMRELRQAGGIPSGLHRGNRVLYDAEPGPTTKRQRASHSIPSQSAGLQSPMMPSHSVSSAKWGPLSARGKKAKMGEHELVYDMGTQAETWEWVRLCDMAPEDIRWEFDGHLSNHDGWGPSGPMLKRHMTNNGAMAGSIRGRGRLSINEPIKDYAPPQNDINRNFDYIDIPNTESVVTEVERVLANPNMPEIEKARKLLKDQEQSLLDAIARLDEASDSDSGN

SEQ ID NO: 189008 - protein, 238 aa, Zea Mays
MKARVGVTTIVITEAPTSLSFSRNRSSTQPSLAKTASSRKVSGEDLDASASASSSSAFPLPRRRRHKLAELRTSLLSLESTADSTDASCFATFSSLDPSPSWLGCLGGFRSVEFDSLHEHPGSSLERRSWSLTASPEALCSRSAFSRFTFDCSVLREFKKNEISLPLNKSPPNDHHQTRDRIARRRDGARRRAAAGARPPIPRQRRRRDPPRPPRPRRCRRWRSGGGGGGSGGGSCAA

SEQ ID NO: 189009 - protein, 288 aa, Zea Mays
MAEHLASIFGTEKDRVNCPFYFKIGACRHGDRCSRLHNKPSISPTLLLCNMYQRPDMITPGVDAQGNPIDPERIQEDFEDFYEDIFVELSKHGEIESLHVCDNLADHMIGNVYVEFREEEQAARALQALQGRYYSGRPIIAEFSPVTDFREATCRQFEEHSCNRGGYCNFMHVKQVGRDLRRKLFGHLHRSLRSHSRGSRSPSPYRRRGSSSRSRDRDDYHDYYYHYYRSGSGSRRSSERHRSHDSDGSRRRRGRSRSRSRSPVREGSEERRAKIEQWNREREAAQAG

SEQ ID NO: 189010 - protein, 306 aa, Zea Mays
MESSWLLLLSCLPAVWVLAAAAAAAAGRSPGCATRCGEIDVPYPFGLDPQCAIHAGFWLNCTTVDGATKLLDKNSEVTKISVEDGKAWFKNFISRQCYNQSSGDMFENNAWVDYTGEPYVLSAEDNKIIVLGCNSMAYMQSDSYIIGCMSTCDGPLKNGSCSGTAGCCQAELPPGVQFYQGFFNSLHNTTKIWKQTPCNYITVMESAAFSFSSTYLTSTVLYDSDDGRTPVVMEWGITRQKCEEAKANKTAYACVSDHSDCVYSDAAGYRCRCSGGFKGNPYVVDGCAGTLSRNLLVSFLGTTPKA

SEQ ID NO: 189011 - protein, 63 aa, Zea Mays
MIATDQSPISSHDRSTEEMGKAAGTPGHSLEKPCLFQSAQRCVQDRFLGSQPDPSASDMLTIH

SEQ ID NO: 189012 - protein, 75 aa, Zea Mays
MKYLPRMVVVKKTAWFCKREYLPRMKKSTSTFPSVLQQLEHIWAQRTKHWEAGIALIEKWYYLTRTKHADPNANS

SEQ ID NO: 189013 - protein, 569 aa, Zea Mays
MAMEVRRRVPPPHGSAPRRQQATGGEGQRVRVQAGDALPLPIRHTNLIFSALFAASLVYLMRRWREKIRSSTPLHVVSLAEIFAICGLVASLIYLLSFFGIAFVQSVVSNSDDEEDFIIDSRHGQARAPPPPAPAAPCALLGSPAAAPEKMPEEDEEIVAAVVAGKIPSYVLETRLGDCRRAAGIRREALRRITGREMDGLPLDGFDYASILGQCCELPVGFVQLPVGVAGPLLLDGRRLYVPMATTEGCLVASTNRGCKAIAESGGASSVVLKDGMTRAPAVRFPSARRAAELKAFLEDPANFDTLAMVFNRSSRFGRLQGVKCAIAGRNLYMRFSCSTGDAMGMNMVSKGVQNVLDYLQADFPDMDVISISAAVNWIDGRGKSVVCEAVIKEEVVKKVLKTNVQALVELNVIKNLAGSAVAGALGGFNAHASNIVAAIFIATGQDPAQNVESSQCITMLEAINDGKDLHISVTMPSIEVGTVGGGTQLASQSACLDLLGVKGANRESPGSNARLLATVVAGAVLAGELSLISAQAAGHLVKSHMKYNRSSKDMSKTLAEETDKPKKC

SEQ ID NO: 189014 - protein, 742 aa, Zea Mays
MTAEGTACNGAGEAPKAEFVPEKVVTASLEEKAAGEREGEDVGGPFVVVNGGDSDGHSDRGSDLGKASGEESSSEEEDVPGSNVAPDLAVGGDHGSARGEVSAQGAALGASSADGSGRASDGAEGGADEGKGEPSSDFDAEAAPQEDVGEEDGGAAALASSGCEPAITGADSEAAPAVDDEVEGKEGTVDGSAVADVAEAVVHQEVSTEHDDALTLPKSSASMESEVIREDNKEQSTADIVGPHEQGTCGASALVENEHLCADMRADSFVAVTEPDSQEDYAVESCMRDDVLICTESGSADIESEVNGKDSKQEQSNADVVEVIGQGVVRADALMANGHLCADIQADSSEAATKPDNIANESKLTEVAESGEDAAASGELDAIDASSQTNGHIYVASGADSFIIASESKSHSFETDGQETDQQEEEVPQTEAELLDGVLKPTERNCARSVEELIGEEVDTDGHPSVDGTADASGEQEAKPMQVEGEATCGILEFEEVDKDGEDSLCNDCMVGVVSSNEETELPMKERTDEAVPSVNVGESEQVTEDTSQDIMQGGLARGVFIGTIFVKPVSDPHVESSLVHKVKAEVHLVDEITAADLKAENMVEVKRTDREVDEIEVKAPGTHEIGNSSEVEPKEEFEMEVDDAVSLHEAAASASENGSEEKSSNIAVDQVEPVNLNVDELAVDDDQPSFNPGYGSAKSSDVAETKNVEAQVTEQKGNAHHASDPGCTGSLRPTDPGKRRN

SEQ ID NO: 189015 - protein, 425 aa, Zea Mays
MRHLTKKITFMSGISNLKVLEENTRKIQKSFADERTALRKLTEEHRAANEIRQKAYSDWTELRSEPSKKNEYFFKYRDARNAAENFRANGDINGLISHCNSQIERVMEIWNKNEDFRKQYVESNKVSTLKRLGTHDGRKLGPGEDPPVIPSRRPSNICPLSASSPEMITLASTPAPVLAAAAAVPSKENSFPALAAPQTSKRAKSKASGSSAQIKNKSVIVSEEEDLEQTLKEKAHQLELARKAEELDRKAEELARKEEELRKERDAAEKERLRMEQKAKAKEAEERKRRKAEKDKERAEFKARKEAEEREKKKAKRDKKKGAAPADSSAIGDSHAAASATADTDSNASDNPREADVSQPAVAPRRPARPAAAIKQLNRLQPMPAPLRNRGRRKLRQYILIAAAVLTVLALFVAGNYIPRLRSHS

SEQ ID NO: 189016 - protein, 511 aa, Zea Mays
MHGSNSHWLILKPHDGALDMSPRFSYCKPAADREKMFNRRHSLNLPEQLPGHYSRKATERTQKASSKSVADLVGEIAALEQEVIRKELHLLALYRRAFDQYVSESCSFTSEQVDQEFLKSIDEGALRLRDIKRSAAFDLPTTTISGSEEQEEAPPEAKAGARHSSLVNFLSASISEYVPKISCKLSEDILGCIAAVYCKLSGAEGECCVASPSPSVSSWSTFSPRRRNDSWSPRSRCNNFDSWSPRPCGVEKESGEQSPGVMMVVVPRIRVDADTFEYASKMLETTRSLIQRLEKVDPVKMTHEEQLCFWINIHNALVMHAFLAYGLHDKRMKSTDMILKAAYNVGGQSVNAQTIQNSILGCRQSHRPSLWVRALFTPAKRSAARHPYALQHPEPVAHFALSTGAFSDPPVRLYTAKKIQQQLEAARTEFIRGSVAVRKQALLLPKVLHCYARDAALELRHLVELVCETLSDAQQKQLQLGLRRRAVDKCVEWMPYKSSFRYVVHRDLADD

SEQ ID NO: 189017 - protein, 250 aa, Zea Mays
MMVVVPRIRVDADTFEYASKMLETTRSLIQRLEKVDPVKMTHEEQLCFWINIHNALVMHAFLAYGLHDKRMKSTDMILKAAYNVGGQSVNAQTIQNSILGCRQSHRPSLWVRALFTPAKRSAARHPYALQHPEPVAHFALSTGAFSDPPVRLYTAKKIQQQLEAARTEFIRGSVAVRKQALLLPKVLHCYARDAALELRHLVELVCETLSDAQQKQLQLGLRRRAVDKCVEWMPYKSSFRYVVHRDLADD

SEQ ID NO: 189018 - protein, 187 aa, Zea Mays
MKDLGPFHHFLGITAERWPQGLFLHQRQYVVDILERASMSDCKPCSTPVDTQAKLSEDDGPPVADATSYRSLTGALQYLTFSRPDIAYVVQQVCLHMHTLREPHLTALKQIMRYLRGSLDYGLLLRPSPTSELVVYTDADWAGCADTRRSTSGYAVFLGANLVSWAYRCTFGPPGPARPKPEKARHV

SEQ ID NO: 189019 - protein, 184 aa, Zea Mays
MGSTLMATTAILFCTGVAAVLSSTYTIKKPLSDTVFGAHGEYMMALKYVALMLLFLLAFLCHSLAICFLNQASFLINTSACLFSSSADSDAAVLGLPLPPTRDYIGDVLERGFTLNLVGNRLFYAGVPLLLWIFGPLLAFLSSMVMVPILYSLDVVNLMGHSGCVVVSGKSAEMNGGSECARAV

SEQ ID NO: 189020 - protein, 50 aa, Zea Mays
MSSSSEGSTCSPFSDYLPVSLPSITTGSSSSEGAPADLCLSSLYYCRNYC

SEQ ID NO: 189021 - protein, 68 aa, Zea Mays
MVYSISVAMLLTTVVSVLLFSFHNNVLNFSVVSISVYLHSVGKLQPHCNKVYKRFAMRKNKFMGSNKV

SEQ ID NO: 189022 - protein, 1071 aa, Zea Mays
MASGTGSSPPPAHEERVLEGEGAFEISSKNTSHDHLRRWRQAALVLNASRRFRYTLDLERQEEKENLRRMLRSHAQVIRAVFVFKEAGQKNLREYCTSIKGDTLSQRFSVDLKKLKMLNRDHDAIIFQEVGGVKGLSDLLKSDLDRGLSPDESELMRRRDIFGANTYPRKERRSIWHFVFEACQDLTLVILMVAAAISFSLGMATEGVKDGWYDGGSIFFAVFLVIFVTATSDYRQSLQFQHLNEEKRNIQVEVIRGGKRLVASIFDLVVGDVVPLKIGDQVPADGILIYGHSLAIDESSMTGESKIVNKDQRAPFLMSGCKVADGYGSMLVTGVGINTEWGMLMANLSEDIGEETPLQVRLNGVATLIGIVGLSVAGAVLVILWLRYFTGHTKNPDGTTQFLAGTTGVKQGFMGAIRILTIAVTIVVVAVPEGLPLAVTLTLAYSMRKMMRDKALVRRLSSCETMGSATTICSDKTGTLTMNKMTVVEAYLGGEKMDTYDNASTMCTSVTALLIEGIAQNTTGTVFMPEDGGAAEITGSPTEKAILSWGLMIGMDFKDVRSKSSVLHVVPFNSEKKRGGVALQVSDTEVHIHWKGAAELLLASCRSWLSTDGSIQQMNSIKHNEFKERIDDMAMSSLRCVAFAYCPWEPKMVPMESLDKWKLPEDDLTLIGMVGIKDPCRPGVRNAVQLCSTAGVKVRMVTGDNVETAKAIAVECGILDAKDAASEPNVIEGKVFREMSETAREDIADKITVMGRSSPNDKLLLVQCLKRRGHVVAVTGDGTNDAPALHEADIGLSMGISGTEVAKESSDIIILDDDFTSVVKVVRWGRSVYANIQKFIQFQLTVNVAALVINVIAAVSSGDVPLNAVELLWVNLIMDTLGALALATEPPTDNLMKRHPVGRREPLVTNVMWRNLFIQALYQIAVLLIFNFDGKRILRLQNGSWEHAEKTKNTFVFNAFVFCQIFNEFNARKPEEKNVFKGVANNHLFVAIVGATTVLQILIIEFLGKFFDTARLDWRLWLLSVAIGAVSWPLAYLGKFIPVPVRPFQSYFKHCSCRRGPRQDEEQGGKS

SEQ ID NO: 189023 - protein, 110 aa, Zea Mays
MTECTKKKFQSYHICINRKYIKPCIGLSPILGNSSPCLSDLSRATSSIVLVVEDHAKMKSKAARAETWQVRPQVQHCRSKASLEHRSLKHPQAVSLSHRLDSQQELHLER

SEQ ID NO: 189024 - protein, 271 aa, Zea Mays
MPRSHPGSSPHPWASGYFPHRVPARRPPPCAPCSKLAVEAPCTLPIAKSPASRPGFCRVFMLTVYPRVVRRARAPNRFLARHDVRCPACFAHPRRLLANAPTHQLTLSYPRPHATVVVFVEFANALLPIRLSSLLYALLRARRVLSVVPQHSCLPLARVNTRAPARCYCVALALCPSGFTRARVCRRAVEPVLPCSTSSLPFWWSSSVLCWTTLHYLATLAVDLVGPPRVELASSAIVTQLHTSSSPSPTQPCCSLVIVCSYFSPPYAASL

SEQ ID NO: 189025 - protein, 203 aa, Zea Mays
MRRARAPNLFLARRDARCPACFAHPRRLLPDAPTRQLSLSYPCPHATVVVFVEFAKALLLIRLSSLLYASLRARRVLSVVPQHSCLPLARVNTRAPARCYCVALALRPSGFTRARVCRRAVEPVLPCSTSSLPFWWPSSVWCWTMLHYLATLAVDLVGPPRVELASSAIVTQLHTSSSPSPTQPCCSLVVVRSYFSPSYAASL

SEQ ID NO: 189026 - protein, 81 aa, Zea Mays
MLRCVLVECCRLYLSTRACRWLALTLARLLVVIASRSLFVHRASRVLAFVVEPLNPFYLARPRLCPSGGRRQFGAGLCSII

SEQ ID NO: 189027 - protein, 459 aa, Zea Mays
MPPPSPPASQVRTCDAGAAQSPTRGTVSEMARYFRSSNLASRVFERQLISPRPGATVNTIRQFYENLVPSYTIYDIDCPDYSFRKFTDDGKYFVAFSRNHQDLIVYRPIWLTYSCNEECDPHELPPKAKKFDSFFKQLYSIPLASGNEYICKDFFLYMECHRFGLFATSTAQSNESTATEGAIHGVPLIEKITFHLVRLEDGVILDEKAFCNDFINLAHSIGAYMYEDLLCIVSLRYQTIHILQIRDSGNLVEVRSIGAFCREDDELFLHSHVQTGYAGSFLPGIKQRLLSYIFCKTWNEVPDQTLRVQHLKKFYFHFQDYVDLIIWKVSRSTDQNLAFFAVYNMETTDIVSLHQNSSEELYALFEQFYDHFHANPQASSHGKFISSHSNDIHALDQLRVIKNKASSSSQFVKKMMTSLPYTCQSQSPSPYFDLSLFRYDEKLFVRQGRNNNCGKWQEL

SEQ ID NO: 189028 - protein, 436 aa, Zea Mays
MPPPSPPASQVRTCDAGAAQSPTRGTVSEMARYFRSSNLASRVFERQLISPRPGATVNTIRQFYENLVPSYTIYDIDCPDYSFRKFTDDGKYFVAFSRNHQDLIVYRPIWLTYSCNEECDPHELPPKAKKFDSFFKQLYSIPLASGNEYICKDFFLYMECHRFGLFATSTAQSNESTATEGAIHGVPLIEKITFHLVRLEDGVILDEKAFCNDFINLAHSIGAYMYEDLLCIVSLRYQTIHILQIRDSGNLVEVRSIGAFCREDDELFLHSHVQTGYAGSFLPGIKQRLLSYIFCKTWNEVPDQTLRVQHLKKFYFHFQDYVDLIIWKVQFLDRHHLFVKFGSVDGGVSRSTDQNLAFFAVYNMETTDIVSLHQNSSEELYALFEQFYDHFHANPQASSHGKFISSHSNDIHALDQLRVIKNKASSSSQESCASFN

SEQ ID NO: 189029 - protein, 438 aa, Zea Mays
MPPPSPPASQVRTCDAGAAQSPTRGTVSEMARYFRSSNLASRVFERQLISPRPGATVNTIRQFYENLVPSYTIYDIDCPDYSFRKFTDDGKYFVAFSRNHQDLIVYRPIWLTYSCNEECDPHELPPKAKKFDSFFKQLYSIPLASGNEYICKDFFLYMECHRFGLFATSTAQSNESTATEGAIHGVPLIEKITFHLVRLEDGVILDEKAFCNDFINLAHSIGAYMYEDLLCIVSLRYQTIHILQIRDSGNLVEVRSIGAFCREDDELFLHSHVQTGYAGSFLPGIKQRLLSYIFCKTWNEVPDQTLRVQHLKKFYFHFQDYVDLIIWKVQFLDRHHLFVKFGSVDGGVSRSTDQNLAFFAVYNMETTDIVSLHQNSSEELYALFEQFYDHFHANPQASSHGKFISSHSNDIHALDQLRVIKNKASSSSQLIHVECCTL

SEQ ID NO: 189030 - protein, 451 aa, Zea Mays
MPPPSPPASQVRTCDAGAAQSPTRGTVSEMARYFRSSNLASRVFERQLISPRPGATVNTIRQFYENLVPSYTIYDIDCPDYSFRKFTDDGKYFVAFSRNHQDLIVYRPIWLTYSCNEECDPHELPPKAKKFDSFFKQLYSIPLASGNEYICKDFFLYMECHRFGLFATSTAQSNESTATEGAIHGVPLIEKITFHLVRLEDGVILDEKAFCNDFINLAHSIGAYMYEDLLCIVSLRYQTIHILQIRDSGNLVEVRSIGAFCREDDELFLHSHVQTGYAGSFLPGIKQRLLSYIFCKTWNEVPDQTLRVQHLKKFYFHFQDYVDLIIWKVSRSTDQNLAFFAVYNMETTDIVSLHQNSSEELYALFEQFYDHFHANPQASSHGKFISSHSNDIHALDQLRVIKNKASSSSQFVKKMMTSLPYTCQSQSPSPYFDLSLFRAHAPRALPCIEFS

SEQ ID NO: 189031 - protein, 444 aa, Zea Mays
MPPPSPPASQVRTCDAGAAQSPTRGTVSEMARYFRSSNLASRVFERQLISPRPGATVNTIRQFYENLVPSYTIYDIDCPDYSFRKFTDDGKYFVAFSRNHQDLIVYRPIWLTYSCNEECDPHELPPKAKKFDSFFKQLYSIPLASGNEYICKDFFLYMECHRFGLFATSTAQSNESTATEGAIHGVPLIEKITFHLVRLEDGVILDEKAFCNDFINLAHSIGAYMYEDLLCIVSLRYQTIHILQIRDSGNLVEVRSIGAFCREDDELFLHSHVQTGYAGSFLPGIKQRLLSYIFCKTWNEVPDQTLRVQHLKKFYFHFQDYVDLIIWKVSRSTDQNLAFFAVYNMETTDIVSLHQNSSEELYALFEQFYDHFHANPQASSHGKFISSHSNDIHALDQLRVIKNKASSSSQFVKKMMTSLPYTCQSQSPSPYFDLSLFRFRFWCF

SEQ ID NO: 189032 - protein, 519 aa, Zea Mays
MPPPSPPASQVRTCDAGAAQSPTRGTVSEMARYFRSSNLASRVFERQLISPRPGATVNTIRQFYENLVPSYTIYDIDCPDYSFRKFTDDGKYFVAFSRNHQDLIVYRPIWLTYSCNEECDPHELPPKAKKFDSFFKQLYSIPLASGNEYICKDFFLYMECHRFGLFATSTAQSNESTATEGAIHGVPLIEKITFHLVRLEDGVILDEKAFCNDFINLAHSIGAYMYEDLLCIVSLRYQTIHILQIRDSGNLVEVRSIGAFCREDDELFLHSHVQTGYAGSFLPGIKQRLLSYIFCKTWNEVPDQTLRVQHLKKFYFHFQDYVDLIIWKVSRSTDQNLAFFAVYNMETTDIVSLHQNSSEELYALFEQFYDHFHANPQASSHGKFISSHSNDIHALDQLRVIKNKASSSSQFVKKMMTSLPYTCQSQSPSPYFDLSLFRYDEKLISAIDRHRHCTEHPIKFISVRQNVVKFKIKPGSDSGASDSRIKRISSFLFHPFFPLALSIQQTYMQPTVLNIHFRR

SEQ ID NO: 189033 - protein, 438 aa, Zea Mays
MPPPSPPASQVRTCDAGAAQSPTRGTVSEMARYFRSSNLASRVFERQLISPRPGATVNTIRQFYENLVPSYTIYDIDCPDYSFRKFTDDGKYFVAFSRNHQDLIVYRPIWLTYSCNEECDPHELPPKAKKFDSFFKQLYSIPLASGNEYICKDFFLYMECHRFGLFATSTAQSNESTATEGAIHGVPLIEKITFHLVRLEDGVILDEKAFCNDFINLAHSIGAYMYEDLLCIVSLRYQTIHILQIRDSGNLVEVRSIGAFCREDDELFLHSHVQTGYAGSFLPGIKQRLLSYIFCKTWNEVPDQTLRVQHLKKFYFHFQDYVDLIIWKVSRSTDQNLAFFAVYNMETTDIVSLHQNSSEELYALFEQFYDHFHANPQASSHGKFISSHSNDIHALDQLRVIKNKASSSSQFVKKMMTSLPYTCQSQSPSPYFDLSLFS

SEQ ID NO: 189034 - protein, 506 aa, Zea Mays
MPPPSPPASQVRTCDAGAAQSPTRGTVSEMARYFRSSNLASRVFERQLISPRPGATVNTIRQFYENLVPSYTIYDIDCPDYSFRKFTDDGKYFVAFSRNHQDLIVYRPIWLTYSCNEECDPHELPPKAKKFDSFFKQLYSIPLASGNEYICKDFFLYMECHRFGLFATSTAQSNESTATEGAIHGVPLIEKITFHLVRLEDGVILDEKAFCNDFINLAHSIGAYMYEDLLCIVSLRYQTIHILQIRDSGNLVEVRSIGAFCREDDELFLHSHVQTGYAGSFLPGIKQRLLSYIFCKTWNEVPDQTLRVQHLKKFYFHFQDYVDLIIWKVQFLDRHHLFVKFGSVDGGVSRSTDQNLAFFAVYNMETTDIVSLHQNSSEELYALFEQFYDHFHANPQASSHGKFISSHSNDIHALDQLRVIKNKASSSSQLISAIDRHRHCTEHPIKFISVRQNVVKFKIKPGSDSGASDSRIKRISSFLFHPFFPLALSIQQTYMQPTVLNIHFRR

SEQ ID NO: 189035 - protein, 457 aa, Zea Mays
MPPPSPPASQVRTCDAGAAQSPTRGTVSEMARYFRSSNLASRVFERQLISPRPGATVNTIRQFYENLVPSYTIYDIDCPDYSFRKFTDDGKYFVAFSRNHQDLIVYRPIWLTYSCNEECDPHELPPKAKKFDSFFKQLYSIPLASGNEYICKDFFLYMECHRFGLFATSTAQSNESTATEGAIHGVPLIEKITFHLVRLEDGVILDEKAFCNDFINLAHSIGAYMYEDLLCIVSLRYQTIHILQIRDSGNLVEVRSIGAFCREDDELFLHSHVQTGYAGSFLPGIKQRLLSYIFCKTWNEVPDQTLRVQHLKKFYFHFQDYVDLIIWKVQFLDRHHLFVKFGSVDGGVSRSTDQNLAFFAVYNMETTDIVSLHQNSSEELYALFEQFYDHFHANPQASSHGKFISSHSNDIHALDQLRVIKNKASSSSQFVKKMMTSLPYTCQSQSPSPYFDLSLFS

SEQ ID NO: 189036 - protein, 356 aa, Zea Mays
MPPPSPPASQVRTCDAGAAQSPTRGTVSEMARYFRSSNLASRVFERQLISPRPGATVNTIRQFYENLVPSYTIYDIDCPDYSFRKFTDDGKYFVAFSRNHQDLIVYRPIWLTYSCNEECDPHELPPKAKKFDSFFKQLYSIPLASGNEYICKDFFLYMECHRFGLFATSTAQSNESTATEGAIHGVPLIEKITFHLVRLEDGVILDEKAFCNDFINLAHSIGAYMYEDLLCIVSLRYQTIHILQIRDSGNLVEVRSIGAFCREDDELFLHSHVQTGYAGSFLPGIKQRLLSYIFCKTWNEVPDQTLRVQHLKKFYFHFQDYVDLIIWKFVKKMMTSLPYTCQSQSPSPYFDLSLFS

SEQ ID NO: 189037 - protein, 532 aa, Zea Mays
MPPPSPPASQVRTCDAGAAQSPTRGTVSEMARYFRSSNLASRVFERQLISPRPGATVNTIRQFYENLVPSYTIYDIDCPDYSFRKFTDDGKYFVAFSRNHQDLIVYRPIWLTYSCNEECDPHELPPKAKKFDSFFKQLYSIPLASGNEYICKDFFLYMECHRFGLFATSTAQSNESTATEGAIHGVPLIEKITFHLVRLEDGVILDEKAFCNDFINLAHSIGAYMYEDLLCIVSLRYQTIHILQIRDSGNLVEVRSIGAFCREDDELFLHSHVQTGYAGSFLPGIKQRLLSYIFCKTWNERVQHLKKFYFHFQDYVDLIIWKVQFLDRHHLFVKFGSVDGGVSRSTDQNLAFFAVYNMETTDIVSLHQNSSEELYALFEQFYDHFHANPQASSHGKFISSHSNDIHALDQLRVIKNKASSSSQFVKKMMTSLPYTCQSQSPSPYFDLSLFRYDEKLISAIDRHRHCTEHPIKFISVRQNVVKFKIKPGSDSGASDSRIKRISSFLFHPFFPLALSIQQTYMQPTVLNIHFRR

SEQ ID NO: 189038 - protein, 536 aa, Zea Mays
MPPPSPPASQVRTCDAGAAQSPTRGTVSEMARYFRSSNLASRVFERQLISPRPGATVNTIRQFYENLVPSYTIYDIDCPDYSFRKFTDDGKYFVAFSRNHQDLIVYRPIWLTYSCNEECDPHELPPKAKKFDSFFKQLYSIPLASGNEYICKDFFLYMECHRFGLFATSTAQSNESTATEGAIHGVPLIEKITFHLVRLEDGVILDEKAFCNDFINLAHSIGAYMYEDLLCIVSLRYQTIHILQIRDSGNLVEVRSIGAFCREDDELFLHSHVQTGYAGSFLPGIKQRLLSYIFCKTWNEVPDQTLRVQHLKKFYFHFQDYVDLIIWKVQFLDRHHLFVKFGSVDGGVSRSTDQNLAFFAVYNMETTDIVSLHQNSSEELYALFEQFYDHFHANPQASSHGKFISSHSNDIHALDQLRVIKNKASSSSQFVKKMMTSLPYTCQSQSPSPYFDLSLFRYDEKLISAIDRHRHCTEHPIKFISVRQNVVKFKIKPDSGASDSRIKRISSFLFHPFFPLALSIQQTYMQPTVLNIHFRR

SEQ ID NO: 189039 - protein, 362 aa, Zea Mays
MECHRFGLFATSTAQSNESTATEGAIHGVPLIEKITFHLVRLEDGVILDEKAFCNDFINLAHSIGAYMYEDLLCIVSLRYQTIHILQIRDSGNLVEVRSIGAFCREDDELFLHSHVQTGYAGSFLPGIKQRLLSYIFCKTWNEVPDQTLRVQHLKKFYFHFQDYVDLIIWKVSRSTDQNLAFFAVYNMETTDIVSLHQNSSEELYALFEQFYDHFHANPQASSHGKFISSHSNDIHALDQLRVIKNKASSSSQFVKKMMTSLPYTCQSQSPSPYFDLSLFRYDEKLISAIDRHRHCTEHPIKFISVRQNVVKFKIKPGSDSGASDSRIKRISSFLFHPFFPLALSIQQTYMQPTVLNIHFRR

SEQ ID NO: 189040 - protein, 381 aa, Zea Mays
MECHRFGLFATSTAQSNESTATEGAIHGVPLIEKITFHLVRLEDGVILDEKAFCNDFINLAHSIGAYMYEDLLCIVSLRYQTIHILQIRDSGNLVEVRSIGAFCREDDELFLHSHVQTGYAGSFLPGIKQRLLSYIFCKTWNEVPDQTLRVQHLKKFYFHFQDYVDLIIWKVQFLDRHHLFVKFGSVDGGVSRSTDQNLAFFAVYNMETTDIVSLHQNSSEELYALFEQFYDHFHANPQASSHGKFISSHSNDIHALDQLRVIKNKASSSSQFVKKMMTSLPYTCQSQSPSPYFDLSLFRYDEKLISAIDRHRHCTEHPIKFISVRQNVVKFKIKPGSDSGASDSRIKRISSFLFHPFFPLALSIQQTYMQPTVLNIHFRR

SEQ ID NO: 189041 - protein, 339 aa, Zea Mays
MDRSWINSRLFSNNYLAGVDEFMKFVEERFPDVTEILCPCRQCLNQISKHKSQVEDDLYINGMASTYTTWIHHGELLLTGRLHENVVHLNEPPNLNEDASMNEYEQDNPDDRLPEMVHELFTSEEGIGKSMLKRMFSSKKISEEAQWHKLKRKVMENELNHPADGKAWKDFDKQHGWFAEDPRNIRLGLATDGFNPFGKMSSSYSMWPIFVIPYNFPPRVCVEQSNFMMCLLIPDKECPRKDFDVFLDPLIDELQDLWLGVNTIDARARKEFILHAAVLWCIHDYLALSTLSGRVTRGYYACLHCDKNPCSRRIRNKICYIGHRRFLEKDHPMEKKERL

SEQ ID NO: 189042 - protein, 76 aa, Zea Mays
MHCSKKKGFSEVVQKAIGDMEAMVATPVEDGQLAKSAREVVSNVLPGSSKFLHNAGLLPSSKRSNTGTVSARMQEL

SEQ ID NO: 189043 - protein, 70 aa, Zea Mays
MRLLAEPAEAVLHSEGTSQQCRGMGILTVLLRTAISDLGACVLAAWGNFITTWRRPLAILHFQSSVSLCA

SEQ ID NO: 189044 - protein, 55 aa, Zea Mays
MRLLAEPAEAVLHSEGTSQQCRGMGILTVLLRTAIRSDFLPTPLGLPVALMPFVT

SEQ ID NO: 189045 - protein, 53 aa, Zea Mays
MSPSILLLLFLKQSLICQIGTLDRGKNVAEPPELFQLKCPSRTHKVSNTLKQE

SEQ ID NO: 189046 - protein, 57 aa, Zea Mays
MPVKFLHQQDNKVIYHFSIAHIYRKHHLVHQTYNTTKTVRAAQNRNQYISASIQLKN

SEQ ID NO: 189047 - protein, 701 aa, Zea Mays
MPATTGAPVAAPAGARRPLLFGAAPRPQAPSPPLTTTRCRRAAHGTPPPPSSSSGAAARRRGVKEYVEAAREMARHKDGGPPRWFSPLECGGGRVPGAPTLLYLPEHSAALMKKIKATCSSADQAADNDVRSVVLAHTSRRPNALRRYALRSTGLVEYVERAVKSESSRAPDRPIYLVGESVGACVALAVAARNPGIDLVLILVNPGTSFHRSQLQTLSAFLDLVPEPFHLTTPQLLNFLTGNLMKMPEAFVGRGLSLQEAGPRLSETTSSMLDSLTILVDVLTKESIVCKLEMLKASSSFVNSRLHAVKAQTLVLASGNDELLPSTQEAERLRGALEKCRTRVFRDNGHKILLEAGFDLATTIKGAGYYRRTRRTDFVADYIPPTPDELQQAIDHDRYAYAHAPWQAKLEAGPKACHRPVMLSTLGDGRVVRGLAGLPREGPAVLVGYHMLLGLELGPMVTGILSGTGVHVRGLAHPFMFDGGTERLMPDSAHFDLHRVMGAVPVTGANFYRLLADKEFVLLYPGGAREALHRKGEEYKLFWPEQPEFVRMASRFGATIVPFGVVGEDDICHLLLDYNDLQKVPFYGMLDEALNRDGLRLRTDSMGEVKDQRMHPLLLAPKVPGRFYFVFGKPIETRGREKELRDKEAAQRLYLQVKSEVEGCINYLKEKREEDPYRSILPRLLYQALHGPNAEIPTFEP

SEQ ID NO: 189048 - protein, 403 aa, Zea Mays
MPATTGAPVAAPAGARRPLLFGAAPRPQAPSPPLTTTRCRRAAHGTPPPPSSSSGAAARRRGVKEYVEAAREMARHKDGGPPRWFSPLECGGGRVPGAPTLLYLPEHSAALMKKIKATCSSADQAADNDVRSVVLAHTSRRPNALRRYALRSTGLVEYVERAVKSESSRAPDRPIYLVGESVGACVALAVAARNPGIDLVLILVNPGNLMKMPEAFVGRGLSLQEAGPRLSETTSSMLDSLTILVDVLTKESIVCKLEMLKASSSFVNSRLHAVKAQTLVLASGNDELLPSTQEAERLRGALEKCRTRVFRDNGHKILLEAGFDLATTIKGAGYYRRTRRTDFVADYIPPTPDELQQAIDHDRERSTSCSGRSSLSSSGWRPGSGRRSYHSEWWERMTYAICC

SEQ ID NO: 189049 - protein, 408 aa, Zea Mays
MLKASSSFVNSRLHAVKAQTLVLASGNDELLPSTQEAERLRGALEKCRTRVFRDNGHKILLEAGFDLATTIKGAGYYRRTRRTDFVADYIPPTPDELQQAIDHDRYAYAHAPWQAKLEAGPKACHRPVMLSTLGDGRVVRGLAGLPREGPAVLVGYHMLLGLELGPMVTGILSGTGVHVRGLAHPFMFDGGTERLMPDSAHFDLHRVMGAVPVTGANFYRLLADKEFVLLYPGGAREALHRKGEEYKLFWPEQPEFVRMASRFGATIVPFGVVGEDDICHLLLDYNDLQKVPFYGMLDEALNRDGLRLRTDSMGEVKDQRMHPLLLAPKVPGRFYFVFGKPIETRGREKELRDKEAAQRLYLQVKSEVEGCINYLKEKREEDPYRSILPRLLYQALHGPNAEIPTFEP

SEQ ID NO: 189050 - protein, 220 aa, Zea Mays
MATGTYPPDIIFSYSHLRQKNVPGTIPIPGSGRNVYPCLYPSGYCYPTGNPYPAGAFGSPSPLLLLSFGSGRRCSVEVAAASLWDGGASAKGETKMRSCGATRLRRGRGTRFKKKHHRPSSFVVSLVTAMDAGAAEEDCRRVDRWTAGGRSRMPQPLSVSATQHGELGTGAWGFGRASADRASEVRAESQRRRRRGLGLGAWGFGRASWGLLFAVCLSSA

SEQ ID NO: 189051 - protein, 323 aa, Zea Mays
MYLPLLISCRQHHLISGVPRTSADVPPRVPEEVDGGVQLGAVCGGSVQLHAVDPVRAGEDQLQPAADHQRLRVRGGGRLHPPLPRLRAAGRQAEGARLLPPPRRGRLLARRRRHRRARRGAAPRQGARQRLPRLLHGRLRRPPERHLRCDQDEECRVHALHPLLLPHPQRRRLVLVRPLHQGPLRHAPERGRLLLRVHPDGALLLLPEAQAGVRGRPADDDGRRSRGTAAGGGDGAAPRRPPAPAGRGRTAHVRGPGAGRAAEAGGGDGVAAQGRRQGHLTMACDEPRAMHACPALVLAGSVACLFDYCYAWLGRSELLTDCK

SEQ ID NO: 189052 - protein, 90 aa, Zea Mays
MEVPYCIVKGKARLGSIVHKKNASVLCLTTVKNEDKLEFSKILEAIKANFNDKFDEVRKKWGGGIMGSKSQAKTKAREKLLAKEAAQRMT

SEQ ID NO: 189053 - protein, 74 aa, Zea Mays
MAMTVAAAWLPSTASRRRILSSPLPPFAAPISIHMPRRAPPPSPIHPKPRLFVAYAQLDFSRASLVCLFLRLVT

SEQ ID NO: 189054 - protein, 174 aa, Zea Mays
MHRADKCVLASSGFQGDIKALHKNLAARELLYQHQHNKRMSCPAMAQLLSNTLYYKRFFPYYAFNVLGGLDSEGKGCVFTYDAVGSYERTGYSAQGTGSTLIMPVLDNQLKSPSPLLLPARDAVTPLSESEAIDLVKDVFASATERDIYTGDKLEIVVINKVGTKREYIDLRKD

SEQ ID NO: 189055 - protein, 81 aa, Zea Mays
MVTKPSDYVEPFGKAGASGFTFHIEVARDNWQDLIQSIKSKGMRPGVSLRPGGSRKSGRIGSCDDSRAWFWWSEIYARNDG

SEQ ID NO: 189056 - protein, 395 aa, Zea Mays
MVPNQIIPDLAASAAAADRWVAENLVPYYPATRVKFLLVGNEILSDLSIANSTWPHLVPAMENIHRSLRKRSISSVKIGTTLAMDALADGAFPRPPSAAAFRADIAEAVVRPLLHFLNGTNSYYFVDAYPYFVWADNNLTVSLDYALFQGGRTRYVDPGTGLTYTNLLDEMLDAVVIAMAKLGYGHVKLAIAETGWPNGCDYNQIGGNVHNAAIYNRNLAARMAKNPGTPVRPGAKMPVFVFSLYNEDLKPGPGTERHWGLYYANGTAVYEIDLTGRRPLGSYPPLPAPENNTPYKGPIWCVLSAAASNKLNETAVGNALSYACGQGNGTCDAIQPGKTCYTPNTTAAHASYAFNSYWQQFEKTGATCYFNNLAEQTIKDPSHGSCRFPSSSGSP

SEQ ID NO: 189057 - protein, 80 aa, Zea Mays
MVQKNINLSNIFNTSRAQSKLLNISLVLLAAEPGELVGDHDVQLRSTLHNLLALAGGHVVGDLSAVSPVCISSSSSSETL

SEQ ID NO: 189058 - protein, 302 aa, Zea Mays
MKNYTIYAVSITIRIVLGFMLLALIWKFDFPPFMVLIIAILNDGTIMTISKDRVKPSPQPDSWKLAEIFATGVVLGGYLAMMTVIFFWAAYKTDFFPRLFHVESLEKTAQDDFQKFASAVYLQVSTVSQALIFVTRSRSWSFVERPGFLLVFAFLVAKLIATLIAVYANWAFTAIKGIGWGWAGVIWLYNIVFYFPLDIIKFLIRYALSGRAWNLVLEQRIAFTSKKNFGTEERERKWAHAQRTLHGLQPPEASIFENKTTFNELNQLAEEARRRAEMARLREVSTLKGRMESVVKQKGLDI

SEQ ID NO: 189059 - protein, 283 aa, Zea Mays
MLLALIWKFDFPPFMVLIIAILNDGTIMTISKDRVKPSPQPDSWKLAEIFATGVVLGGYLAMMTVIFFWAAYKTDFFPRLFHVESLEKTAQDDFQKFASAVYLQVSTVSQALIFVTRSRSWSFVERPGFLLVFAFLVAKLIATLIAVYANWAFTAIKGIGWGWAGVIWLYNIVFYFPLDIIKFLIRYALSGRAWNLVLEQRIAFTSKKNFGTEERERKWAHAQRTLHGLQPPEASIFENKTTFNELNQLAEEARRRAEMARLREVSTLKGRMESVVKQKGLDI

SEQ ID NO: 189060 - protein, 162 aa, Zea Mays
MAEQIASDPVFNQMAEQLQKSAQGAGEQGIPALDPQQYMETMQQVMQNPQFVSMAERLGNALMQDPAMSSMLENLTSPAHKEQLEERMARIKEDPSLKPILDEIENGGPSAMVKLARQWVLTFPEILVCPLCSLDLKRLRRKEGMTMSPLFITLQVLVMKRV

SEQ ID NO: 189061 - protein, 304 aa, Zea Mays
MASDESKNSKPEKPSSADPSIREMAEQIASDPVFNQMAEQLQKSAQGAGEQGIPALDPQQYMETMQQVMQNPQFVSMAERLGNALMQDPAMSSMLENLTSPAHKEQLEERMARIKEDPSLKPILDEIENGGPSAMVKYWNDPEVLQKIGQAMGVNLPGDSSVSTVLSGPEETEEEGGDDDESIVHHTASVGDEEGLKKALEGGADKDEEDAEGRRALHFACGYGELKCAEILLEAGAAVDALDKNKNTPLHYAAGYGRKECVDLLLKYGAAVTLQNLDGKTPIEVAKLNSQDEVLKLLEKDAFL

SEQ ID NO: 189062 - protein, 293 aa, Zea Mays
MSNLLNDPSIREMAEQIASDPVFNQMAEQLQKSAQGAGEQGIPALDPQQYMETMQQVMQNPQFVSMAERLGNALMQDPAMSSMLENLTSPAHKEQLEERMARIKEDPSLKPILDEIENGGPSAMVKYWNDPEVLQKIGQAMGVNLPGDSSVSTVLSGPEETEEEGGDDDESIVHHTASVGDEEGLKKALEGGADKDEEDAEGRRALHFACGYGELKCAEILLEAGAAVDALDKNKNTPLHYAAGYGRKECVDLLLKYGAAVTLQNLDGKTPIEVAKLNSQDEVLKLLEKDAFL

SEQ ID NO: 189063 - protein, 229 aa, Zea Mays
MRAKIQNQRSHLQQLDPSIREMAEQIASDPVFNQMAEQLQKSAQGAGEQGIPALDPQQYMETMQQVMQNPQFVSMAERLGNALMQDPAMSSMLENLTSPAHKEQLEERMARIKEDPSLKPILDEIENGGPSAMVKYWNDPEVLQKIGQAMGVNLPGDSSVSTVLSGPEETEEEGGDDDESIVHHTASVGDEEGLKKALEGGADKDEEDAEGRRALHFACGYVEVCRNSP

SEQ ID NO: 189064 - protein, 183 aa, Zea Mays
MRAKIQNQRSHLQQLDPSIREMAEQIASDPVFNQMAEQLQKSAQGAGEQGIPALDPQQYMETMQQVMQNPQFVSMAERLGNALMQDPAMSSMLENLTSPAHKEQLEERMARIKEDPSLKPILDEIENGGPSAMVKLARQWVLTFPEILVCPLCSLDLKRLRRKEGMTMSPLFITLQVLVMKRV

SEQ ID NO: 189065 - protein, 762 aa, Zea Mays
MDPSFRFDPDSSDDEASGAPARGRLAQSPWEFSLYAESVAAEHARRRTTSIDEKILHLRQGCGKPVLSDGSESDVSGSGEDDSNEKEIEEESGDEEDEREIEGVGDEEESGDREGGEEGGSELGEEKDAHEEEDTVEQNETSGPVDPSNFFASSEGATFHANSFLELNLSRPLVRACEALGYQKPTPIQAACIPLALTGRDICGSAITGSGKTAAFSLPVLERLLFRPKRVPAIRVLILTPTRELAAQVHSMIEKLAQFTDIRCCLIVGGLSTKVQEVALRSMPDIVVATPGRIIDHLRNSLSVGLEDLAVVILDEADRLLELGFSAEIQELIRMCPKRRQTMLFSATMTEEIDELIKLSLNKPVRLEADPSLKRPATLTEEVVRIRRARESNQEAVLLALCLKTFKRSVIIFSGTKQSAHRLKIIFGLSGMKAAELHGNLTQAQRLEALELFRKQEVDFLIATDVAARTVINFACPRDVKTYLHRVGRTARAGREGYAVTFVTDDDRSLLKAIAKKAGSQLKSRIVAEKPVAECAQLIEQLEDQISIIIREEKVEREARKAEMEIAKAENMIAHKDEIYSRPKRTWFATEREKKLLVAAAKESLGQGKSTSGIISAKQAEDLRLKEKKRREHEKDLPRKKRRRLEAQREMLEDEDEDDEEAKESDRGKKLKKGQSLVDAAYRKAKSLKAASKRGPGASKGKKEKNARQYSEKTPNRHEEMRELFQNDMSEWKQGRSSKKNNNFAHKKSKAFNSKARYKRRK

SEQ ID NO: 189066 - protein, 575 aa, Zea Mays
MDPSFRFDPDSSDDEASGAPARGRLAQSPWEFSLYAESVAAEHARRRTTSIDEKILHLRQGCGKPVLSDGSESDVSGSGEDDSNEKEIEEESGDEEDEREIEGVGDEEESGDREGGEEGGSELGEEKDAHEEEDTVEQNETSGPVDPSNFFASSEGATFHANSFLELNLSRPLVRACEALGYQKPTPIQAACIPLALTGRDICGSAITGSGKTAAFSLPVLERLLFRPKRVPAIRVLILTPTRELAAQVHSMIEKLAQFTDIRCCLIVGGLSTKVQEVALRSMPDIVVATPGRIIDHLRNSLSVGLEDLAVVILDEADRLLELGFSAEIQELIRMCPKRRQTMLFSATMTEEIDELIKLSLNKPVRLEADPSLKRPATLTEEVVRIRRARESNQEAVLLALCLKTFKRSVIIFSGTKQSAHRLKIIFGLSGMKAAELHGNLTQAQRLEALELFRKQEVDFLIATDVAARGIDIVGVQTVINFACPRDVKTYLHRVGRTARAGREGYAVTFVTDDDRSLLKAIAKKAGSQLKSRIVAEKPVAECAQLIEQLEDQISIIIREEKEARKAEMEIAKKI

SEQ ID NO: 189067 - protein, 504 aa, Zea Mays
MDPSFRFDPDSSDDEASGAPARGRLAQSPWEFSLYAESVAAEHARRRTTSIDEKILHLRQGCGKPVLSDGSESDVSGSGEDDSNEKEIEEESGDEEDEREIEGVGDEEESGDREGGEEGGSELGEEKDAHEEEDTVEQNETSGPVDPSNFFASSEGATFHANSFLELNLSRPLVRACEALGYQKPTPIQAACIPLALTGRDICGSAITGSGKTAAFSLPVLERLLFRPKRVPAIRVLILTPTRELAAQVHSMIEKLAQFTDIRCCLIVGGLSTKVQEVALRSMPDIVVATPGRIIDHLRNSLSVGLEDLAVVILDEADRLLELGFSAEIQELIRMCPKRRQTMLFSATMTEEIDELIKLSLNKPVRLEADPSLKRPATLTEEVVRIRRARESNQEAVLLALCLKTFKRSVIIFSGTKQSAHRLKIIFGLSGMKAAELHGNLTQAQRLEALELFRKQEVDFLIATDVAARGIDIVGVQTVINFACPRDVKTTGRKRRLCRNICNR

SEQ ID NO: 189068 - protein, 492 aa, Zea Mays
MDPSFRFDPDSSDDEASGAPARGRLAQSPWEFSLYAESVAAEHARRRTTSIDEKILHLRQGCGKPVLSDGSESDVSGSGEDDSNEKEIEEESGDEEDEREIEGVGDEEESGDREGGEEGGSELGEEKDAHEEEDTVEQNETSGPVDPSNFFASSEGATFHANSFLELNLSRPLVRACEALGYQKPTPIQAACIPLALTGRDICGSAITGSGKTAAFSLPVLERLLFRPKRVPAIRVLILTPTRELAAQVHSMIEKLAQFTDIRCCLIVGGLSTKVQEVALRSMPDIVVATPGRIIDHLRNSLSVGLEDLAVVILDEADRLLELGFSAEIQELIRMCPKRRQTMLFSATMTEEIDELIKLSLNKPVRLEADPSLKRPATLTEEVVRIRRARESNQEAVLLALCLKTFKRSVIIFSGTKQSAHRLKIIFGLSGMKAAELHGNLTQAQRLEALELFRKQEVDFLIATDVAARLSSSCWPHSTGRKRRLCRNICNR

SEQ ID NO: 189069 - protein, 327 aa, Zea Mays
MIEKLAQFTDIRCCLIVGGLSTKVQEVALRSMPDIVVATPGRIIDHLRNSLSVGLEDLAVVILDEADRLLELGFSAEIQELIRMCPKRRQTMLFSATMTEEIDELIKLSLNKPVRLEADPSLKRPATLTEEVVRIRRARESNQEAVLLALCLKTFKRSVIIFSGTKQSAHRLKIIFGLSGMKAAELHGNLTQAQRLEALELFRKQEVDFLIATDVAARGIDIVGVQTVINFACPRDVKTYLHRVGRTARAGREGYAVTFVTDDDRSLLKAIAKKAGSQLKSRIVAEKPVAECAQLIEQLEDQISIIIREEKVEREARKAEMEIAKKI

SEQ ID NO: 189070 - protein, 241 aa, Zea Mays
MIEKLAQFTDIRCCLIVGGLSTKVQEVALRSMPDIVVATPGRIIDHLRNSLSVGLEDLAVVILDEADRLLELGFSAEIQELIRMCPKRRQTMLFSATMTEEIDELIKLSLNKPVRLEADPSLKRPATLTEEVVRIRRARESNQEAVLLALCLKTFKRSVIIFSGTKQSAHRLKIIFGLSGMKAAELHGNLTQAQRLEALELFRKQEVDFLIATDVAARLSSSCWPHSTGRKRRLCRNICNR

SEQ ID NO: 189071 - protein, 488 aa, Zea Mays
MPDIVVATPGRIIDHLRNSLSVGLEDLAVVILDEADRLLELGFSAEIQELIRMCPKRRQTMLFSATMTEEIDELIKLSLNKPVRLEADPSLKRPATLTEEVVRIRRARESNQEAVLLALCLKTFKRSVIIFSGTKQSAHRLKIIFGLSGMKAAELHGNLTQAQRLEALELFRKQEVDFLIATDVAARGIDIVGVQTVINFACPRDVKTYLHRVGRTARAGREGYAVTFVTDDDRSLLKAIAKKAGSQLKSRIVAEKPVAECAQLIEQLEDQISIIIREEKVEREARKAEMEIAKAENMIAHKDEIYSRPKRTWFATEREKKLLVAAAKESLGQGKSTSGIISAKQAEDLRLKEKKRREHEKDLPRKKRRRLEAQREMLEDEDEDDEEAKESDRGKKLKKGQSLVDAAYRKAKSLKAASKRGPGASKGKKEKNARQYSEKTPNRHEEMRELFQNDMSEWKQGRSSKKNNNFAHKKSKAFNSKARYKRRK

SEQ ID NO: 189072 - protein, 191 aa, Zea Mays
MIAHKDEIYSRPKRTWFATEREKKLLVAAAKESLGQGKSTSGIISAKQAEDLRLKEKKRREHEKDLPRKKRRRLEAQREMLEDEDEDDEEAKESDRGKKLKKGQSLVDAAYRKAKSLKAASKRGPGASKGKKEKNARQYSEKTPNRHEEMRELFQNDMSEWKQGRSSKKNNNFAHKKSKAFNSKARYKRRK

SEQ ID NO: 189073 - protein, 112 aa, Zea Mays
MLEDEDEDDEEAKESDRGKKLKKGQSLVDAAYRKAKSLKAASKRGPGASKGKKEKNARQYSEKTPNRHEEMRELFQNDMSEWKQGRSSKKNNNFAHKKSKAFNSKARYKRRK

SEQ ID NO: 189074 - protein, 147 aa, Zea Mays
MGLYCCLAHSRDCFLDSKILRTERRQAAAETGSGSSRPALSRAAALHRPTCRYDTAPLEGGFAAMDRVGGGEKQLEDCTVANWAHATGRWLGGVSLWGGECSRNLVLLSCGCSCCYSCGHKEEILSPTRLLRHYWNHAGHYHGHYPV

SEQ ID NO: 189075 - protein, 69 aa, Zea Mays
MAEEDIATFIQVVSRCTGIPMTRLGHNDKERLVVLADRRVAIALPLLMYLSNVEKGGHHIATVDVPIKC

SEQ ID NO: 189076 - protein, 469 aa, Zea Mays
MLGAALRLRVRVLRRRRSHRGRRRGRRSLGRVGDDDDDEGGREPVLLVSGMGGSVLHARRRSNSKFDLRVWVRILFANLDFKKYLWSLYNADTGYVEPLDDDVEIVVPEDDHGLFAIDILDPSWFVELLHLSMVYHFHGMIDMLINCGYEKGTTLFGYGYDFRQSNRIDKAMAGLRAKLETAYKTSGGKKVNLISHSMGGLLVRCFMSMNHDVFTKYVNKWICIACPFQGAPGCINDSLLTGLQFVYGFESFFFVSRWAMHQLLVECPSIYEMLPNPEFKWKEKPIIQVWRKNPEKDGTVELVQYEATDCVSLFEEALRNNELTYNGKKVALPFNMSVFKWATKTRQILDNAELPDTVSFYNIYGTSYETPYDVCYGSESSPIGDLSEVCHTVPSYTYVDGDCTVPIESARADGFSAKERVGVKADHRGLLSDENVFKLLKKWLGVSEKKSEWRCVSKSYSKVGNWVAL

SEQ ID NO: 189077 - protein, 459 aa, Zea Mays
MLGAALRLRVRVLRRRRSHRGRRRGRRSLGRVGDDDDDEGGREPVLLVSGMGGSVLHARRRSNSKFDLRVWVRILFANLDFKKYLWSLYNADTGYVEPLDDDVEIVVPEDDHGLFAIDILDPSWFVELLHLSMVYHFHGMIDMLINCGYEKGTTLFGYGYDFRQSNRIDKAMAGLRAKLETAYKTSGGKKVNLISHSMGGLLVFTKYVNKWICIACPFQGAPGCINDSLLTGLQFVYGFESFFFVSRWAMHQLLVECPSIYEMLPNPEFKWKEKPIIQVWRKNPEKDGTVELVQYEATDCVSLFEEALRNNELTYNGKKVALPFNMSVFKWATKTRQILDNAELPDTVSFYNIYGTSYETPYDVCYGSESSPIGDLSEVCHTVPSYTYVDGDCTVPIESARADGFSAKERVGVKADHRGLLSDENVFKLLKKWLGVSEKKSEWRCVSKSYSKVGNWVAL

SEQ ID NO: 189078 - protein, 303 aa, Zea Mays
MLGAALRLRVRVLRRRRSHRGRRRGRRSLGRVGDDDDDEGGREPVLLVSGMGGSVLHARRRSNSKFDLRVWVRILFANLDFKKYLWSLYNADTGYVEPLDDDVEIVVPEDDHGLFAIDILDPSWFVELLHLSMVYHFHGMIDMLINCGYEKGTTLFGYGYDFRQSNRIDKAMAGLRAKLETAYKTSGGKKVNLISHSMGGLLVRCFMSMNHDVFTKYVNKWICIACPFQGAPGCINDSLLTGLQFVYGFESFFFVSRWAMHQLNSSGRKNQLFRFGVRTLKRMELWSLFNMKQLIVCPCSKKL

SEQ ID NO: 189079 - protein, 341 aa, Zea Mays
MLGAALRLRVRVLRRRRSHRGRRRGRRSLGRVGDDDDDEGGREPVLLVSGMGGSVLHARRRSNSKFDLRVWVRILFANLDFKKYLWSLYNADTGYVEPLDDDVEIVVPEDDHGLFAIDILDPSWFVELLHLSMVYHFHGMIDMLINCGYEKGTTLFGYGYDFRQSNRIDKAMAGLRAKLETAYKTSGGKKVNLISHSMGGLLVRCFMSMNHDVSFHVFCVFLLMHKYPCQFSPFSRYSLSMSTNGFALLVHSKVPPDASMILYLLDCNLFMVLRASFSYLDGQCTNCLSNAHQSMKCYRIQNSSGRKNQLFRFGVRTLKRMELWSLFNMKQLIVCPCSKKL

SEQ ID NO: 189080 - protein, 418 aa, Zea Mays
MLGAALRLRVRVLRRRRSHRGRRRGRRSLGRVGDDDDDEGGREPVLLVSGMGGSVLHARRRSNSKFDLRVWVRILFANLDFKKYLWSLYNADTGYVEPLDDDVEIVVPEDDHGLFAIDILDPSWFVELLHLSMVYHFHGMIDMLINCGYEKGTTLFGYGYDFRQSNRIDKAMAGLRAKLETAYKTSGGKKVNLISHSMGGLLVRCFMSMNHDVFTKYVNKWICIACPFQGAPGCINDSLLTGLQFVYGFESFFFVSRWAMHQLLVECPSIYEMLPNPEFKWKEKPIIQVWRKNPEKDGTVELVQYEATDCVSLFEEALRNNELTYNGKKVALPFNMSVFKWATKTRQILDNAELPDTVSFYNIYGTSYETPYDVCYGSESSPIGDLSEVCHTVPSYTYVDGDCTVPIESARRSLVSHR

SEQ ID NO: 189081 - protein, 293 aa, Zea Mays
MRKGPHYLDMVMIFAKATDKAMAGLRAKLETAYKTSGGKKVNLISHSMGGLLVRCFMSMNHDVFTKYVNKWICIACPFQGAPGCINDSLLTGLQFVYGFESFFFVSRWAMHQLLVECPSIYEMLPNPEFKWKEKPIIQVWRKNPEKDGTVELVQYEATDCVSLFEEALRNNELTYNGKKVALPFNMSVFKWATKTRQILDNAELPDTVSFYNIYGTSYETPYDVWLIGCQCIKFKADGFSAKERVGVKADHRGLLSDENVFKLLKKWLGVSEKKSEWRCVSKSYSKVGNWVAL

SEQ ID NO: 189082 - protein, 309 aa, Zea Mays
MRKGPHYLDMVMIFAKATDKAMAGLRAKLETAYKTSGGKKVNLISHSMGGLLVFTKYVNKWICIACPFQGAPGCINDSLLTGLQFVYGFESFFFVSRWAMHQLLVECPSIYEMLPNPEFKWKEKPIIQVWRKNPEKDGTVELVQYEATDCVSLFEEALRNNELTYNGKKVALPFNMSVFKWATKTRQILDNAELPDTVSFYNIYGTSYETPYDVCYGSESSPIGDLSEVCHTVPSYTYVDGDCTVPIESARADGFSAKERVGVKADHRGLLSDENVFKLLKKWLGVSEKKSEWRCVSKSYSKVGNWVAL

SEQ ID NO: 189083 - protein, 225 aa, Zea Mays
MMYSLSMSTNGFALLVHSKLVECPSIYEMLPNPEFKWKEKPIIQVWRKNPEKDGTVELVQYEATDCVSLFEEALRNNELTYNGKKVALPFNMSVFKWATKTRQILDNAELPDTVSFYNIYGTSYETPYDVCYGSESSPIGDLSEVCHTVPSYTYVDGDCTVPIESARADGFSAKERVGVKADHRGLLSDENVFKLLKKWLGVSEKKSEWRCVSKSYSKVGNWVAL

SEQ ID NO: 189084 - protein, 220 aa, Zea Mays
MESFVELLHLSMVYHFHGMIDMLINCGYEKGTTLFGYGYDFRQSNRIDKAMAGLRAKLETAYKTSGGKKVNLISHSMGGLLVRCFMSMNHDVSFHVFCVFLLMHKYPCQFSPFSRYSLSMSTNGFALLVHSKVPPDASMILYLLDCNLFMVLRASFSYLDGQCTNCLSNAHQSMKCYRIQNSSGRKNQLFRFGVRTLKRMELWSLFNMKQLIVCPCSKKL

SEQ ID NO: 189085 - protein, 210 aa, Zea Mays
MHQLLVECPSIYEMLPNPEFKWKEKPIIQVWRKNPEKDGTVELVQYEATDCVSLFEEALRNNELTYNGKKVALPFNMSVFKWATKTRQILDNAELPDTVSFYNIYGTSYETPYDVCYGSESSPIGDLSEVCHTVPSYTYVDGDCTVPIESARADGFSAKERVGVKADHRGLLSDENVFKLLKKWLGVSEKKSEWRCVSKSYSKVGNWVAL

SEQ ID NO: 189086 - protein, 481 aa, Zea Mays
MSGGSVSAVFYADKYHPIQAGSIDGTDVAPHDNAVLRALICSQAGLYDPFGDPKASGDPHRTVFVGRLSRQTDDDTLRKAMSRYGRVKSMRLVRDIGASRGYAFVEYETDREMHRAYEDAHHSVIEGSEVIVDYYRQQLMPGWIPRRLGGGLGGMKESGQLRFGGRERPFRAPLRPIPYDELKKLGIPPPPEGRYMTRYQVPPPPRRKSSNIDIEDSPPGRRSKDRAGVSTYRRQRSSNDDDETLLKRKSSRDGLEESQSRRSARSSITKEDNRYSSQRKSKEHDKGHRKHRRSQDPGEVSPPAEEDGSYERQRTLEEPDRSPDRYHHHWHHRDDTYESRHLRHRDHRKRRRSQEPGEVSPPEEDCSHERERTSDEPGRSPDRYHHHWHQRDGTYESRHSRHRDHRKRRRSQEPGVSPLEEDSSYERERTSDELGRSPDWYHHHRHHREDTYESRHSHHRDRRRHGDRHRTKRSESRDYRD

SEQ ID NO: 189087 - protein, 506 aa, Zea Mays
MIVLRNQTYVLISCKTVEALTRHSVFCPSIPLFPIARSPGRPSPAMDATMAFTSGSPTPTRFYSSALLSLRTPKSLSVYGPWRWRGRGRPLLALRHRSQAQAAAAAAGAAEASHHDVVVVGAGIVGLAIARHLLLHTSLSVAIADAAVPCSGATGAGQGYIWMSHRTPGTDTWELALRSKQLWEELATEVDGQGGGGAREKLGWMRTVGRSSEELGTLDERTKALSQAGIHAEFLSASSLHALEPALSVGKDGGAMFLPQDCQIDAFQAVSLIEKTNNSYSSEGRYREFYNDPAMSLIRSDVTGKVEAVQTSRNILYGRKAFVIASGAWTRSLLHSFVEPALTLDIPVKPRKGHLLVLEKFDKVKLNHALMEVGYVDHQITKSNSTHIASESSEDELGALSVSMTATLDTKGNLVLGSSREFKGFSREVDRSVVQCIWERAGEFFPAMKNVSFDIDQNTQIRIGHRPYMPDGKPVIDFIPNLSNILIATGHEGSGLTLMKGVKARS

SEQ ID NO: 189088 - protein, 510 aa, Zea Mays
MIVLRNQTYVLISCKTVEALTRHSVFCPSIPLFPIARSPGRPSPAMDATMAFTSGSPTPTRFYSSALLSLRTPKSLSVYGPWRWRGRGRPLLALRHRSQAQAAAAAAGAAEASHHDVVVVGAGIVGLAIARHLLLHTSLSVAIADAAVPCSGATGAGQGYIWMSHRTPGTDTWELALRSKQLWEELATEVDGQGGGGAREKLGWMRTGSLLVGRSSEELGTLDERTKALSQAGIHAEFLSASSLHALEPALSVGKDGGAMFLPQDCQIDAFQAVSLIEKTNNSYSSEGRYREFYNDPAMSLIRSDVTGKVEAVQTSRNILYGRKAFVIASGAWTRSLLHSFVEPALTLDIPVKPRKGHLLVLEKFDKVKLNHALMEVGYVDHQITKSNSTHIASESSEDELGALSVSMTATLDTKGNLVLGSSREFKGFSREVDRSVVQCIWERAGEFFPAMKNVSFDIDQNTQIRIGHRPYMPDGKPVIDFIPNLSNILIATGHEGSGLTLMKGVKARS

SEQ ID NO: 189089 - protein, 536 aa, Zea Mays
MIVLRNQTYVLISCKTVEALTRHSVFCPSIPLFPIARSPGRPSPAMDATMAFTSGSPTPTRFYSSALLSLRTPKSLSVYGPWRWRGRGRPLLALRHRSQAQAAAAAAGAAEASHHDVVVVGAGIVGLAIARHLLLHTSLSVAIADAAVPCSGATGAGQGYIWMSHRTPGTDTWELALRSKQLWEELATEVDGQGGGGAREKLGWMRTGSLLVGRSSEELGTLDERTKALSQAGIHAEFLSASSLHALEPALSVGKDGGAMFLPQDCQIDAFQAVSLIEKTNNSYSSEGRYREFYNDPAMSLIRSDVTGKVEAVQTSRNILYGRKAFVIASGAWTRSLLHSFVEPALTLDIPVKPRKGHLLVLEKFDKVKLNHALMEVGYVDHQITKSNSTHIASESSEDELGALSVSMTATLDTKGNLVLGSSREFKGFSREVDRSVVQCIWERAGEFFPAMKNVSFDIDQNTQIRIGHRPYMPDGKPVIDFIPNLSNILIATGHEGSGLTLALGTAEMVTDMILGNPGKVSYSPFSIKRRFSVFD

SEQ ID NO: 189090 - protein, 551 aa, Zea Mays
MIVLRNQTYVLISCKTVEALTRHSVFCPSIPLFPIARSPGRPSPAMDATMAFTSGSPTPTRFYSSALLSLRTPKSLSVYGPWRWRGRGRPLLALRHRSQAQAAAAAAGAAEASHHDVVVVGAGIVGLAIARHLLLHTSLSVAIADAAVPCSGATGAGQGYIWMSHRTPGTDTWELALRSKQLWEELATEVDGQGGGGAREKLGWMRTGSLLVGRSSEELGTLDERTKALSQAGIHAEFLSASSLHALEPALSVGKDGGAMFLPQDCQIDAFQAVSLIEKTNNSYSSEGRYREFYNDPAMSLIRSDVTGKVEAVQTSRNILYGRKAFVIASGAWTRSLLHSFVEPALTLDIPVKPRKGHLLVLEKFDKVKLNHALMEVGYVDHQITKSNSTHIASESSEDELGALSVSMTATLDTKGNLVLGSSREFKGFSREVDRSVVQCIWERAGEFFPAMKNVSFDIDQNTQIRIGHRPYMPDGKPVIDFIPNLSNILIATGHEGSGLTLALGTAEMVTDMILGNPGKVSYSPFSIKRRFSGFSSPSLRVSINSDISIK

SEQ ID NO: 189091 - protein, 643 aa, Zea Mays
MEGEGDASGSDEVVQLEDAVELLVEHLVVPVLPRGQVDREEALSPEAQEAVARQVHATVLLYNYYHRKQFPQLEFANPERFSMSASLSVTNKNLLMYLNQAQNRLGNGVGAGLSVTDKAIVDACDIAEALDPTKDSPEMTTWPISKVAVLLLNRTKKECVLEHGSETKGVWSMFEKEITTALGGSLSSDMPVQGSSNKSVGLPSEPYVLQQIAYSEVELKTGMKHTNLRFIEEHRVYSLSKKGTATMLFLLHYDQTVDSKLKEMPLDALIERMSGPIFQSGPYPTTTSVVEYYHLLPYKEVLLNVLNRDWPLCSSLSVPKEQVFQNGKSSFPSEIEESLKEQEANSNSKTKMKKMPTDVSTPKKNKQVVKAVRDSGTNESSTSKNKKGSNTNCKRTSEACKTKVATYAEHGDGQSPTKDLQASAQMDKSRTEKNTKSRNVPQNIFLTPDVGPVNNDHALKSQKEKVTDKSGGITGNMNVQKYATLQLLWKMRDDTLHEHFMLGDRCAEYEMDIQTILTEMTPKVMSILKKYENSWKAMKVANPISSGEGCQTMNIKRKKLKEAILLRNRCQELDDICRESNWILPRYRVLPSVTGDMYQASVHLMGPDFNLSVDGDVRVTPHEARDSAASNMLSQLQQKAREG

SEQ ID NO: 189092 - protein, 393 aa, Zea Mays
MGYEESKKHLLSLSYPELQCLCKRYNLPAKKTHSQLASSLASLLEASPSPAPPPVQLANMKEASTCNHANNKRGPYNGRDDGKPLVHAKHQKGDQTPVDETSKKGIDTGTSIPPVSMNHGRPEYHGHLSSDLRTAHNLQSQCDVGIATNTTNLEFVGKHDCSPANVIDQICPPIIQKYPSNGNGQASTKFGRMNDNTEKGCRLSDKISANAAAVQFSVMSDEGIDLLVDLNSSSATWAKNFMAEMHITPPSEHGNFSSFISSLSTKDDHSTASPSGNIIVDIQNKGAENIVPSTDSSLASDVGESSRSVLYPVDTTTVNSVSSTSTVAGTPVELSGYQEGAPVVCSSCLTADVQNNVTSDMPGASDNEGMRLEVAPMKTPVQNLQENKLEMKP

SEQ ID NO: 189093 - protein, 539 aa, Zea Mays
MGYEESKKHLLSLSYPELQCLCKRYNLPAKKTHSQLASSLASLLEASPSPAPPPVQLANMKEASTCNHANNKRGPYNGRDDGKPLVHAKHQKGDQTPVDETSKKGIDTGTSIPPVSMNHGRPEYHGHLSSDLRTAHNLQSQCDVGIATNTTNLEFVGKHDCSPANVIDQICPPIIQKYPSNGNGQASTKFGRMNDNTEKGCRLSDKISANAAAVQFSVMSDEGIDLLVDLNSSSATWAKNFMAEMHITPPSEHGNFSSFISSLSTKDDHSTASPSGNIIVDIQNKGAENIVPSTDSSLASDVGESSRSVLYPVDTTTVNSVSSTSTVAGASDNEVLPPEPADVFLQSERITAPAVCGSVQPIGNKCTMSSGDEVRSGSNEDSCPKSSGKQTGDETLMENEPVKAVAVEENIGRDDSLSISYQLACKTVAELPVTDAQSPASSSGHFIAGNFDNTHPTSSATSDNAINSLTSKFGAELAQSHDSTDKKGQNDAEEVEELESMTPAAYSEPPRNIQLSLRSASAKVKPSTLPRRSARLLPK

SEQ ID NO: 189094 - protein, 505 aa, Zea Mays
MGYEESKKHLLSLSYPELQCLCKRYNLPAKKTHSQLASSLASLLEASPSPAPPPVQLANMKEASTCNHANNKRGPYNGRDDGKPLVHAKHQKGDQTPVDETSKKGIDTGTSIPPVSMNHGRPEYHGHLSSDLRTAHNLQSQCDVGIATNTTNLEFVGKHDCSPANVIDQICPPIIQKYPSNGNGQASTKFGRMNDNTEKGCRLSDKISANAAAVQFSVMSDEGIDLLVDLNSSSATWAKNFMAEMHITPPSEHGNFSSFISSLSTKDDHSTASPSGNIIVDIQNKGAENIVPSTDSSLASDVGESSRSVLYPVDTTTVNSVSSTSTVAGTPVELSGYQEGAPVVCSSCLTADVQNNVTSDMPGASDNEVLPPEPADVFLQSERITAPAVCGSVQPIGNKCTMSSGDEVRSGSNEDSCPKSSGKQTGDETLMENEPVKAVAVEENIGRDDSLSISYQLACKTVAELPVTDAQSPASSSGHFIAGNFDNTHPTSSATSILVYPEQFT

SEQ ID NO: 189095 - protein, 387 aa, Zea Mays
MAANPMGYEESKKHLLSLSYPELQCLCKRYNLPAKKTHSQLASSLASLLEASPSPAPPPVQLANMKEASTCNHANNKRGPYNGRDDGKPLVHAKHQKGDQTPVDETSKKGIDTGTSIPPVSMNHGRPEYHGHLSSDLRTAHNLQSQCDVGIATNTTNLEFVGKHDCSPANVIDQICPPIIQKYPSNGNGQASTKFGRMNDNTEKGCRLSDKISANAAAVQFSVMSDEGIDLLVDLNSSSATWAKNFMAEMHITPPSEHGNFSSFISSLSTKDDHSTASPSGNIIVDIQNKGAENIVPSTDSSLASDVGESSRSVLYPVDTTTVNSVSSTSTVAGTPVELSGYQEGAPVVLRITRCFLQNLLMSFCSLKESLHQLYVVQCNQLAINAQ

SEQ ID NO: 189096 - protein, 566 aa, Zea Mays
MEDDDLMRPRYRSSKSKGGNNAAHNEVSARPKRQKLSNSIPRREGLRPRRSLRGQRLHPYHESEDDQESSDEQGAEDQRENGNEIEEDVGDEEEVDGGDEAEGDGDDEDGEEEQEGRRRYDLRERSEVRRPSPRKEGKHRPQSPRRVLVHGIGPKNSKYLKKGGSRMHKRPRFSLPDDSDDSLLVDEPDEGPSMPWMRSGRGSMPWLMGGLDMHSPAAWGLSVGASGWGHQGDTSTSLMPGVQTAGPSSKGGADIQPLQVDENVSFKDIGGLSEYIDALKEMVFFPLLYPDFFANYHITPPRGVLLCGPPGTGKTLIARALACAASKAGQKVSFYMRKGADVLSKWVGEAERQLKLLFEEAQKNQPSIIFFDEIDGLAPVRSSKQEQIHNSIVSTLLALMDGLDSRGQVVLIGATNRIDAIDGALRRPGRFDREFYFPLPGYEARAEILDIHTRKWKDPPPKELKMELAASCVGYCGADLKALCTEAAIRAFREKYPQVYTSDDKFVIDVDSVSVEKYHFLEAMSTITPAAHRGSIVHSRPLSTILASSLLSPMDLPSLLFIDLAF

SEQ ID NO: 189097 - protein, 1170 aa, Zea Mays
MVAMEGKGDASVTPVRTSDRLRQRPKYYARGYMYYNPAMRKKVKSKKRTAASQIAKKLLRKPAARPPPADCVAANLRRSTRKRRISVNLEGYDTDSSSMEDDDLMRPRYRSSKSKGGNNAAHNEVSARPKRQKLSNSIPRREGLRPRRSLRGQRLHPYHESEDDQESSDEQGAEDQRENGNEIEEDVGDEEEVDGGDEAEGDGDDEDGEEEQEGRRRYDLRERSEVRRPSPRKEGKHRPQSPRRVLVHGIGPKNSKYLKKGGSRMHKRPRFSLPDDSDDSLLVDEPDEGPSMPWMRSGRGSMPWLMGGLDMHSPAAWGLSVGASGWGHQGDTSTSLMPGVQTAGPSSKGGADIQPLQVDENVSFKDIGGLSEYIDALKEMVFFPLLYPDFFANYHITPPRGVLLCGPPGTGKTLIARALACAASKAGQKVSFYMRKGADVLSKWVGEAERQLKLLFEEAQKNQPSIIFFDEIDGLAPVRSSKQEQIHNSIVSTLLALMDGLDSRGQVVLIGATNRIDAIDGALRRPGRFDREFYFPLPGYEARAEILDIHTRKWKDPPPKELKMELAASCVGYCGADLKALCTEAAIRAFREKYPQVYTSDDKFVIDVDSVSVEKYHFLEAMSTITPAAHRGSIVHSRPLSTVIAPCLKSHLEKIMEHISDIFPFLSSIDFSKFSALSYGSSIPLVYRPRLLICGGESVGLDHVGPAVLHELEKFSVHSLGLPSLLSDPSAKTPEEALVHIFGEAKRTTPSILYIPQFHLWWDTAHEQLRAVLLTLLNELPSNLPVLLLGTSSVVFTDLEEECASIFSSRNVYQVDQPSFDDRLRYFSILFESLLSFQMEESRNKSKKQKSAIDLPKAPKEVEGPKVSELKARAEAEQHAVRRMRMCLRDICNRILYNKRFNVFHFPVLEDEVPDYRSIIHKPMDMATVLQRVDSGQYLTRAAFIKDIDLIVSNAKVQGMLSQMDPSLVSFCDKIASQGGPLQAVDDEDRAILQAAPVAQLVSGTRISARLRNVQPEVNLSQSYEVLRRQKKSAENEQSMTRDEKSPEDVDLSKPTDAEEAAKEPESNGTTKEANDSPAKEPEVSTSPEPMESDNGKIAAATGDDLLEQLEALKQRFMELTASYGVPQLERLYSKIMKGAIELTSKESNEDHRRLVVRYLWTFVENSNNF

SEQ ID NO: 189098 - protein, 827 aa, Zea Mays
MHKRPRFSLPDDSDDSLLVDEPDEGPSMPWMRSGRGSMPWLMGGLDMHSPAAWGLSVGASGWGHQGDTSTSLMPGVQTAGPSSKGGADIQPLQVDENVSFKDIGGLSEYIDALKEMVFFPLLYPDFFANYHITPPRGVLLCGPPGTGKTLIARALACAASKAGQKVSFYMRKGADVLSKWVGEAERQLKLLFEEAQKNQPSIIFFDEIDGLAPVRSSKQEQIHNSIVSTLLALMDGLDSRGQVVLIGATNRIDAIDGALRRPGRFDREFYFPLPGYEARAEILDIHTRKWKDPPPKELKMELAASCVGYCGADLKALCTEAAIRAFREKYPQVYTSDDKFVIDVDSVSVEKYHFLEAMSTITPAAHRGSIVHSRPLSTVIAPCLKSHLEKIMEHISDIFPFLSSIDFSKFSALSYGSSIPLVYRPRLLICGGESVGLDHVGPAVLHELEKFSVHSLGLPSLLSDPSAKTPEEALVHIFGEAKRTTPSILYIPQFHLWWDTAHEQLRAVLLTLLNELPSNLPVLLLGTSSVVFTDLEEECASIFSSRNVYQVDQPSFDDRLRYFSILFESLLSFQMEESRNKSKKQKSAIDLPKAPKEVEGPKVSELKARAEAEQHAVRRMRMCLRDICNRILYNKRFNVFHFPVLEDEVPDYRSIIHKPMDMATVLQRVDSGQYLTRAAFIKDIDLIVSNAKTYNGDDYNGSRIVSRACELRDVVQGMLSQMDPSLVSFCDKIASQGGPLQAVDDEDRAILQAAPVAQLVSGTRISARLRNVQPEVNLSQSYEVLRRQKKSAENEQSQFYDLNYNTCICLLTVIAMIMENIELSFQA

SEQ ID NO: 189099 - protein, 1094 aa, Zea Mays
MEDDDLMRPRYRSSKSKGGNNAAHNEVSARPKRQKLSNSIPRREGLRPRRSLRGQRLHPYHESEDDQESSDEQGAEDQRENGNEIEEDVGDEEEVDGGDEAEGDGDDEDGEEEQEGRRRYDLRERSEVRRPSPRKEGKHRPQSPRRVLVHGIGPKNSKYLKKGGSRMHKRPRFSLPDDSDDSLLVDEPDEGPSMPWMRSGRGSMPWLMGGLDMHSPAAWGLSVGASGWGHQGDTSTSLMPGVQTAGPSSKGGADIQPLQVDENVSFKDIGGLSEYIDALKEMVFFPLLYPDFFANYHITPPRGVLLCGPPGTGKTLIARALACAASKAGQKVSFYMRKGADVLSKWVGEAERQLKLLFEEAQKNQPSIIFFDEIDGLAPVRSSKQEQIHNSIVSTLLALMDGLDSRGQVVLIGATNRIDAIDGALRRPGRFDREFYFPLPGYEARAEILDIHTRKWKDPPPKELKMELAASCVGYCGADLKALCTEAAIRAFREKYPQVYTSDDKFVIDVDSVSVEKYHFLEAMSTITPAAHRGSIVHSRPLSTVIAPCLKSHLEKIMEHISDIFPFLSSIDFSKFSALSYGSSIPLVYRPRLLICGGESVGLDHVGPAVLHELEKFSVHSLGLPSLLSDPSAKTPEEALVHIFGEAKRTTPSILYIPQFHLWWDTAHEQLRAVLLTLLNELPSNLPVLLLGTSSVVFTDLEEECASIFSSRNVYQVDQPSFDDRLRYFSILFESLLSFQMEESRNKSKKQKSAIDLPKAPKEVEGPKVSELKARAEAEQHAVRRMRMCLRDICNRILYNKRFNVFHFPVLEDEVPDYRSIIHKPMDMATVLQRVDSGQYLTRAAFIKDIDLIVSNAKTYNGDDYNGSRIVSRACELRDVVQGMLSQMDPSLVSFCDKIASQGGPLQAVDDEDRAILQAAPVAQLVSGTRISARLRNVQPEVNLSQSYEVLRRQKKSAENEQSMTRDEKSPEDVDLSKPTDAEEAAKEPESNGTTKEANDSPAKEPEVSTSPEPMESDNGKIAAATGDDLLEQLEALKQRFMELTASYGVPQLERLYSKIMKGAIELTSKESNEDHRRLVVRYLWTFVENSNNF

SEQ ID NO: 189100 - protein, 167 aa, Zea Mays
MEKERSSHPYHGSPLNRRYFSNRSYPFGPSVVHQFSGRIPAAHQTPRSSCLLPPQHSLIHVTSFPHCPSLFPRRSDLSLTADADLCHQRTVDHHPPPFCCVPRSDLTLPPCRNISGACAQHRAPGARLLLASSTPGHGSLMYSPFRPSIPSVGAPFLLCSLGIRWDA

SEQ ID NO: 189101 - protein, 131 aa, Zea Mays
MIPSTSAAMAHPMPPLSASQSTITTVLKILPKPPAAPESRSNNCAFGAKFDSRRALLCGLVAAAAAAGTMLGADIAGAASKRRPPPPAPAEAKKDPNVSGVQAKVLASRKRKEAMKEAVAKLREKGKPVDK

SEQ ID NO: 189102 - protein, 593 aa, Zea Mays
MASQVAGSTPAVAALGFLLPTFWEIEVTCAAAMILVALYVAYELLNPRSSQAAAAGDADELLVRGLDGADKFKGGVSGPSAYVVKLELLAAKNLMAANLNGTSDPYALITCGAEKRFSSMVPGSRNPMWGEEFNFFVDSLPVKINVTIYDWDIVWKSTILGSFTVTVESEVPSGPIWHTLDSTSGQVCLHIKVIKVHESSSSSAEAGARRRISLDKQGPTVVHQKPGPLQTIFELPPDEVVDHSYSCALERSFLYHGRMYVSSWHICFHSNVFSKQIKVVIPLRDIDEIRRSQHAVINPAITIFLRMGAGGFGVPPLGCPDGRVRYKFASFWNRNHTFRALHRAMKNFVMMIDAEKQERAQSALRAHSSSRKNSKKEINVPEDCAALTGKLQPFVKEEVLVPVFNGTFPCTAEQFFSILLSDDSNYITEYRTDRKDKDINLGQWHVADEYDGQVRELNCKSICHSPMCPPYSAMTEWQHIVLSADKMDLVFETVQQVHDVPFGSFFEVHCRWCVKTISSNSCSLNISAGAHFKKWCIMQSKIKSGAVDELKKEVKVMLDFAQGYMLKVSSPDQENSNLAQQDNTAPDAPSDTG

SEQ ID NO: 189103 - protein, 567 aa, Zea Mays
MASQVAGSTPAVAALGFLLPTFWEIEVTCAAAMILVALYVAYELLNPRSSQAAAAGDADELLVRGLDGADKFKGGVSGPSAYVVKLELLAAKNLMAANLNGTSDPYALITCGAEKRFSSMVPGSRNPMWGEEFNFFVDSLPVKINVTIYDWDIVWKSTILGSFTVTVESEVPSGPIWHTLDSTSGQVCLHIKVIKVHESSSRAINSSAEAGARRRISLDKQGPTVVHQKPGPLQTIFELPPDEVVDHSYSCALERSFLYHGRMYVSSWHICFHSNVFSKQIKVVIPLRDIDEIRRSQHAVINPAITIFLRMGAGGFGVPPLGCPDGRVRYKFASFWNRNHTFRALHRAMKNFVMMIDAEKQERAQSALRAHSSSRKNSKKEINVPEDCAALTGKLQPFVKEEVLVPVFNGTFPCTAEQFFSILLSDDSNYITEYRTDRKDKDINLGQWHVADEYDGQVRELNCKSICHSPMCPPYSAMTEWQHIVLSADKMDLVFETVQQVHDVPFGSFFEVHCRWCVKTISSNSCSLNISAGAHFKKWCIMQSKIKSGAVDEKFDSIHEQTQNISE

SEQ ID NO: 189104 - protein, 583 aa, Zea Mays
MASQVAGSTPAVAALGFLLPTFWEIEVTCAAAMILVALYVAYELLNPRSSQAAAAGDADELLVRGLDGADKLELLAAKNLMAANLNGTSDPYALITCGAEKRFSSMVPGSRNPMWGEEFNFFVDSLPVKINVTIYDWDIVWKSTILGSFTVTVESEVPSGPIWHTLDSTSGQVCLHIKVIKVHESSSRAINSSAEAGARRRISLDKQGPTVVHQKPGPLQTIFELPPDEVVDHSYSCALERSFLYHGRMYVSSWHICFHSNVFSKQIKVVIPLRDIDEIRRSQHAVINPAITIFLRMGAGGFGVPPLGCPDGRVRYKFASFWNRNHTFRALHRAMKNFVMMIDAEKQERAQSALRAHSSSRKNSKKEINVPEDCAALTGKLQPFVKEEVLVPVFNGTFPCTAEQFFSILLSDDSNYITEYRTDRKDKDINLGQWHVADEYDGQVRELNCKSICHSPMCPPYSAMTEWQHIVLSADKMDLVFETVQQVHDVPFGSFFEVHCRWCVKTISSNSCSLNISAGAHFKKWCIMQSKIKSGAVDELKKEVKVMLDFAQGYMLKVSSPDQENSNLAQQDNTAPDAPSDTG

SEQ ID NO: 189105 - protein, 344 aa, Zea Mays
MRSFLYHGRMYVSSWHICFHSNVFSKQIKVVIPLRDIDEIRRSQHAVINPAITIFLRMGAGGFGVPPLGCPDGRVRYKFASFWNRNHTFRALHRAMKNFVMMIDAEKQERAQSALRAHSSSRKNSKKEINVPEDCAALTGKLQPFVKEEVLVPVFNGTFPCTAEQFFSILLSDDSNYITEYRTDRKDKDINLGQWHVADEYDGQVRELNCKSICHSPMCPPYSAMTEWQHIVLSADKMDLVFETVQQVHDVPFGSFFEVHCRWCVKTISSNSCSLNISAGAHFKKWCIMQSKIKSGAVDELKKEVKVMLDFAQGYMLKVSSPDQENSNLAQQDNTAPDAPSDTG

SEQ ID NO: 189106 - protein, 498 aa, Zea Mays
MMDTHAILKLFCGKSNGGSSMVPGSRNPMWGEEFNFFVDSLPVKINVTIYDWDIVWKSTILGSFTVTVESEVPSGPIWHTLDSTSGQVCLHIKVIKVHESSSRAINSSAEAGARRRISLDKQGPTVVHQKPGPLQTIFELPPDEVVDHSYSCALERSFLYHGRMYVSSWHICFHSNVFSKQIKVVIPLRDIDEIRRSQHAVINPAITIFLRMGAGGFGVPPLGCPDGRVRYKFASFWNRNHTFRALHRAMKNFVMMIDAEKQERAQSALRAHSSSRKNSKKEINVPEDCAALTGKLQPFVKEEVLVPVFNGTFPCTAEQFFSILLSDDSNYITEYRTDRKDKDINLGQWHVADEYDGQVRELNCKSICHSPMCPPYSAMTEWQHIVLSADKMDLVFETVQQVHDVPFGSFFEVHCRWCVKTISSNSCSLNISAGAHFKKWCIMQSKIKSGAVDELKKEVKVMLDFAQGYMLKVSSPDQENSNLAQQDNTAPDAPSDTG

SEQ ID NO: 189107 - protein, 323 aa, Zea Mays
MQEASAAESLLRCLSSYAEVSSTAEEHNPQPAVEKFFTLHAALSRATVITDTLTKSATSAASPDCSAASDAGTVGSATDEETAAVTAERRRRATSWVSAALATDLSAFGIYNLKPVPATVSSPLAVVVVDESAKPATAAATATKSSPSPKSRMSPAKGKARTGAATAAAAALTKTSAPTEWERGEGAEERGELAKRLGEESRGWFLGFVERFLDSDVAASAPWDRERAARMLPQLKRVNDWLGEIAKRSETQSLPPADADGEATTTSTAPVPPNDGCGVPEETIERLRKKIYEYLLTNVDSAAAMLGGGGGSAAAALTNGKKG

SEQ ID NO: 189108 - protein, 241 aa, Zea Mays
MRGQPSLLPSVRKQWPGKPLLYGIGTLLVMPLRTLYGVGRVFGAGRFLCNMTNVSSSLQIELVPCLRDNYAYILHDVDTGTVGVVDPSEAMPIINALEKRNQNLTYILNTHHHYDHTGGNLELKAKYGAKVIGSEKDKDRIPGIDITLKEGDTWMFAGHQVLVLETPGHTTGHVCYYFAGSGAIFTGDTLFNLSCGKLFEGTPQQVFHLLANIFIYICMPHSRKLQLYPMIQKYTVGMNIP

SEQ ID NO: 189109 - protein, 739 aa, Zea Mays
MLGGKELCVDFQRSKGRAEWSEASSFNGRVPGPVGDKRGSGPLKSSAGVRMREAQPTNVLWVGFPGSYRVIDEEALKHAMSVFGVVTKIKVFQTRQYAFVEFANVAEACNAKMNLDGHLFNDPRIQILFSNSGLAPNKLDNPTSVAGFPSSEIYSSDGRLGPGIGSGTLQGYDPPRGGRTRYYDYAGMPTPGGILSQPEPFDPREAKRMRLAAGADPYDVRAGSTGLYSAGYRHQGSSVHAEGSSSPVIRVRGTVHRTSYIEHCWRGSIAKGGSPVCRARCLPITKGSDIPLPDVMNCSARTGLDMLAKHYADATGFDIVFFLPDSEDDFVSYTEFLRYLGSKSRAGVVKVDAGTTLFLVPPSDFLTNVLQVDGPERLYGVVLHIPQISAAAALRPQLTGTEQQPYYDERGTLPTSQRKYSIISPNDSGHLDADYRTSLHEDSMHRLGHIPGRPRVDEGQAVQPALAGFPANQAAGLQVQSSLKPDIMATLAKLLPSVQSSPLVSGQMNAIDRTSQIQDPSMLSKVWNPENQVTASNSSFGQMANVQHPGQQFSGQASAAHLTNYGNMVSAQERSIQHTAYNPEVTLNLPPPPPLPTIPHSSATLQSQGGHSLPSQTNQQLYQPEQYYVPQNNYGPLVPVSHSNLQISNTNNPTLTIPQVNPGPPTNNQIGNLAQPQHSMPLHVDRASQDFSSQGQQQNRGPGAAQAPEEDKSKKYQATLQLAQNLLLQLQQRGSGNQS

SEQ ID NO: 189110 - protein, 253 aa, Zea Mays
MNKDKAPMPGDGDPSDGLPPQSTRRAGAPPSSSTPPREYDISRMPDFPTRSTGHRRAHSEILGLPDDLDLSAPGGGDGPSLSDENDEELFSMFLDVDKLNSSCGASSEAEAESSSVADGVGEGAELGHAPRPRHQHSQSMDESMSIKAEQLVGAPGMEGMSSAEAKKAVSAAKLAELALVDPKRAKRVVGGLSKTPPRSAPGWIWANRQSAARSKERKMRYISELERKVQTLQTEATTLSAQLTLLQVGWGSS

SEQ ID NO: 189111 - protein, 237 aa, Zea Mays
MNKDKAPMPGDGDPSDGLPPQSTRRAGAPPSSSTPPREYDISRMPDFPTRSTGHRRAHSEILGLPDDLDLSAPGGGDGPSLSDENDEELFSMFLDVDKLNSSCGASSEAEAESSSVADGVGEGAELGHAPRPRHQHSQSMDESMSIKAEQLVGAPGMEGMSSAEAKKAVSAAKLAELALVDPKRAKRIWANRQSAARSKERKMRYISELERKVQTLQTEATTLSAQLTLLQVGWGSS

SEQ ID NO: 189112 - protein, 189 aa, Zea Mays
MNKDKAPMPGDGDPSDGLPPQSTRRAGAPPSSSTPPREYDISRMPDFPTRSTGHRRAHSEILGLPDDLDLSAPGGGDGPSLSDENDEELFSMFLDVDKLNSSCGASSEAEAESSSVADGVGEGAELGHAPRPRHQHSQSMDESMSIKAEQLVGAPGMEGMSSAEAKKAVSAAKLAELALVDPKRAKRFG

SEQ ID NO: 189113 - protein, 270 aa, Zea Mays
MFAVGVNSSAKDFIEAIKRPDAIAAGYIGQFVIKPLFGFLFGTLAVAVLNLPAALGAGIMLVSCVSGAQLSNYATFLTDPHMAPLSIVMTSLSTATAVFVTPTLSYFLIGQKLPVDVKGMMSSIVQIVVAPIAAGLLLNRFLPRLCAAIQPFLPSMSVFVTALCVGSPLAINIKAVLSPFGLTIVLLLFAFHTSSFVAGYHLAGTWFRKSDDVKALQRTISFETGMQSSLLALALANKFFPDPLVGVPPAISVVLMSLMGFALVMIYIFF

SEQ ID NO: 189114 - protein, 281 aa, Zea Mays
MAYYAPALGFLMFAVGVNSSAKDFIEAIKRPDAIAAGYIGQFVIKPLFGFLFGTLAVAVLNLPAALGAGIMLVSCVSGAQLSNYATFLTDPHMAPLSIVMTSLSTATAVFVTPTLSYFLIGQKLPVDVKGMMSSIVQIVVAPIAAGLLLNRFLPRLCAAIQPFLPSMSVFVTALCVGSPLAINIKAVLSPFGLTIVLLLFAFHTSSFVAGYHLAGTWFRKSDDVKALQRTISFETGMQSSLLALALANKFFPDPLVGVPPAISVVLMSLMGFALVMIYIFF

SEQ ID NO: 189115 - protein, 323 aa, Zea Mays
MAPAPALTATSVLKRSHLPGVHSLACRRQPGADRVSVLSPAIPPPRVSWQQGSGVVAKRLLWASASGSFEKDNIGEDAVLPSQIAVENKVDFLKILKSANSIIPHIVLGSTILALVYPPSFTWFTTRYYAPALGFLMFAVGVNSSAKDFIEAIKRPDAIAAGYIGQFVIKPLFGFLFGTLAVAVLNLPAALGAGIMLVSCVSGAQLSNYATFLTDPHMAPLSIVMTSLSTATAVFVTPTLSYFLIGQKLPVDVKGMMSSIVQIVVAPIAAGLLLNRFLPRLCAAIQPFLPSMSVFVTALWLSSCWYLVSQVRRRKGTTKDNIF

SEQ ID NO: 189116 - protein, 243 aa, Zea Mays
MADNEKEVGEGTTPRGADWEVVTLTASAYEAAPGPVRTEVKPVNENQEHSSSNALLMSDHFVFPPSEHENLPIQTSFDEIQPEKDVQKPSTTVEDYSIKNVVGSERVQFDDEGKDLSDDDVEMRDDTPGYGSSHTEDDAHGFVVLDDGVESGEDFDEKSGHPSDPADSRSCDTGASCKCWLKKHMTCLYNQAKETNAIWSVVVAAALVGIVILGRWHKDKLHLNQLKWRSGSAVSAESTMLDS

SEQ ID NO: 189117 - protein, 396 aa, Zea Mays
MGVGGSFWDLLKPYARHEGAGYLRGRRVAVDLSFWVVSHSTAILARLPRARRPHLRTTFFRTLSLFAKMGVFPVFVVDGEPSPLKSQARAARFFRGSGMDLAAFPSTEAESSVTAAPVKRRNAAFTRCVEECVELLEYLGMPVLRAKGEAEALCAQLNNEGHVGACITADSDAFLFGAKTVVKVLRSNCKEPFECYHIADIESGLGLKRKQLVAMALLIGSDHDLHGVPGFGLETALRFVQLFDEDEILDKLHEIGKGVYPFLKGFDNPHIDDLPSSSKKSPIKSPHCSHCGHPGSKKNHIKDGCNYCLVDSLENCVERPAGFKCECPSCDEARDLNEQRRHENWQIKVCKRIAAETNFPNEEIIKLYLSDNNLVEERVFPCLVGVSLMLKLWLTY

SEQ ID NO: 189118 - protein, 506 aa, Zea Mays
MELLEYLGMPVLRAKGEAEALCAQLNNEGHVGACITADSDAFLFGAKTVVKVLRSNCKEPFECYHIADIESGLGLKRKQLVAMALLIGSDHDLHGVPGFGLETALRFVQLFDEDEILDKLHEIGKGVYPFLKGFDNPHIDDLPSSSKKSPIKSPHCSHCGHPGSKKNHIKDGCNYCLVDSLENCVERPAGFKCECPSCDEARDLNEQRRHENWQIKVCKRIAAETNFPNEEIIKLYLSDNNLVEEKGVPLLSWSKPDVEALVDLLSYKQNWEPSYIRQRMLPMLSTIYLREVASSSSTPLPLCDQYEFDSIERTKIRHGHPYYLVKWKRATRGMNSNMPSKKPVTEGETSSEVVVLDDDDNEDTVVCESPELLDEPDVPQVLMDDGCCFLLTDEDIQLVGAAFPKETARFQEEQRLKEARSRSRKSKTSLADSGCETPKGPRPSGVQLSITEFYRSKKGQDMESGKKKQAGEGHAAARDGSRKSSDRDLNNKSLPKSVRRRLLFDC

SEQ ID NO: 189119 - protein, 249 aa, Zea Mays
MELLEYLGMPVLRAKGEAEALCAQLNNEGHVGACITADSDAFLFGAKTVVKVLRSNCKEPFECYHIADIESGLGLKRKQLVAMALLIGSDHDLHGVPGFGLETALRFVQLFDEDEILDKLHEIGKGVYPFLKGFDNPHIDDLPSSSKKSPIKSPHCSHCGHPGSKKNHIKDGCNYCLVDSLENCVERPAGFKCECPSCDEARDLNEQRRHENWQIKVCKRIAAETNFPNEEIIKLYLSDNNLVEGCSLA

SEQ ID NO: 189120 - protein, 59 aa, Zea Mays
MKVQVVYNCGITSICCPPVQLKNIADQKMNYLFSINKATQWTRPLDWSFLIKDVIVVTA

SEQ ID NO: 189121 - protein, 73 aa, Zea Mays
MGFLLLAWRVACIATAPSNWHFSIGPWKVRSRNRFRSGHDWSWSFNVHVVVSSPVQTLELPCSIGGSGLLQTN

SEQ ID NO: 189122 - protein, 153 aa, Zea Mays
MDHIAKGQHHGNAVSLLRPNATSGNQNNMLILQETCTDPSGSLVVYAPVDVQSMHVVMNGGDSAYVSLLPSGFAILPDGHCQSPNTAHQGSPSCGGSSSSSSTGSLVTVAFQILVNNLPTAKLTVESVETVSNLLSCTIQKIKSALQASIVTP

SEQ ID NO: 189123 - protein, 318 aa, Zea Mays
MASDGDGKGRVATAPGAGYGYAAYGGYQGAEERKWWPWLVPTVIVACIAVFVVEMYENNCPKHGSQLGDCVAGFLRRFSFQPLRENPLLGPSSSTLEKMGALDWNKIVHQNQGWRLISCIWLHAGLIHLVVNMLSLLFIGIRLEQQFGFVRIGAIYLLSGFGGSVLSALFLRNSYISVGASGALFGLLGSMLSELLMNWTIYSNKAAAIITLLFIIALNLAIGILPHVDNFAHIGGFATGFLLGFVLLARPQFSWMESHELPHTNQPPKYKAYQYILWVVALVLLLVGKRATKIRDSGLMLNFGRAIKMSLVFCESLK

SEQ ID NO: 189124 - protein, 226 aa, Zea Mays
MGALDWNKIVHQNQGWRLISCIWLHAGLIHLVVNMLSLLFIGIRLEQQFGFVRIGAIYLLSGFGGSVLSALFLRNSYISVGASGALFGLLGSMLSELLMNWTIYSNKAAAIITLLFIIALNLAIGILPHVDNFAHIGGFATGFLLGFVLLARPQFSWMESHELPHTNQPPKYKAYQYILWVVALVLLLVGFVISLVMLFKGKNGNDGCHWCHYLNCVPTSKWKCNT

SEQ ID NO: 189125 - protein, 313 aa, Zea Mays
MAIGGSEAGGGGAGSMRSVLVTGGAGFIGTHTVLRLLEQGYIVTVVDNFHNSVPEALDRVRLIAGPALSTRLDFIRGDLRNTDDLEKVFAARRYDAVIHFAGLKAVGESVAHPEMYYENNLIGTINLYKSMKEHGCKKLVFSSSATVYGWPEVIPCVEDSKLQAANPYGRTKLILEDMARDYHRADTEWSIVLLRYFNPIGAHSSGEIGEDPKGIPNNLLPYIQQVAVGRLPELNVYGHDYPTRDGTAIRDYIHVVDLADGHIAALKKLFDSPDIGCVAYNLGTGRGTSVLEMVAAFKKASGDSHQVVPQETG

SEQ ID NO: 189126 - protein, 302 aa, Zea Mays
MSGLVEQIWGPLSSIRALAKMLSFHTKRSEIPYDIIEDMLTQGDHMKDALQQIQDAVYLTKANIVRSNEETLKTIQRSPHPSRTLSDYKSVPGNDSQKLDPVLALSSDGYDMVMPMPPLWLAPLQHQYDRPCDLCDVLKDLVAGALPLAYKQQRTLDLTEISHPLHVAVEESALRKALSNLIEGALLRTQHGGVVQICAVEAPAGGALVVIDDDGPDMQYMTQMRSLAPFGSDLADGMLEDNMTWNFIAGLTVARELLEEYGCVLRVISPRRTDAVIGTGGSRVEIWLPSFQTQAAKTSQEV

SEQ ID NO: 189127 - protein, 341 aa, Zea Mays
MAEQGGAAGEAAGSDPPAPAPATAPAPAPALAADAAGQRSLPTPFLTKTYQLVDDPAVDDVISWNEDGSTFVVWRPAEFARDLLPKYFKHNNFSSFVRQLNTYGFRKMVPDRWEFANDFFRRGEKRLLCDIHRRKVAPAPAAGLATAAAAAASGAVTVAAAPIPMALPVRPASPSLSTDEHVLSSNSGSAEDHPQAAASGSVSASASGDTGEENERLRRENARLTRELGQMKKLCNNILLLMTKYASSQQLDASAALSSVVNCSGESSEAVPAPPPLPPAILELMPACPGLATAAAGLVAEADPDQHPWPIYRPTPVYHSMRPCNGPDQGAGSDQDGSNSR

SEQ ID NO: 189128 - protein, 191 aa, Zea Mays
MENVAANPSAAAAAAGNGVQASGAGGERPEDASKQNLAQVTSSIQKTLGLLHQLNLTVSSFNSASQLPLLQRLNALVAELDTMQKLAEGCNIQVPMEVVNLIDDGKNPDEFTRDVLNSCIAKNQITKGKTDAFKSLRKHLLEELEQAFPEDVEAYREIRATSAAVEYTLIPLTGLEQCLNGSLTVSLKCKN

SEQ ID NO: 189129 - protein, 82 aa, Zea Mays
MDSTISEPWNTSNNSPTWCTTKTKISYHTPCTYVDNSGCKLDIINIRHMQARVNTLMNTEGAPKIWPLRDQYVGPSPTDTGT

SEQ ID NO: 189130 - protein, 168 aa, Zea Mays
MIYKPGGSNMQHVTSISFLLLTYAKYLSKSSHTVDCGDVSVGPETLQLQAKRQVDYLLGDNPMKMSYMIGYGDRYPQRIHHRASSLPSIRDHPQPMACKEGTPYFNSSGANPNPLVGAVVGGPGEDDAYEDDRADFRKSEPTTYINAPLVGVLAYFVGNPNPGHNTRH

SEQ ID NO: 189131 - protein, 143 aa, Zea Mays
MQGLPLLLVSAQVPRLQPNLRWDPPLHPPRRRRRRRGMTSGGSGTGARVTPCSWTTGTARVVRARARRCCHIAGASSYWWTADWSRESHRQLNKLQHMLQRMQQLPSALTNKDNRDLRTCRGRNSWTGLRGALDWSLQVLRRI

SEQ ID NO: 189132 - protein, 659 aa, Zea Mays
MAAPLGFFCMLLLLLLQLGHSSCNNVYIVYMGARNPELHPALVRDAHHGMLAGLLGSEQAAKDAILYSYRHGFSGFAAVLTDSQAARLAGSPGVVRVVRNRVLDLHTTRSWDFMRVDPSHSAGILPESRFGEDSIIGVLDTGIWPESASFRDDGMSEAPRRWKGQCVAGDRFNVSNCNRKIIGAKWYIKGYEAEYGKMNTTDIYEFMSARDAVGHGTHTASTAAGALVAGASFRGLAGGVARGGAPRARLAVYKVCWATGDCTSADILAAFDDAIHDGVDVLSVSLGQAPPLPAYVDDVLSIGSFHAVARGIVVVCSAGNSGPYSETVINSAPWLVTVAAGTIDRTFLAKIILGNNSTYVGQTLYSGKHPGNSMRIFYAEDVASNNADDTDARSCTAGSLNSTLVKGTVVLCFQTRAQRSAAVAVETVKKARGVGVIFAQFLTKDIASSFDIPCFQVDYQVGTAILAYTTSTRNPTVQFGSAKTILGELMGPEVAYFSSRGPSSLSPAVLKPDIAAPGVNILAAWTPAAAISSAIGSVKFKIDSGTSMSCPHISGVVALLKSMHPNWSPAAVKSALVTTVSMTHMGLRLYPRRRPTIRRTHLITEAGMWIQTALHTPVLCMTWGHLTMCASFAPWATTSQPSAPWLNSMRPVSTHQRRS

SEQ ID NO: 189133 - protein, 536 aa, Zea Mays
MAAPLGFFCMLLLLLLQLGHSSCNNVYIVYMGARNPELHPALVRDAHHGMLAGLLGSEQAAKDAILYSYRHGFSGFAAVLTDSQAARLAGSPGVVRVVRNRVLDLHTTRSWDFMRVDPSHSAGILPESRFGEDSIIGVLDTGIWPESASFRDDGMSEAPRRWKGQCVAGDRFNVSNCNRKIIGAKWYIKGYEAEYGKMNTTDIYEFMSARDAVGHGTHTASTAAGALVAGASFRGLAGGVARGGAPRARLAVYKVCWATGDCTSADILAAFDDAIHDGVDVLSVSLGQAPPLPAYVDDVLSIGSFHAVARGIVVVCSAGNSGPYSETVINSAPWLVTVAAGTIDRTFLAKIILGNNSTYVGQTLYSGKHPGNSMRIFYAEDVASNNADDTDARSCTAGSLNSTLVKGTVVLCFQTRAQRSAAVAVETVKKARGVGVIFAQFLTKDIASSFDIPCFQVDYQVGTAILAYTTSTRNPTVQFGSAKTILGELMGPEVAYFSSRGPSSLSPAVLKTLLLQVSTFWQHGLLLLPYHQPLDL

SEQ ID NO: 189134 - protein, 277 aa, Zea Mays
MLKTLHLITQTIQMQGSLNSTLVKGTVVLCFQTRAQRSAAVAVETVKKARGVGVIFAQFLTKDIASSFDIPCFQVDYQVGTAILAYTTSTRNPTVQFGSAKTILGELMGPEVAYFSSRGPSSLSPAVLKPDIAAPGVNILAAWTPAAAISSAIGSVKFKIDSGTSMSCPHISGVVALLKSMHPNWSPAAVKSALVTTVSMTHMGLRLYPRRRPTIRRTHLITEAGMWIQTALHTPVLCMTWGHLTMCASFAPWATTSQPSAPWLNSMRPVSTHQRRS

SEQ ID NO: 189135 - protein, 373 aa, Zea Mays
MQGSLNSTLVKGTVVLCFQTRAQRSAAVAVETVKKARGVGVIFAQFLTKDIASSFDIPCFQVDYQVGTAILAYTTSTRNPTVQFGSAKTILGELMGPEVAYFSSRGPSSLSPAVLKPDIAAPGVNILAAWTPAAAISSAIGSVKFKIDSGTSMSCPHISGVVALLKSMHPNWSPAAVKSALVTTASVHDTYGFEIVSEAAPYNQANPFDYGGGHVDPNSAAHPGLVYDMGTSDYVRFLCSMGYNVSAISSLAQQHETCQHTPKTQLNLNLPSISIPELRGRLTVSRTVTNVGSALTKYRARVEAPPGVDVTVSPSLLTFNSTVRKLTFKVTFQAKLKVQGRYYFGSLTWEDGVHAVRIPLVVRTMISKFYANS

SEQ ID NO: 189136 - protein, 822 aa, Zea Mays
MASGRCQVAGSLIKLVYFSRHAELSTEDKHKISTKRRLGMFNGGRRSYPILGGRLHFVKFETGKLNECLDFISSKQLHRGGIDSPSWRSGAQSDDIVIKATGGGAFKYADVFKERLGVSLEKEDEMDCLVAGANFLLKAIRHEAFTHMDGQKQYVQIDQNDLFPFLLVNVGSGVSIIKVDGHGKFQRVSGTNVGGGTYWGLGRLMTKCKSFDELLELSQRGDNSTMDMLVGDIYGGLDYSKIGLSASTIASSFGKIISENKELSDYRPEDISLSLLRMISYNIGQISYLNALRYGLKRIFFGGFFIRGHAYTMDTISFAVHFWSKGEAQAMFLRHEGFLGALGAFMSYEKHGLDDLRVHHLVERFPMGAPYVGGKIHGPPLGDLNEKISWMEKFVQKGTQIIAPVPMGVPATTGMGGFERPTAKGDILRSDASAALNVGVLHLVPTLDVFPLLEDPKTYEPNTIDLDQDEFKYWFKILSDHSPDLVDKAVASEGGTDDAKRRGDAFAHAFSAHLARLMEEPAAYGKFGLANLLELREECLREFQFVDAYISIKQRENEASLAVLPDLLMELDSMNEEARLLALIEGVLAANIFDWGSRACVELYHKGTIIEIYRMSRKKMQRPWRIDDFDMFKKRMLTDRKDQSYKRALLFVDNSGADVVLGMLPLARELLRHGTEVVLVANSLPALNDVTANELPEVIAEASKHCGILRKAAEAGGLIVDAMAGIQDDLKDETVSVPLMVVENGCGSPCIDFRQVSSELAAAAKDADLLILEGMGRSLHTNLNARFKCDALKLAMVKNQRLAEKLFNGSLYDCICKFEPVP

SEQ ID NO: 189137 - protein, 406 aa, Zea Mays
MPARSILKRTISQRKIKSNATLSTINEENIDDAATMDSVASGKRIINSKFASENSLEVSGGTEITLDALAAYLKYLEGTGNASWQELHDKVRLAETRYGASFYILFGPAIQLGVISRRKAYTETIQYEKDRNAGFLSPFGYSTPTVTSAVDAICSMEWYWLLASKSQVCIEGKYSIRIWRWKGYLVQYTFLGNEGPPVLLVHGFGAFLEHFRDNIDKIAATGHRVWAITLVGFGKSEKPNVNYSELFWSELLRDFIVEIVREPVHLLGNSIGGYLCAIAAGLWPSLAKSLVLLNSAGSVVPNYSFIPLSEERRTSWISRLQAQLLLLFLRSRAEGILKEYYPTRTERVDKPLLDQIVRASYDPGAAKVLESVFNFNLSIPLNFLFDSFGGKILVIQVWYERPPYKI

SEQ ID NO: 189138 - protein, 64 aa, Zea Mays
MKDPLTKSEAFVTMLREHCSKVQIRELNAGHAPHDEVPDEVNTILCKWVEQIEVKPALEKTKAI

SEQ ID NO: 189139 - protein, 129 aa, Zea Mays
MHDQKLQFGVPQGFGTPVSHGGRGRGGLTSQLRPYARIPSTIPSASRKTTSRRTHGTSPRPRHTKLQPRAATARSCRCAHACSRPQTPPCLCAQGAQPSPGPPLASHRQIGCTHPFVHSKKRSDDESRQ

SEQ ID NO: 189140 - protein, 901 aa, Zea Mays
MAANNSDPIQDQLGEGGAGVRHEAEEEEVGEETSSAAAQATATTMLPRSSSRPQLDLSGAAIHGTLEDRNPTILLPNQSDDISHLALDIGGSLIKLVYFSRHAELSTEDKHKISTKRRLGMFNGGRRSYPILGGRLHFVKFETGKLNECLDFISSKQLHRGGIDSPSWRSGAQSDDIVIKATGGGAFKYADVFKERLGVSLEKEDEMDCLVAGANFLLKAIRHEAFTHMDGQKQYVQIDQNDLFPFLLVNVGSGVSIIKVDGHGKFQRVSGTNVGGGTYWGLGRLMTKCKSFDELLELSQRGDNSTMDMLVGDIYGGLDYSKIGLSASTIASSFGKIISENKELSDYRPEDISLSLLRMISYNIGQISYLNALRYGLKRIFFGGFFIRGHAYTMDTISFAVHFWSKGEAQAMFLRHEGFLGALGAFMSYEKHGLDDLRVHHLVERFPMGAPYVGGKIHGPPLGDLNEKISWMEKFVQKGTQIIAPVPMGVPATTGMGGFERPTAKGDILRSDASAALNVGVLHLVPTLDVFPLLEDPKTYEPNTIDLDQDEFKYWFKILSDHSPDLVDKAVASEGGTDDAKRRGDAFAHAFSAHLARLMEEPAAYGKFGLANLLELREECLREFQFVDAYISIKQRENEASLAVLPDLLMELDSMNEEARLLALIEGVLAANIFDWGSRACVELYHKGTIIEIYRMSRKKMQRPWRIDDFDMFKKRMLTDRKDQSYKRALLFVDNSGADVVLGMLPLARELLRHGTEVVLVANSLPALNDVTANELPEVIAEASKHCGILRKAAEAGGLIVDAMAGIQDDLKDETVSVPLMVVENGCGSPCIDFRQVSSELAAAAKDADLLILEGMGRSLHTNLNARFKCDALKLLCAACYGQESAIGRKTLQWESIRLHL

SEQ ID NO: 189141 - protein, 748 aa, Zea Mays
MAANNSDPIQDQLGEGGAGVRHEAEEEEVGEETSSAAAQATATTMLPRSSSRPQLDLSGAAIHGTLEDRNPTILLPNQSDDISHLALDIGGSLIKLVYFSRHAELSTEDKHKISTKRRLGMFNGGRRSYPILGGRLHFVKFETGKLNECLDFISSKQLHRGGIDSPSWRSGAQSDDIVIKATGGGAFKYADVFKERLGVSLEKEDEMDCLVAGANFLLKAIRHEAFTHMDGQKQYVQIDQNDLFPFLLVNVGSGVSIIKVDGHGKFQRVSGTNVGGGTYWGLGRLMTKCKSFDELLELSQRGDNSTMDMLVGDIYGGLDYSKIGLSASTIASSFGKIISENKELSDYRPEDISLSLLRMISYNIGQISYLNALRYGLKRIFFGGFFIRGHAYTMDTISFAVHFWSKGEAQAMFLRHEGFLGALGAFMSYEKHGLDDLRVHHLVERFPMGAPYVGGKIHGPPLGDLNEKISWMEKFVQKGTQIIAPVPMGVPATTGMGGFERPTAKGDILRSDASAALNVGVLHLVPTLDVFPLLEDPKTYEPNTIDLDQDEFKYWFKILSDHSPDLVDKAVASEGGTDDAKRRGDAFAHAFSAHLARLMEEPAAYGKFGLANLLELREECLREFQFVDAYISIKQRENEASLAVLPDLLMELDSMNEEARLLALIEGVLAANIFDWGSRACVELYHKGTIIEIYRMSRKKMQRPWRIDDFDMFKKRMLTDRKDQSYKRALLFVDNSGSSCCKFVAGFE

SEQ ID NO: 189142 - protein, 413 aa, Zea Mays
MAANNSDPIQDQLGEGGAGVRHEAEEEEVGEETSSAAAQATATTMLPRSSSRPQLDLSGAAIHGTLEDRNPTILLPNQSDDISHLALDIGGSLIKLVYFSRHAELSTEDKHKISTKRRLGMFNGGRRSYPILGGRLHFVKFETGKLNECLDFISSKQLHRGGIDSPSWRSGAQSDDIVIKATGGGAFKYADVFKERLGVSLEKEDEMDCLVAGANFLLKAIRHEAFTHMDGQKQYVQIDQNDLFPFLLVNVGSGVSIIKVDGHGKFQRVSGTNVGGGTYWGLGRLMTKCKSFDELLELSQRGDNSTMDMLVGDIYGGLDYSKIGLSASTIASSFGKIISENKELSDYRPEDISLSLLRMISYNIGQISYLNALRYGLKRIFFGGFFIRGHAYTMDTISFAVHFWRGTSYVSAP

SEQ ID NO: 189143 - protein, 390 aa, Zea Mays
MDCLVAGANFLLKAIRHEAFTHMDGQKQYVQIDQNDLFPFLLVNVGSGVSIIKVDGHGKFQRVSGTNVGGGTYWGLGRLMTKCKSFDELLELSQRGDNSTMDMLVGDIYGGLDYSKIGLSASTIASSFGKIISENKELSDYRPEDISLSLLRMISYNIGQISYLNALRYGLKRIFFGGFFIRGHAYTMDTISFAVHFWSKGEAQAMFLRHEGFLGALGAFMSYEKHGLDDLRVHHLVERFPMGAPYVGGKIHGPPLGDLNEKISWMEKFVQKGTQIIAPVPMGVPATTGMGGFERPTAKGDILRSDASAALNVGVLHLVPTLDVFPLLEDPKTYEPNTIDLDQDEFKYWFKILSDHSPDLVDKLLVKVGLMMPKDGVMHLHMPFLLIWQD

SEQ ID NO: 189144 - protein, 175 aa, Zea Mays
MEYDIHTILDTATLVATLFVIYMIRFKLRSTYMVDKDNFALYYVVLPCAGLALLIHPSTSHNIVNRISWGFCVYLEAVSVLPQLHLMQNTKIVEPFTAHYVFALGVARFLSCAHWVLQVLDTRGRLLTALGYGLWPSMVLLSEIVQTFILADFCYYYVKSLVGGQLVLRLPSGVV

SEQ ID NO: 189145 - protein, 137 aa, Zea Mays
MSDSFCPDCKKHTEVAFDHSAGDMVCTECGLVLEAHSVDETSEWRTFANESNDNDPVRVGGPTNPLLTDGGLSTVIAKPNGAQGDFLSSSLGRWQNRGSNPDRSLILAFRTIANMADRLGLVATIKVTNLMVTVHYL

SEQ ID NO: 189146 - protein, 343 aa, Zea Mays
MDGSKGSVGGGDGTGPEKPSADSNPSLDPPQPTAAAVEATDDGAAAAAAEAARRPFTALSQEEADLALARVLQEQERAYMLLRMNGGGGEGSDYGSSDEGSYEYDEEGEEDYEEELEHRLRVHHHEHPSGDGEGEGGGEGEGAEGSDYDEEFEEDEEGEPEVDPAEFEDDEAYARALQDAEEREVAARLMALAGLSDWRTVEVEHEEDHANDPQEAWQEVDPDEYSYEELVALGEVVGTENRGLSADTLGSLPSVTYKLQHVQDGNTEQCVICRVELEEGESLIALPCKHLYHPECINQWLQINKAVFGSGDGWDRMAPCQRASVREILGSWIIQHLSIIFLF

SEQ ID NO: 189147 - protein, 499 aa, Zea Mays
MAAESCGSRGASPPPPPSAGGAAGRRRKAEAYAEVLRRIRAGAGGYGAARPGLEDELWAHFQGLPARYALDVNVERVEDVLLHKKLLEQAHKPMNGLVFDVRPAQGFTLEESTGFESTTSFKQEEQDPQSSVFTSRDQRPLHEVIFACDDKPKLLSQLTSLLGELGLNIQEAHAYSTSDGYSLDIFVVDGWEYEADILQSALREGVDKIKYRAWPLVPSMSARMDHQPLEVSPSSDFVQIPADAVDVWEVDLRLLKFEQKLASGSFGDLYHGTYCSQDVAIKVLKPERVSVDMLREFAQEVYIMKKVRHKNVVQFIGACTRPPVLCIITEFMHGGSIFDFLYNRRGNFQLPDVIRIASDVSKGMNYLHQINIVHRDLKTANLLMDDQVIEHLPYDHRADVFSFGIVLWELLTGKLPYEDMTPLQAAVAVVQKDLRPTIAVDTHPMLAELLQRCWQKDPALRPTFAEIVDILNSIKEAVRSSVHHKRHSCRSHSGRRRGC

SEQ ID NO: 189148 - protein, 275 aa, Zea Mays
MAAESCGSRGASPPPPPSAGGAAGRRRKAEAYAEVLRRIRAGAGGYGAARPGLEDELWAHFQGLPARYALDVNVERVEDVLLHKKLLEQAHKPMNGLVFDVRPAQGFTLEESTGFESTTSFKQEEQDPQSSVFTSRDQRPLHEVIFACDDKPKLLSQLTSLLGELGLNIQEAHAYSTSDGYSLDIFVVDGWEYEADILQSALREGVDKIKYRAWPLVPSMSARMDHQPLEVSPSSDFVQIPADAVDVWEVDLRLLKFEQKLASGSFGDLYVQEAT

SEQ ID NO: 189149 - protein, 330 aa, Zea Mays
MSARMDHQPLEVSPSSDFVQIPADAVDVWEVDLRLLKFEQKLASGSFGDLYHGTYCSQDVAIKVLKPERVSVDMLREFAQEVYIMKKVRHKNVVQFIGACTRPPVLCIITEFMHGGSIFDFLYNRRGNFQLPDVIRIASDVSKGMNYLHQINIVHRDLKTANLLMDDQVVKVADFGVARVKDQSGVMTAETGTYRWMAPESKLAFVYASPRSTKKTVQVIEHLPYDHRADVFSFGIVLWELLTGKLPYEDMTPLQAAVAVVQKDLRPTIAVDTHPMLAELLQRCWQKDPALRPTFAEIVDILNSIKEAVRSSVHHKRHSCRSHSGRRRGC

SEQ ID NO: 189150 - protein, 200 aa, Zea Mays
MHGGSIFDFLYNRRGNFQLPDVIRIASDVSKGMNYLHQINIVHRDLKTANLLMDDQVVKVADFGVARVKDQSGVMTAETGTYRWMAPEVIEHLPYDHRADVFSFGIVLWELLTGKLPYEDMTPLQAAVAVVQKDLRPTIAVDTHPMLAELLQRCWQKDPALRPTFAEIVDILNSIKEAVRSSVHHKRHSCRSHSGRRRGC

SEQ ID NO: 189151 - protein, 741 aa, Zea Mays
MMISSVLCPPAAGAAAGAAGAGAPPIIGSRSSSLHPPPPSASRIHLPRLPPPPSPYSSSTPTSPFPSHASSALQPFDEVLSSMSPREQTSLLSRQRCWRRARDLFNRLRALPGYAPNPVHDAVLLRHLARARRWAELHRAWIGMPFPPSNPAYAALADALAKAGLARGALLLLRHMRTRGVAPDEVSMNTFVRILKDEGRHDDALALFHSWCDGRFEVLCERKMVHKAEDVIEGILKAGSFVHEQSLPVVMKMYVDLGLLDEAIAFFEKHCRGKGVSSKNFSAIMDVFAGRGLWEEAEHIFCSERGDGNEKDIVEYNVMIKAYGQAKQYDRVSSLFESMEESGVPSDECTYNSLIQMFSFGGFPHRAKKLLGKMKDAGFEPKCETYSAIIRSYSRHCLVPEAIDLFNEMKASGVEPNVIVYGILIDMFAETGNVKEALHYSNLLEQSGISPNHIVLTSLIKAYSKFNSWKEAQDLYSRMNDMDGGPDIIASNAMLNLYAKLEMVTEAKEIFDSLRRNNHADAVSYTTMAYLYKSIGLLSESIRITHKLQKSGLLSDCASCNAVMACYGAKGNLRDCAELVHQMVVANIPPDASTFEMIFSLLKNGHVSTKEILQLESAYDDGKKSAKQAIIAFLFSVAGMHDAALEICGKMLMPQSTLDACAYNVCFKVYASSRKVEKAFSLFMWMRDLGLKPDTSTCNHLATCYGRLGALEGVHTNGFTEYRTSELSMPSHKTMPSSSLI

SEQ ID NO: 189152 - protein, 227 aa, Zea Mays
MNSIKSAIFSGHRSHPHVGAAAVPQQQLGSTASFHSTPILQRKHKTQWHNSWRDEDEKNAASAGPSWFRGHRWVRNSSNNGFRTHDFYYGNFKSKGGFEFCTSDEDEPENLFRNVFRDQHTYYWSFSSDNFQRNSKRARSQKSRNWSFETDEEDEVSAPSEVSLARQALGLSTSGPLKLEDVKSAYRACALRWHPDRHNGSSKSTAEEKFKHCSAAYKTLCDSLAAA

SEQ ID NO: 189153 - protein, 142 aa, Zea Mays
MNSIKSAIFSGHRSHPHVGAAAVPQQQLGSTASFHSTPILQRKHKTQWHNRFNYYTRRRRNRETKRSMLRNMSEYAESLFQSWRDEDEKNAASAGPSWFRGHRWVRNSSNNGFRTHDFYYGNFKSKEELQTCSLTKIQKLEF

SEQ ID NO: 189154 - protein, 259 aa, Zea Mays
MNSIKSAIFSGHRSHPHVGAAAVPQQQLGSTASFHSTPILQRKHKTQWHNRFNYYTRRRRNRETKRSMLRNMSEYAESLFQSWRDEDEKNAASAGPSWFRGHRWVRNSSNNGFRTHDFYYGNFKSKGGFEFCTSDEDEPENLFRNVFRDQHTYYWSFSSDNFQRNSKRARSQKSRNWSFETDEEDEVSAPSEVSLARQALGLSTSGPLKLEDVKSAYRACALRWHPDRHNGSSKVLTQHAQVYSGGEIQALQCSIQDLM

SEQ ID NO: 189155 - protein, 241 aa, Zea Mays
MNSIKSAIFSGHRSHPHVGAAAVPQQQLGSTASFHSTPILQRKHKTQWHNRFNYYTRRRRNRETKRSMLRNMSEYAESLFQSWRDEDEKNAASAGPSWFRGHRWVRNSSNNGFRTHDFYYGNFKSKGGFEFCTSDEDEPENLFRNVFRDQHTYYWSFSSDNFQRNSKRARSQKSRNWSFETDEEDEVSAPSEVSLARQALGLSTSGPLKLEDVKSALQRRRNSSIAVQHTRPYVIVWPLHR

SEQ ID NO: 189156 - protein, 173 aa, Zea Mays
MTAEGEAKNPSAGGGGDNPQHQQAAPAPAPAQGEVAQEAAVQGTGQEQERDKADREVQGGAGEKDDGACRDLVLVEDPEVLAVEDPEEAAATAALQEEMKALVASIPDGAGAAFTAMQLQELEQQSRVYQYMAARVPVPTHLVFPVWKSVTGASSEGAQKYPTCMLQTCVVIS

SEQ ID NO: 189157 - protein, 144 aa, Zea Mays
MTAEGEAKNPSAGGGGDNPQHQQAAPAPAPAQGEVAQEAAVQGTGQEQERDKADREVQGGAGEKDDGACRDLVLVEDPEVLAVEDPEEVMGLATLCLDFGKNPEPEPGRCRRTDGFPGGRRARFCFRVKTRRSWQGYRRCQEGR

SEQ ID NO: 189158 - protein, 121 aa, Zea Mays
MKALVASIPDGAGAAFTAMQLQELEQQSRVYQYMAARVPVPTHLVFPVWKSVTGASSEGAQKYPTLMGLATLCLDFGKNPEPEPGRCRRTDGFPGGRRARFCFRVKTRRSWQGYRRCQEGR

SEQ ID NO: 189159 - protein, 479 aa, Zea Mays
MTAYDPKDDVDRLFACFKCGVSPPKSAFRERPLPQAKKSRGSPVSETAGSGGRSSSDVSTTPDAAADKRAAPSSAKSTGRKHMSPFVFYGSPRGVQVKRPQSFLRLLHVIRIDLKKQTDFNPRDVVWATFPRQDEAIRFSKAYAHTNVFCYQEHMSGTRRFLVSTYDEFWKRYNDMDSKIRHHYEVIQEASPCHIYFDLEFDTRLNKKRDTDEMVDILIAVVFSALRDKYSIEGHEEWITELDSSTEEKFSRHLIIRIPKIAFKDNSHVGAFVCEVCSQIAAQRTTNHDLDKLYITKEISSGPVDRLFMDTAVYSRNRCFRLVFSSKSGKKSFLVPTKRFKCQELNDKDVFMESLICRLDDNCEKLLICKLDLECKKTLHFDSEISMSQIQGRSYRHRIATYQNDFSHAYTCGKSPFPPLDGFIESIASFGNVSGKIRSWFWFSQESLIIYNMLRSRYCENIGREHKGNHESSILPKVS

SEQ ID NO: 189160 - protein, 456 aa, Zea Mays
MDSKIRHHYEVIQEASPCHIYFDLEFDTRLNKKRDTDEMVDILIAVVFSALRDKYSIEGHEEWITELDSSTEEKFSRHLIIRIPKIAFKDNSHVGAFVCEVCSQIAAQRTTNHDLDKLYITKEISSGPVDRLFMDTAVYSRNRCFRLVFSSKSGKKSFLVPTKRFKCQELNDKDVFMESLICRLDDNCEKLLICKLDLECKKTLHFDSEISMSQIQGRSYRHRIATYQNDFSHAYTCGKSPFPPLDGFIESIASFGNVSGKIRSWFWFSQESLIIYNMLRSRYCENIGREHKGNHVFYIVDFQRAAYYQKCHDPDCRGYRSPLRPVPWDVIPELVESDQIEYQGHAMETNIENSSMSGKSITGAGAEDPEWWEQVVEFADSIENMDHSLATLEVKSDASIENMDHAPSLCASEENGCFEADPEWVMHAERAMEQYEEQSGGSQSHATSQVFDLEDV

SEQ ID NO: 189161 - protein, 332 aa, Zea Mays
MMSWRDNLCRRLDYVIPFNENQESIRTDELVCSQIAAQRTTNHDLDKLYITKEISSGPVDRLFMDTAVYSRNRCFRLVFSSKSGKKSFLVPTKRFKCQELNDKDVFMESLICRLDDNCEKLLICKLDLECKKTLHFDSEISMSQIQGRSYRHRIATYQNDFSHAYTCGKSPFPPLDGFIESIASFGNVSGKIRSWFWFSQESLIIYNMLRSRYCENIGREHKGNHVFYIVDFQRAAYYQKCHDPDCRGYRSPLRPVPWDVIPELVESDQIEYQGHAMETNIENSSMSGKSITGAGAEDPEWWEQVVEFADSIENMDHSLATLVCSPCCFCRS

SEQ ID NO: 189162 - protein, 121 aa, Zea Mays
MSHARASPLWRCPLPGTHPHKASASPIRREPPTARPQGACACSRCSFLMATACHLAAPLGLAPLPRGCASAGVVAVVRCARSSGSKIPRGVAVRATSGGEGATEEVPEIVKAAQDAAVGQS

SEQ ID NO: 189163 - protein, 802 aa, Zea Mays
MKSSAVTTKGKAIFELKHKLVQAVNKIADRDTYQIGLDEIEKMADTLAPDMIGPFLSCVIDTDAEQKSAVRKECIKVIGTLARLHGNLLAPHMAKMVSSVVKRLKDTDSVVRDACVDTCGTLAMCARSYGDGGAALVTLVRPLFESLGEQNRYIQAGAALCLAKVIDESNYFPGPVLPQMLVRVVKLLKNPHFMAKPAAIDLIRSIIQAEGASTEQALSSALTSIMDALKSTDWNTRKAASLALSSIAVSSGYLVTSFRTSCLRSLERSKFDKVKPVRDTIIHAIQLWKAIPGSHTPEPSEAGSSTKENYFGDHHDARSIHDGGSRDTSFRRTDHGPSVSVISGSSLSSAKRRSPLSINKVAINNAANLQRMKTGDWRVEVSVPKQSMIPLVNNDEKGSSKACSLKDTKRNAYESVDVDSKFDYDIVDDKQECSSVSEVASRSFETKHVTTAQECTEDCDSAEVTEQCPRGRESKSIGSTITDVTTHDTHSCCLNTMNELALVRKQLQEMERKQANFFDLLQEFMASSAENMSVLNLKVHNLENAADKTVYTITQSESRYHLPGSKHFKNQSVSSLPRLSTSTPRSSMDVNYKPPPISELKHEKWMRDLPSRGSNMCCKEGADFRKDHVRSKVRKLGPVSLEGNLGRCDPSSARSRTSGVKGTYPVSFTSSCEQSGLRNALCTSNQPGEFQDTDGMEPAYMEALNCGDYDDLIDLMDRTGPVLEKLSCETTNELLRVIAEQFLNKKFFDLALPWLQQEFLSALEEAATGGSMEPALRIAIAQLGFKLSKAFEENLSQNVQRK

SEQ ID NO: 189164 - protein, 465 aa, Zea Mays
MELLWPELDKLLRQEDDSSTAPTPYTAAIPEYRVVFVKPEDDMYINKSFALSNGHTVYDIQHPCRANVAVRRELHTPASDRSCIHLEFDIAGTGLKYETGDHVGVYAENCIETVEEAEKLLGYSPDTLFSIYADQEDGTPLCGGSLPPPFPSPCTVRTALTRYADLLNSPKKSALLALAAHASDSKEAERLRHLASPAGKKEYSQWIVTSQRSLLEVMSEFPSAKPPLGVFFAAICPRLQPRYYSISSSPRIAPTRIHVTCALVYGPTPTGRIHKGVCSTWMKHSTPLEDSKDCSWAPIFVRQSNFKLPADPTVPIIMIGPGTGLAPFRGFLQERLALKQAEVELGHAVLFFGCRNRKMDFIYEDELNNFVDAGALSELIVAFSREGPTKEYVQHKMAQKAAELWSIISQGGYIYVCGDAKGMARDVHRTLHTIVQEQGSMDNNSKAESYVKSLQMEGRYLRDVW

SEQ ID NO: 189165 - protein, 423 aa, Zea Mays
MYINKSFALSNGHTVYDIQHPCRANVAVRRELHTPASDRSCIHLEFDIAGTGLKYETGDHVGVYAENCIETVEEAEKLLGYSPDTLFSIYADQEDGTPLCGGSLPPPFPSPCTVRTALTRYADLLNSPKKSALLALAAHASDSKEAERLRHLASPAGKKEYSQWIVTSQRSLLEVMSEFPSAKPPLGVFFAAICPRLQPRYYSISSSPRIAPTRIHVTCALVYGPTPTGRIHKGVCSTWMKHSTPLEDSKDCSWAPIFVRQSNFKLPADPTVPIIMIGPGTGLAPFRGFLQERLALKQAEVELGHAVLFFGCRNRKMDFIYEDELNNFVDAGALSELIVAFSREGPTKEYVQHKMAQKAAELWSIISQGGYIYVCGDAKGMARDVHRTLHTIVQEQGSMDNNSKAESYVKSLQMEGRYLRDVW

SEQ ID NO: 189166 - protein, 70 aa, Zea Mays
MNAADLSLEQSIIAHQCNNNNNRLMSSSPRYSLLRETKHKSPTQQQTANARRKKQNRYSYSLCDTRFGGS

SEQ ID NO: 189167 - protein, 193 aa, Zea Mays
MDEMMKGQRGWRELTELGDKGNKISGMIDDIIWPPKGGDSDKIREDWDTEEGPNSNFPGPTSGSTACVAVIRNDKLIVANAGDSRCVISRKGQAYNLSTDHKPDLEEERERILGAGGFVVAGRVNASLNLSRAIGDMELKQNDLLPVERQIVTAEPELKTVQLSEDDEFIVLACDGIWAEGVTHKPGFAVSDM

SEQ ID NO: 189168 - protein, 55 aa, Zea Mays
MRGRRKRDGKLGAVEREALTKFLTDREVEDELAGFLHYYVANKQGEDGTAPVVEE

SEQ ID NO: 189169 - protein, 845 aa, Zea Mays
MGYTYTPTYYSGLQDTIASLCKSILPSFRVGRRLTADQAAARRHAEQLKWQQESFHRILHLAALHREGIAPASDVAAFRGTMLAALVAPPQHLEQPAVLRDKLLFLQELLYAKCVSAAEYNASKAPLVQRLAAFGVIVDCPDAEVSAEEWSEIDLRDPPPPATAAASDKPKHKAFVTPWKSRSKKDQDVNSSASRPPLAPVDHNNATNAPVFMTESSPSETVPSGKAEKGKRRHLAGMFHSGGSGTENKEPAGEEGVVEKETVRGKKKSSWGFDGIKKWTKAGACNSGEAAATGEQPQHVPPRSSYSECQLEASPMAASGPDAKRAKTRLHSDTDNDSASELLRDKVLVENTKKELSRIQAELSSTNRNLNFSNQQMEAISTKLPVDKSDLKSYFPKAWCDQHGDGVITAAKEGFKQHVEEMEKQRDITGSEGWATFEDIDLDDNFNPRAFSRHQPDSAFADVLETNLSSMQSASTRGRQRSCDVTKQVPVADTWAPVPWRCGPRRRLARSSLHDMAASVLQAERHLLLLGSGRNRPLLRMLPPRVLFPHRRRSWPRAVRVSPGDGEGAGGFASAVEKRSIPGIVEEEGYGARGEELEGDVAGALEQRWPPWDGLAERYKLIGATSLAFVICNMDKVNLSVAIIPMSHQYGWNSSTAGLVQSSFFWGYALSQLPGGWLAKLFGGRKVLEVGVVTWSLATAIIPVVAGFMPGLVLSRILVGIGEGVSPSAATDLIARSIPWQERSRAVAVVFGGLSFGSVLGLLFAPPIIQNFGWESVFYIFGLLGIVWCLGFESLIVQRFGDKKSLLRCALGGIFQKQGGLGNDICTLLWKLGALYLFVLATNIL

SEQ ID NO: 189170 - protein, 1018 aa, Zea Mays
MGYTYTPTYYSGLQDTIASLCKSILPSFRVGRRLTADQAAARRHAEQLKWQQESFHRILHLAALHREGIAPASDVAAFRGTMLAALVAPPQHLEQPAVLRDKLLFLQELLYAKCVSAAEYNASKAPLVQRLAAFGVIVDCPDAEVSAEEWSEIDLRDPPPPATAAASDKPKHKAFVTPWKSRSKKDQDVNSSASRPPLAPVDHNNATNAPVFMTESSPSETVPSGKAEKGKRRHLAGMFHSGGSGTENKEPAGEEGVVEKETVRGKKKSSWGFDGIKKWTKAGACNSGEAAATGEQPQHVPPRSSYSECQLEASPMAASGPDAKRAKTRLHSDTDNDSASELLRDKVLVENTKKELSRIQAELSSTNRNLNFSNQQMEAISTKLPVDKSDLKSYFPKAWCDQHGDGVITAAKEGFKQHVEEMEKQRDITGSEGWATFEDIDLDDNFNPRAFSRHQPDSAFADVLETNLSSMQSASTRGRQRSCDVTKQVPVADTWAPVPWRCGPRRRLARSSLHDMAASVLQAERHLLLLGSGRNRPLLRMLPPRVLFPHRRRSWPRAVRVSPGDGEGAGGFASAVEKRSIPGIVEEEGYGARGEELEGDVAGALEQRWPPWDGLAERYKLIGATSLAFVICNMDKVNLSVAIIPMSHQYGWNSSTAGLVQSSFFWGYALSQLPGGWLAKLFGGRKVLEVGVVTWSLATAIIPVVAGFMPGLVLSRILVGIGEGVSPSAATDLIARSIPWQERSRAVAVVFGGLSFGSVLGLLFAPPIIQNFGWESVFYIFGLLGIVWCLGFESLIVQRFGDKKSLLNLGQSSTGSDGLISYAMSSESSHSSLEDLQNSLKDVPWGAFFKSKAVWAMIYAHFCGSWGHYTCLSWLPTFFSEELNLNLTEAAWVSVLPPLGSMIITSIAAPFADNLISNGVDTTKVRKICQTIAFVSPATFMMLSSVDLGLPPWEIVAFLTSGVALSSFALSGLYCTHQDISSEYASILLGITNTVGAVPGIVGVALTGFLLDSTHSWS

SEQ ID NO: 189171 - protein, 126 aa, Zea Mays
MSGDARAIAAVGCHRGLAWPGHLGLPPAEPTPWLCAPSTRDGSAGPAALGRHRRAPTRKGRSPSLYVPRKKTTDQSANSITAGGPRDDDRASDVVTTTRCSRWTTQGRMDLTSGCSPSECHPANTT

SEQ ID NO: 189172 - protein, 156 aa, Zea Mays
MAAASSAPFFGLGDTQMQPQQGSSSSLQQNSTAAPGAAAVPPPKKKRNQPGNPNPDAEVIALSPRTLLATNRFVCEVCNKGFQREQNLQLHRRGHNLPWKLKQKNPREARRRRLPRRRQGRRDDGAARAPHGRPGPGPADEMRYDSTIEYDGSVRE

SEQ ID NO: 189173 - protein, 834 aa, Zea Mays
MSTIATPPPPIAQEKAASRNKRKYRAEPPSAELGPYGLEYPLTADCMGFEFMSPEKAAMAAAVAAAEGVSLDLLQNSCEKCKDLHPTAEELLDCQRYVNWSDPNETQLEEILLKSLGTTFDNAVSLITTMGYSEAVARAAVVRAAAQYNWRESLAGFGEAAVEVLKTEGDMLPREGASVEDMRRIEQAVLGSMVMWVNEAQPLCTTGDVMFCLLMSDMNVANASAMDYNTSSLPSVAAQVIAQPDAGNYVTGSGSNLSVSITNPQTGVTFRGKLTPMPPGSYGAVKADSSMAPASLNVSSTKPSVPGKTQCVIPNIEPKEQPVPIHDHSEDQPFVAAATQSVKNDKPSPSKRGGSKRDSLHRQKLTSFDKSSRALGSKGSLRSGKHSYSASAVLERKCRSFSDSTTSNLKGASRVAKGFAASISGSEVSADLSFTGTLSPSPSFDAKIVSNSNPAPTASTDLSLSLPSSSDSLTPSSNHDSITEGVDSSSKINFSYDEEQKVWIPQDKKDKIVLILVQRQKELQAHMHDWTDWAQQKVMQVAHRLAKEKDELQSLRKEKEEADRLQEERHHLEESTRKKLLEMESAISRANAQLEKAEASARRREVENAQLTLQMEAAKRHAAESATNISELLKKDENSRKRSQRWESDRALLQEELAAQKSRLFRVQEQLQHAKELKDQVQARWKQEEAAKTEAIALVTSVRKERGQIETSMRSEENLLHLKAANDAQRYKSEIRVLEQRIAQLKVSLDSSRVAAPKWGADNKSYALHLSEGRKNNNAQVLSNTAVPQGLDFDDIQRDRECVMCLSEEMSVVFLPCAHQVVCAKCSDLHEKQA

SEQ ID NO: 189174 - protein, 107 aa, Zea Mays
MWWRSAKSTKTLSAAFSRLPNKEKKCSRQKCSNWINSGLERAKESDALNLGLKQFLAWDCSYAAERGRAVSKYILCVATFFTYHYFMCSSWLHLAPLLVRRYHPQFY

SEQ ID NO: 189175 - protein, 218 aa, Zea Mays
MAPADLPPGFRFHPTDEELVNYYLKRKVHGLSIELDIIPEVDLYKCEPWELAEKSFLPGRDSEWYFFGPRDRKYPNGCRTNRATQAGYWKSTGKDRQISYQNRSIGMKKTLVYYKGRAPQGLRTSWVMHEYRIEESECENTMGIQDSYALCRVFKKNVALGELQKQKQGECSSSQSKEKQEQFTSIRDAGQSSGSNEHGKDNTWMQFIADDLWCNQTK

SEQ ID NO: 189176 - protein, 1241 aa, Zea Mays
MATAAAMADDDDFASPPLAPRAREEGGGRGVYQVGGVPVEFPYKPYGTQLAFMGRVIATLDRARRQGRSHALLESPTGTGKSLSLLCSALAWQRHYPLRSPPAPDPLLHGGGFVPDDTQPQPTPVVPEKAVKKKNAPIIYYATRTHAQISQVVREYRKTSYRVRMAILASRKHYCVNKFACASDNIDEKCKSLLDKTVQGCPEFKNAQKLSRHPSLQIGGCYEVHDIEDLVRVGQKAKGCPYFAAQHMAEAAQLVFCPYNYLISPVVRRAMDIDISGSIIILDEAHNIEDIARDAGSIDIDEESLCLLQGELQNLAANEAVAMIYQPLHDIIQALIGWIAEREDNLHNHEFGHPASYWTGEKAMNELQRAGISPMYFPVLQECATKAIKAASDTESDGSHLSGGSAMTLESLFSSLSYFFAQKGRNSCDYQLALQRFVKKEGKDVISSTCTMSLWCLNPAVVFQEIADRTLSVILTSGTLSPMGSFTSELGVQFEACMEAPHVINADSQVFAAVLSSGPTRQILNASYKTADNSSFQDELGASLEEICRIVPGGALVFFPSYKLMDKLQVRWSQTGQWARLNAQKHVFVEPKGSSEELDPVLKGYYDAILGKAPVKKGRGGSKQIAKNRVTKKSSQESVKAGAALLAVCRGKVSEGIDFADDNARVVVIVGIPFPNINDVQVKLKRRYNDSYKSSKHLLSGSEWYCHQAFRALNQAAGRCIRHKSDYGGIILIDERYQDDRNVLYISKWLRNAIKKYDSFQETMAKLQKFFQNAQEKIKIKDCGIFPKVKLDNEAPQSFSDDKRKLPWPELSSSNHSVSRCNQKVKTECLSQRIPDIDGVAVNQKVVGVANTGANYGVKTEIIKLEEDDFKPRYAEITILNPLEDRSRQPTLVEGTSAATPVASPSNYAEVNTSVNINNGDQIADMSISPFSTNRNLSSLSTLAATPERTTDKDCHDSFINRSVNSHYEKKRRLSSPMSCTYTTQSSPPSKSFCHTGSVMPGDLNRNSELCCKNIGLSRCENVKFERNYSPEEVSAKKSMQKKLLINCIRCKTALGLEEDGFLVTCTQYYSSKLYLAYLLKHGLSTFGILEDDFSASTPTEVHVVQCEASSLNKNVFGKFSSQGHVWFAKDGCVYNAMTCSLCSSENTSAMVLGVQVLATDRSNQQLVEKVLLFSDRLDVQSEPSKGQISRTRRDASNICQQSVIDLDSFAYKPLKKDPVALNSRRSKLRLPAPNKSTTGT

SEQ ID NO: 189177 - protein, 945 aa, Zea Mays
MLAVLTSMKNHFAGELQNLAANEAVAMIYQPLHDIIQALIGWIAEREDNLHNHEFGHPASYWTGEKAMNELQRAGISPMYFPVLQECATKAIKAASDTESDGSHLSGGSAMTLESLFSSLSYFFAQKGRNSCDYQLALQRFVKKEGKDVISSTCTMSLWCLNPAVVFQEIADRTLSVILTSGTLSPMGSFTSELGVQFEACMEAPHVINADSQVFAAVLSSGPTRQILNASYKTADNSSFQDELGASLEEICRIVPGGALVFFPSYKLMDKLQVRWSQTGQWARLNAQKHVFVEPKGSSEELDPVLKGYYDAILGKAPVKKGRGGSKQIAKNRVTKKSSQESVKAGAALLAVCRGKVSEGIDFADDNARVVVIVGIPFPNINDVQVKLKRRYNDSYKSSKHLLSGSEWYCHQAFRALNQAAGRCIRHKSDYGGIILIDERYQDDRNVLYISKWLRNAIKKYDSFQETMAKLQKFFQNAQEKIKIKDCGIFPKVKLDNEAPQSFSDDKRKLPWPELSSSNHSVSRCNQKVKTECLSQRIPDIDGVAVNQKVVGVANTGANYGVKTEIIKLEEDDFKPRYAEITILNPLEDRSRQPTLVEGTSAATPVASPSNYAEVNTSVNINNGDQIADMSISPFSTNRNLSSLSTLAATPERTTDKDCHDSFINRSVNSHYEKKRRLSSPMSCTYTTQSSPPSKSFCHTGSVMPGDLNRNSELCCKNIGLSRCENVKFERNYSPEEVSAKKSMQKKLLINCIRCKTALGLEEDGFLVTCTQYYSSKLYLAYLLKHGLSTFGILEDDFSASTPTEVHVVQCEASSLNKNVFGKFSSQGHVWFAKDGCVYNAMTCSLCSSENTSAMVLGVQVLATDRSNQQLVEKVLLFSDRLDVQSEPSKGQISRTRRDASNICQQSVIDLDSFAYKPLKKDPVALNSRRSKLRLPAPNKSTTGT

SEQ ID NO: 189178 - protein, 1191 aa, Zea Mays
MATAAAMADDDDFASPPLAPRAREEGGGRGVYQVGGVPVEFPYKPYGTQLAFMGRVIATLDRARRQGRSHALLESPTGTGKSLSLLCSALAWQRHYPLRSPPAPDPLLHGGGFVPDDTQPQPTPVVPEKAVKKKNAPIIYYATRTHAQISQVVREYRKTSYRVRMAILASRKHYCVNKFACASDNIDEKWNAQKLSRHPSLQIGGCYEVHDIEDLVRVGQKAKGCPYFAAQHMAEAAQLVFCPYNYLISPVVRRAMDIDISGSIIILDEAHNIEDIARDAGSIDIDEESLCLLQGELQNLAANEAVAMIYQPLHDIIQALIGWIAEREDNLHNHEFGHPASYWTGEKAMNELQRAGISPMYFPVLQECATKAIKAASDTESDGSHLSGGSAMTLESLFSSLSYFFAQKGRNSCDYQLALQRFVKKEGKDVISSTCTMSLWCLNPAVVFQEIADRTLSVILTSGTLSPMGSFTSELGVQFEACMEAPHVINADSQVFAAVLSSGPTRQILNASYKTADNSSFQDELGASLEEICRIVPGGALVFFPSYKLMDKLQVRWSQTGQWARLNAQKHVFVDTNIDSTWIRNDVQVKLKRRYNDSYKSSKHLLSGSEWYCHQAFRALNQAAGRCIRHKSDYGGIILIDERYQDDRNVLYISKWLRNAIKKYDSFQETMAKLQKFFQNAQEKIKIKDCGIFPKVKLDNEAPQSFSDDKRKLPWPELSSSNHSVSRCNQKVKTECLSQRIPDIDGVAVNQKVVGMCYTSPEVSKISVLVKKENSSSPESFSTVCPLHPCKIRSDSEGVANTGANYGVKTEIIKLEEDDFKPRYAEITILNPLEDRSRQPTLVEGTSAATPVASPSNYAEVNTSVNINNGDQIADMSISPFSTNRNLSSLSTLAATPERTTDKDCHDSFINRSVNSHYEKKRRLSSPMSCTYTTQSSPPSKSFCHTGSVMPGDLNRNSELCCKNIGLSRCENVKFERNYSPEEVSAKKSMQKKLLINCIRCKTALGLEEDGFLVTCTQYYSSKLYLAYLLKHGLSTFGILEDDFSASTPTEVHVVQCEASSLNKNVFGKFSSQGHVWFAKDGCVYNAMTCSLCSSENTSAMVLGVQVLATDRSNQQLVEKVLLFSDRLDVQSEPSKGQISRTRRDASNICQQSVIDLDSFAYKPLKKDPVALNSRRSKLRLPAPNKSTTGT

SEQ ID NO: 189179 - protein, 1037 aa, Zea Mays
MAEAAQLVFCPYNYLISPVVRRAMDIDISGSIIILDEAHNIEDIARDAGSIDIDEESLCLLQGELQNLAANEAVAMIYQPLHDIIQALIGWIAEREDNLHNHEFGHPASYWTGEKAMNELQRAGISPMYFPVLQECATKAIKAASDTESDGSHLSGGSAMTLESLFSSLSYFFAQKGRNSCDYQLALQRFVKKEGKDVISSTCTMSLWCLNPAVVFQEIADRTLSVILTSGTLSPMGSFTSELGVQFEACMEAPHVINADSQVFAAVLSSGPTRQILNASYKTADNSSFQDELGASLEEICRIVPGGALVFFPSYKLMDKLQVRWSQTGQWARLNAQKHVFVEPKGSSEELDPVLKGYYDAILGKAPVKKGRGGSKQIAKNRVTKKSSQESVKAGAALLAVCRGKVSEGIDFADDNARVVVIVGIPFPNINDVQVKLKRRYNDSYKSSKHLLSGSEWYCHQAFRALNQAAGRCIRHKSDYGGIILIDERYQDDRNVLYISKWLRNAIKKYDSFQETMAKLQKFFQNAQEKIKIKDCGIFPKVKLDNEAPQSFSDDKRKLPWPELSSSNHSVSRCNQKVKTECLSQRIPDIDGVAVNQKVVGMCYTSPEVSKISVLVKKENSSSPESFSTVCPLHPCKIRSDSEGVANTGANYGVKTEIIKLEEDDFKPRYAEITILNPLEDRSRQPTLVEGTSAATPVASPSNYAEVNTSVNINNGDQIADMSISPFSTNRNLSSLSTLAATPERTTDKDCHDSFINRSVNSHYEKKRRLSSPMSCTYTTQSSPPSKSFCHTGSVMPGDLNRNSELCCKNIGLSRCENVKFERNYSPEEVSAKKSMQKKLLINCIRCKTALGLEEDGFLVTCTQYYSSKLYLAYLLKHGLSTFGILEDDFSASTPTEVHVVQCEASSLNKNVFGKFSSQGHVWFAKDGCVYNAMTCSLCSSENTSAMVLGVQVLATDRSNQQLVEKVLLFSDRLDVQSEPSKGQISRTRRDASNICQQSVIDLDSFAYKPLKKDPVALNSRRSKLRLPAPNKSTTGT

SEQ ID NO: 189180 - protein, 478 aa, Zea Mays
MAKLQKFFQNAQEKIKIKDCGIFPKVKLDNEAPQSFSDDKRKLPWPELSSSNHSVSRCNQKVKTECLSQRIPDIDGVAVNQKVVGVANTGANYGVKTEIIKLEEDDFKPRYAEITILNPLEDRSRQPTLVEGTSAATPVASPSNYAEVNTSVNINNGDQIADMSISPFSTNRNLSSLSTLAATPERTTDKDCHDSFINRSVNSHYEKKRRLSSPMSCTYTTQSSPPSKSFCHTGSVMPGDLNRNSELCCKNIGLSRCENVKFERNYSPEEVSAKKSMQKKLLINCIRCKTALGLEEDGFLVTCTQYYSSKLYLAYLLKHGLSTFGILEDDFSASTPTEVHVVQCEASSLNKNVFGKFSSQGHVWFAKDGCVYNAMTCSLCSSENTSAMVLGVQVLATDRSNQQLVEKVLLFSDRLDVQSEPSKGQISRTRRDASNICQQSVIDLDSFAYKPLKKDPVALNSRRSKLRLPAPNKSTTGT

SEQ ID NO: 189181 - protein, 139 aa, Zea Mays
MSRSKCGLKSSNFSRRLISCQRRPHLHKLLNSSAWLLPRRRNWQKEHDLKGKQSLYDKYTKFLLVTKVIIYAVLVLCFWSTPVTAVPQHLLQPFGKMFSWRGVDTATGNVVVGILPWLFLTSRVSKMLCQKLGFVLVRP

SEQ ID NO: 189182 - protein, 391 aa, Zea Mays
MPHFWNEYEYLDDVFLITSNAMCYNSPDTIYYRQARGIQEIAKKDFENLRQDSDASEPEPEPEREPKPEPEPEEPKPQPRRGRPPNKNNAKQKVGKPPAERATADFSGATLATAANIGRHAQADVDLSRRVMDKAMIADVLRASFANLRNEHNWSGYGGTWSAKTGKRPILMEDSRRSTYYETQPSSSIYELPVSSSYNGTEKLLVPVGVQLPQSYSHSLARFAAQLGPVGWEIASRRLERSLAPGTKFGRGWVGDGETPPNPFQTPVLAAFSETMAPPSSIAASGEQPSMNAPPATEACAGSISHRVGSQPCASISTVQTINSEALASQQCGSVPQVSINRGERAVEMKGSTNNLHGHPAMPQTMNGFNAVPGRVLFPPAAQLVVPQSTV

SEQ ID NO: 189183 - protein, 104 aa, Zea Mays
MVQVHLFPFQSSFETKSSNSSTWLVSKGQVVTHLPLNMCITLQRTCEVQGVFVQLEHHNKQQNAKRNMIKSINTCMLQFNPSSANLRHLAHYAACKRSSHLEAW

SEQ ID NO: 189184 - protein, 93 aa, Zea Mays
MLSMVFFILRIYQDIIDEDYHELVQLGHEHRVHQISEMGRSICEPERHYQVFKQSISRSKRGLRYILGPNMDLMIARPEINFGKYPRPSQLIK

SEQ ID NO: 189185 - protein, 212 aa, Zea Mays
MHVSLGWCRDVALYALVVGACNADAADEKELQLVYHRDGQSSIKVLPTFISALNAKTGDRFYMDVPGLHYDPTLLLHGQQYIEIYKPIPSRANVANKIKIAGLHDRGKAAILEVETLTCLEGSGEVLCMNRSTIYLRGAGGFSNSSQPFSYATYPSNEVSNVTFSDSTPFAVYEDRIQKSQPLRIYRTRLASVYIFLDLTHVGVRHWICLYL

SEQ ID NO: 189186 - protein, 148 aa, Zea Mays
MNKIQYNKDVGQSILESYSRVLESLAFNIIARIDDVIYVDDATKKSAAAESVSIFNRGTGVPIQKRISLSPFSIQNTPYASPFATPTFCSSTPVTCSPGRVQPPLNKTNLGRPEIKVEKLFSGDLEKVWTYAGNLSARKDAGDAPERD

SEQ ID NO: 189187 - protein, 426 aa, Zea Mays
MMDLGTRDWWTRQENPKLRRLPRDDGVTRGEKRKGDRHGSVAAAARPGRPWQRRVDSRAVLVAAGQGGPPVRPGARPALLRPPGARRVRQGLPRLHPALADAAGAPSPSSRRGPPPLAGRRDRRPHRPPLLRPVPAHRRHRASLRGVRLLPRRPRPRLLPGRRPPPRPRQTPPLPRQDAEYKEWKHVVQEIARFLRADSPFMNMRPLRYSYAFDPPPDTLRTVPTTVKKRGLVLSDTILCSYYPNEVKFTDLSIDVFRMVQCLEWEPCGSFALNDGYSAHDESGQNQPNLLKDLRDAALPPNPLKTILYRPSVTHFLTVLSTKCEELPSNGIMLIYLSATGEMGTSGFCPDTGENVLSNFNKFDISSLSHTSSKENKEPCLWLGCRETEGSNCIYPGDLIPFTRRPLFLVIDSSTSYAFKAVYSWY

SEQ ID NO: 189188 - protein, 487 aa, Zea Mays
MAASPQQQGQGGPGSGGWTPEQFWSLLDKADRRFARVRDLPSFGRQEPDEFAKAFRAYTQLWRMQQEHRHRLLDAGLRRWQVGEIAARIAHLYYAQYQRTADTALLSEAFVFYHAVLDRAYFQDADHHLAPAKHLRFLARFLLVALLLGRRSHTVPRLASDIRTLLDDSKKSFQDAEYKEWKHVVQEIARFLRADSPFMNMRPLRYSYAFDPPPDTLRTVPTTVKKRGLVLSDTILCSYYPNEVKFTDLSIDVFRMVQCLEWEPCGSFALNDGYSAHDESGQNQPNLLKDLRDAALPPNPLKTILYRPSVTHFLTVLSTKCEELPSNGIMLIYLSATGEMGTSGFCPDTGENVLSNFNKFDISSLSHTSSKENKEPCLWLGCRETEGSNCIYPGDLIPFTRRPLFLVIDSSTSYAFKSIHGTERGETSAMLLSPSSRSSAAGFSGDSTRHSGSQFTMFLTSPLQAFCLLLGNNGTDIDRLRSYYYCP

SEQ ID NO: 189189 - protein, 371 aa, Zea Mays
MVQCLEWEPCGSFALNDGYSAHDESGQNQPNLLKDLRDAALPPNPLKTILYRPSVTHFLTVLSTKCEELPSNGIMLIYLSATGEMGTSGFCPDTGENVLSNFNKFDISSLSHTSSKENKEPCLWLGCRETEGSNCIYPGDLIPFTRRPLFLVIDSSTSYAFKSIHGTERGETSAMLLSPSSRSSAAGFSGDSTRHSGSQFTMFLTSPLQAFCLLLGNNGTDIDRDAYNKAEELLLLSLNEWAATLVASSSLHSIWVEVLGDPLLRRLLLRFIFCRATHSLFKPTNHKTEFLPTCMPPLPESVDAESMLSQSCVLRVASFFGAASQFSFAEVTTWPDVDSEEAVVTSSSGSANKGVPETARDSDISNSSSSF

SEQ ID NO: 189190 - protein, 197 aa, Zea Mays
MLLSPSSRSSAAGFSGDSTRHSGSQFTMFLTSPLQAFCLLLGNNGTDIDRDAYNKAEELLLLSLNEWAATLVASSSLHSIWVEVLGDPLLRRLLLRFIFCRATHSLFKPTNHKTEFLPTCMPPLPESVDAESMLSQSCVLRVASFFGAASQFSFAEVTTWPDVDSEEAVVTSSSGSANKGVPETARDSDISNSSSSF

SEQ ID NO: 189191 - protein, 111 aa, Zea Mays
MCRQLEYLVRDCLIQIILLHFRRGLCVQTTTVEYSYNWSLWPSTVWMLSFSIEQSQSLFAWSTERRSPSPPPKKGSPSKKVCSPSPPPKKASPPRYIKVFIQIAYVSLAMF

SEQ ID NO: 189192 - protein, 110 aa, Zea Mays
MEKNVSISVSLEGNISSIPNSIANDSKTSMENRVDTSFINHAAEAWAEMRRQWVGRQAEVLRKTPREPVISWSTTYDDLLSTSERFPQRIPLSEMVDFLVDIWHEEGLYD

SEQ ID NO: 189193 - protein, 167 aa, Zea Mays
MGSAKELVRSRRAVNRLYENKAQLNSVSMHLGEIVATARTVGHLSKSTEVMKIVNNLMKAPELATTMQEFSKEMTKAGVMEEMVNEAVDSALDSEDMEEEIEEEVDKVLASVAGETASQLPDAARTQKIHEASTSRVPEERQAVAEGADDDEEDLEEIRARLAKVRS

SEQ ID NO: 189194 - protein, 139 aa, Zea Mays
MEKVKNMLKPRPTPQQQLREWQRRLRNECRVLDRQIRDVQREEKNVEKAIREAAKRNDMGSAKALAKELVRSRRAVNRLYENKAQLNSVSMHLGEIVATARTVGHLSKSTEVMKIVNNLMKAPELATTMQEFSKEMTKV

SEQ ID NO: 189195 - protein, 209 aa, Zea Mays
MECAAKGLAAEPCAGGVADRRCGGCGAVAYCSRVHQIIHWRVHKEECERFAEQMRHINALSQFPFTFLEPPALNHEFPSARCLFLQSIKLHQKGLWKSECICGRDVAPLKGLSVEAEWNLQSSLCPCAEPKNPVSSALASWEAYYQWRSLPLHSPVAVLLHWPLTLYHCVQLSRTQTPRYDGQDTLCIHYLACSVWGTTCIVSKCPDSH

SEQ ID NO: 189196 - protein, 196 aa, Zea Mays
MECAAKGLAAEPCAGGVADRRCGGCGAVAYCSRVHQIIHWRVHKEECERFAEQMRHINALSQFPFTFLEPPALNHEFPSARCLFLQSIKLHQKGLWKSECICGRDVAPLKGLSVEAEWNLQSSLCPCAEPKNPVSSALASWEAYYQWRSLPLHSPVAVLLHWPLTLYHCVQLSRTQTPRYDGQDTLCIHYLGMERL

SEQ ID NO: 189197 - protein, 281 aa, Zea Mays
MECAAKGLAAEPCAGGVADRRCGGCGAVAYCSRVHQIIHWRVHKEECERFAEQMRHINALSQFPFTFLEPPALNHEFPSARCLFLQSIKLHQKGLWKSECICGRDVAPLKGLSVEAEWNLQSSLCPCAEPKNPVSSALASWEAYYQWRSLPLHSPVAVLLHWPLTLYHCVQLSRTQTPRYDGQDTLCIHYLGPEKELLQLAAFGELRALFPSVQIHIELVGPEVPKSRDGEVVNISRYACCSDKSCCCKSSIGSKDLSCTAVTLKLWKGFYHERCSDILKI

SEQ ID NO: 189198 - protein, 267 aa, Zea Mays
MPLFLQLQLQGALLAVHNRELLGGIDRKRIRCFAMAPARCMSLNLAVRYADVINAVILQDDFLPRTDIPLEDIFKSLFCLPCLLCGRCLIDTCIPESVMLRDPRRLYAPGRLYHIVERKPFRCGRYPPIVRTAVPVDGRFERIVLSCNATSDHAIIWIEREAQRALDLLLESEKTMQAPAVERMSSEITVTRDHDEEQQEALRRAIMLGVADVNMPSTYGTFNENPTSEPAEASPLLSDSGRRRAVWEEWIARIFEKDESGQMVPRR

SEQ ID NO: 189199 - protein, 423 aa, Zea Mays
MSITCCLPVVECVYCLACARWVWQRCLHSGGYDSETWGVASAEEFEPVPRLCRIILSVYEDDLENPQWAPPGGYGMEPRWVVQRRIYEDTHGHAPTYLLYVDHQHSDVVLAVRGMNMAKESDYAVLLDNKLGQRRFDGGYVHNGLLKAAEWVFDAECDVLKDLLERNPGYTLTFAGHSLGSGVVSMLALLAVHNRELLGGIDRKRIRCFAMAPARCMSLNLAVRYADVINAVILQDDFLPRTDIPLEDIFKSLFWVPDVVLFVQLTMPSMWKMPNRHICGRYPPIVRTAVPVDGRFERIVLSCNATSDHAIIWIEREAQRALDLLLESEKTMQAPAVERMSSEITVTRDHDEEQQEALRRAIMLGVADVNMPSTYGTFNENPTSEPAEASPLLSDSGRRRAVWEEWIARIFEKDESGQMVPRR

SEQ ID NO: 189200 - protein, 81 aa, Zea Mays
MHHIDLFLLLLLNRIHHTPMSSPRAATGAAVGLAGTTPSSLENVAAARFPNDHRSLVFTRSNNHVHQLWGNESIRLLYNDI

SEQ ID NO: 189201 - protein, 218 aa, Zea Mays
MTYFLINNSYAQIKEALESGTRKGHRCDFVSQRHGEHEREQCMFAESNVAPPTSKCVVRGSSPSSLLVPVISLGCPLPRDANSSSGLAVNDECKVKFRELKSRRSFRFIVFRIDDTDMEIKVDRLGGPNQGYGDFTDSLPANECRYAIYDLDFTTIENCQKSKIFFFSWSPDTARTRSKMLYASSKDRFRRELDGIQCEIQATDPSEMSLDIVRSRTN

SEQ ID NO: 189202 - protein, 222 aa, Zea Mays
MEVDDGSRATPPLDAVAAAFKSQVMELQDLVLARSMFPATALPDLANVDALVTAMESQVETISRRLQEELDAIPKAKKLVQRSLKEEEKLQHMLANLPSGMRKNDFANQHEQSSSRMLPHFNSSFTEANECELKIKDEPVAAPRKGRAPAPRWYISTEELDSLSSYMRGRLTLEKVNIAINEVASYADANAHLVTCPKKKLSEDTWEKALVLRHLGRFHEVR

SEQ ID NO: 189203 - protein, 229 aa, Zea Mays
MQCVLTPETEGYDQIDSVTTGASVLVEGVVASSQGGKQKVELKVSKITVIGKSDPTSFPIQKKRASREFLRTVAHLRPRTNTFGAVARVRNALAYATHKFFQDNGFVWVSSPIITASDCEGAGEQFYVTTLLSNSTEGGSLLKDIPATKDGRVDWSQDFFCKPAFLTVSGQLNGETYASALSDIYTFGPTFRAENSNTARHLAEFWMIEPELAFADLNDDMACATAYLQ

SEQ ID NO: 189204 - protein, 183 aa, Zea Mays
MDFFNTWVEKGIIDRLNDVVEKNFVHLSYTDAVELLLGSKKKFEFPVKWGLDLQSEHERYITEVAFDGRPVIIRDYPKEIKAFYMRENDDGKTVAAMDLLVPRVGELIGGSQREERLDYLEARLDEQNLNKESYWWYLDLRRYGSVPHAGFGLGFERLVQFATGIDNIRDAIPFPRVPGSAEF

SEQ ID NO: 189205 - protein, 119 aa, Zea Mays
MDFFNTWVEKGIIDRLNDVVEKNFVHLSYTDAVELLLGSKKKFEFPVKWGLDLQSEHERYITEVAFDGRPVIIRDYPKEIKAFYMRENDDGKTVAAMDLLVPRVKAQSNRPYIKFLACW

SEQ ID NO: 189206 - protein, 351 aa, Zea Mays
MQCVLTPETEGYDQIDSVTTGASVLVEGVVASSQGGKQKVELKVSKITVIGKSDPTSFPIQKKRASREFLRTVAHLRPRTNTFGAVARVRNALAYATHKFFQDNGFVWVSSPIITASDCEGAGEQFYVTTLLSNSTEGGSLLKDIPATKDGRVDWSQDFFCKPAFLTVSGQLNGETYASALSDIYTFGPTFRAENSNTARHLAEFWMIEPELAFADLNDDMACATAYLQYVVKYILENCKEDMDFFNTWVEKGIIDRLNDVVEKNFVHLSYTDAVELLLGSKKKFEFPVKWGLDLQSEHERYITEVAFDGRPVIIRDYPKEIKAFYMRENDDGKTVAAMDLLVPRVKAQSW

SEQ ID NO: 189207 - protein, 700 aa, Zea Mays
MARVRSTARVERDGDETEAAETIPISEAMRRSGLVSSEDTPAAEATQADVEEVGSKDEYSCGMPSKPSHLEFGKSTIFEADLPKMVKLGYFSEAKKELIRFGEEEITPKPEKNEVVVFKSFFKAGLRFPLNEMIADVLKKFGVYLHQLTPNAIVRLSVYIWALRSQGVEPFGEGFCRVHELHYQTKARGDGLHENFGCYNFAYRKTTKFPVISYRSKWPAGWKSEWFYVKVDKDEDKLVQSPLELTFGETRPRCNMIRGSPSQLALAEFRVISDHIGTRDLVQEFLAFKVFPTMREWEMPKLEGEKKKGELVRLPYYYKFKKHFKKPCQEWLDTIEIMCNDILGNYSKKEDQLMTAAFGTRPKRRLNRVLDALNFDYPDYEQLGRDAEGPKRKRIASALGKESTKLAKKEKEISEKQSPEPKMAAPRKRKVASPKPASPKSKTSAREEEAPATPSAAEVEEILKVMTELLPVKLSPLAPELTKFFQKDKEASTAESPAKPKKRRIIQVADVIHQTPPPTSASKIVMAETTAIGAETTGAETGGAEATGAEAGATEDPNLETTLDDIDNILLKMAEEEAVVVAVNMTTEKGKEQIEDTLEEGNFNFQDILGQELTDAEKEELKKYAISCGYKPGSLLFGGVNEGKLRCLRNRTEAKVVRTFSKSVGLPKIEADLCRYQRQHIASSLLYANFKVKTRLFIVF

SEQ ID NO: 189208 - protein, 146 aa, Zea Mays
MRIAPTSTLRSSWLMWPTLPSATTQESTGYAILCTSIVSSVVSPLQARSSVACVARATLTTRTGRRGGPPGSATRPCPSAATVEHTHLEFLMLCYRGTRPMQALIVFGIFVALLNFATRVPSEPLELCCQCTVEQVSRTIFVVLSQ

SEQ ID NO: 189209 - protein, 224 aa, Zea Mays
MGAYKYVSELWRRKQSDVMRFVQRVRCWEYRQQPAIVRLTRPTRPDKARRLGFKAKQGYVVYRVRVRRGGRKRPVPKGIVYGKPKHQGITQLKFQRNKRSVAEERAGRKLGGLRVLNSYWVNEERAGRKLGGLRVLNSYWVNEDSTYKYFEIILVDVAHTAIRNDPRINWLCNPVHKHRELRGLTSAGKKFRGLRGKGHTHHKNRPSRRATWKRNQTLSLRRYR

SEQ ID NO: 189210 - protein, 241 aa, Zea Mays
MGAYKYVSELWRRKQSDVMRFVQRVRCWEYRQQPAIVRLTRPTRPDKARRLGFKAKQGYVVYRVRVRRGGRKRPVPKGIVYGKPKHQGITQLKFQRNKRSVAEERAGRKLGGLRGIVYGKPKHQGITQLKFQRNKRSVAEERAGRKLGGLRVLNSYWVNEDSTYKYFEIILVDVAHTAIRNDPRINWLCNPVHKHRELRGLTSAGKKFRGLRGKGHTHHKNRPSRRATWKRNQTLSLRRYR

SEQ ID NO: 189211 - protein, 211 aa, Zea Mays
MRIAPTSTLRSSWLMWPTLPSATTQESTGYAILCTSIVSSVVSPLQARSSVACVARATLTTRTGRRGGPPGSATRPCPSAATVEHTPPSATTQESTGYAILCTSTVSSVVSPLQARSSVVCVARATLTTRTGRPGGPPGSATRPFPSAATVEHTHLDALLLWNPPHAGSLIVFGIFVSLLNFATCVTFEPLELRCLYHGASDAYESMKMIV

SEQ ID NO: 189212 - protein, 186 aa, Zea Mays
MRFVQRVRCWEYRQQPAIVRLTRPTRPDKARRLGYKAKQGYVVYRVRVKRGGRKRPVPKGIVYGKPKHQGITQLKFQRNKRSVAEERAGRKLGGLRVLNSYWVNEDSTYKYFEIILVDVAHTAIRNDPRINWLCNPVHKHRELRGLTSAGKKFRGLRGKGHTHHKNRPSRRATWKRNQTLSLRRYR

SEQ ID NO: 189213 - protein, 464 aa, Zea Mays
MAESNKRQSAPNKTQLIFFSQLAERAASLQLAETQSSRFLTAIRLASIRFDSGARGERGEERYGNRLERALLPASSVASSSLFIPAPPADSPDRAVAVMPLAESPPWRRKATDFFSTSSVKLKQAGQSAGDNIVDVAGKVGSVVKSRWAVFQEARQQQQQQQRPPHETVQERIITAAASTGLLFRKGISETKEKVAVGKVKVEEAAKKTADKSKSILNNIERWQKGVASTDATVQREQSDRAVPLVLVRCADYLVISGLNNEYLFKSEGDKKVLQQLVSLYNEDSGASLLEGVNPIDVGALVKCYLASIPEPLTTFSLYDELRAARVSIPDLRNILKKLPNVNYMTLEFVTALLLRVSRKSSLNKMDSRSLAVEFAPLIMWRQGDTGTDLRNHLKFTLKPPPKIVDTTSNAATWDLLDEDDEDASSQIPLDDASPPDYSSIEVIQCLIEHHNAIFTDANETVWR

SEQ ID NO: 189214 - protein, 75 aa, Zea Mays
MTLEFVTALLLRVSRKSSLNKMDSRSLAVEFAPLIMWRQGDTGTDLRNHLKFTLKPPPKIVDTTSNAATWDLLGV

SEQ ID NO: 189215 - protein, 74 aa, Zea Mays
MAAAIPIPADLGPPVMPLRRSSASRLLWMTAELSRPHSTSSAEEPAWSRCRDRDLFPRSEESTIKRRRPSDQAL

SEQ ID NO: 189216 - protein, 53 aa, Zea Mays
MSCVSARRLHAVVLSSSSSRCSRLSRVVRALGLVQSCCFTRYVFRLTPLIRPA

SEQ ID NO: 189217 - protein, 132 aa, Zea Mays
MGAERSGPKNSKSRNPNPLISLSPSQEPGRTNCEYTREDRGEETQATRAIWERERNGADVFFPLRALLLQPAGRSSSLQDGVPGCKEEGEGNSMYLERGERSGTKDDPEASCLFFVAGFAGAISGVLGLWKE

SEQ ID NO: 189218 - protein, 240 aa, Zea Mays
MGNNRDHNPRELRSWARRTGFHPSAFFSGESNSSFASSAAPQAPPPPPPPPVSSRRPPPAREREPEPDTEDDLVPAPPLELERGGPAPVRGRGGRPRRRIDLRGELVIPPGFGREEAEPDAGKGRARGDARRRNFGVEMDQTPANAGRNGNGALADAESRKKSEEAEADAKRKAEEAEARRKKEEEERDAELAAYYQEQWANEDEGAADAAAAETAPLYEASGLRCGVTDNPGWAKCVGI

SEQ ID NO: 189219 - protein, 651 aa, Zea Mays
MAAPAVASPSRATPTDIPTAAPSPASPPRRLASAPPAVDASGSSSPASAHSGDQLSAPDASSPLLASRSEEYRLLFRLPPDEVLVQDFNCAVQENILLQGHMYLFLHHICFYSNIFGYETKKCPDIVPVFQKTIPLQEVTDVRKAKTAAIFHNAIEIVAGSRRHFFGSFLSRDEAYRIIVDGWEQHVSDARLLLERQETKSASSSEENGYVVLEGTKESKQDGDLSLPDRSVNSTAVSSSNADGGDSNINISKRFSEVEENGLEDNIVALNPFNLEPVDAPPSVPESYTMISESKFQVPVEVLFNFLLSDGAFGFVDDFHTKCGDKEFSCSKWRTDEQGGLVRDVSFLHPIKIYLGAKFGTCQEVQKLRLYKNRRLVIQTSQSIGDAPYGDHFTVEGIWDVEQDSLDENCCDLRIYINVAFSKKTIFRGKIEQSTKDECREVFSLWIKLVCLFSYLKIFLSATFHLEGHDLLKQEYDRSKGASSTPDSGVQPGATTNEESAVEVAVPVVSSSHDESGARSLIPPTQDHQQRTGRDPSITSTSQELWGSLSSYMRSRQLGPVLAMSLVALIILMQVTIIVLLTRPPQVQMDPHGIWTGSSGYSKESIEWVQKRLSLLSEEMQLAEAHMETMRREFAWLRSYLERLQRTRGST

SEQ ID NO: 189220 - protein, 339 aa, Zea Mays
MAAPAVASPSRATPTDIPTAAPSPASPPRRLASAPPAVDASGSSSPASAHSGDQLSAPDASSPLLASRSEEYRLLFRLPPDEVLVQDFNCAVQENILLQGHMYLFLHHICFYSNIFGYETKKCPDIVPVFQKTIPLQEVTDVRKAKTAAIFHNAIEIVAGSRRHFFGSFLSRDEAYRIIVDGWEQHVSDARLLLERQETKSASSSEENGYVVLEGTKESKQDGDLSLPDRSVNSTAVSSSNADGGDSNINISKRFSEVEENGLEDNIVALNPFNLEPVDAPPSVPESYTMISESKFQVPVEVLFNFLLSDGAFGFVDDFHTKCGDKVAPNGVQMSKGDL

SEQ ID NO: 189221 - protein, 657 aa, Zea Mays
MAAPAVASPSRATPTDIPTAAPSPASPPRRLASAPPAVDASGSSSPASAHSGDQLSAPDASSPLLASRSEEYRLLFRLPPDEVLVQDFNCAVQENILLQGHMYLFLHHICFYSNIFGYETKKTIPLQEVTDVRKAKTAAIFHNAIEIVAGSRRHFFGSFLSRDEAYRIIVDGWEQHVSDARLLLERQETKSASSSEENGYVVLEGTKESKQDGDLSLPDRSVNSTAVSSSNADGGDSNINISKRFSEVEENGLEDNIVALNPFNLEPVDAPPSVPESYTMISESKFQVPVEVLFNFLLSDGAFGFVDDFHTKCGDKEFSCSKWRTDEQGGLVRDVSFLHPIKIYLGAKFGTCQEVQKLRLYKNRRLVIQTSQSIGDAPYGDHFTVEGIWDVEQDSLDENCCDLRIYINVAFSKKTIFRGKIEQSTKDECREVFSLWIKLGHDLLKQEYDRSKGASSTPDSGVQPGATTNEESAVEVAVPVASILETRFGLPAGSCSPICDHHSSTNKTPPGPNGSSWDLDGQFRVQQRKHRVGAEAPQLTKRGDAARGGTHGDDEARVCLAQVLPGETAEDAGQHMTAARVHGTGARVRYANSEVYTNTIQYNPEVVFSVSSVVTDGTDANRERWIVVCRGICRKAELQDPGIAFDVNSWSFPIALG

SEQ ID NO: 189222 - protein, 326 aa, Zea Mays
MGNLHAKGAGTGAKGAANTSISNSRDSMSNAATPSPVEQATFKWVIDGFSSLLDKDQGWTYSNVFELMGVEWYLKLNPKYEVSNEECVSLRLELSQSSVKLDTIFEASFKFMIYDQLIGKHKVHLGNHSFQTASTSSAIAFMLPLKALRQSSRFIVNNSCVFGIGFIKVATIKVNTTLETLFVRKMNIFNEAKVYTWKIEDFSALKNPSHSPEFEIAGYTWIISLNPSYDGNSLSLFLKMKKTNDVPKGSGSLVEFALSIKDQENGKDRKYPGRCQFSSKHHRWGWKKFISLEDFKDSSKGYLIKGKCCIEAEVAISGSSKTEYSM

SEQ ID NO: 189223 - protein, 221 aa, Zea Mays
MGNLHAKGAGTGAKGAANTSISNSRDSMSNAATPSPVEQATFKWVIDGFSSLLDKDQGWTYSNVFELMGVEWYLKLNPKYEVSNEECVSLRLELSQSSVKLDTIFEASFKFMIYDQLIGKHKVHLGNHSFQTASTSSAIAFMLPLKALRQSSRFIVNNSCVFGIGFIKVATIKVNTTLETLFVRKMNIFNEAKVYTWKIEDFSALKNPSHSPEFEIAGYTW

SEQ ID NO: 189224 - protein, 151 aa, Zea Mays
MRYLKLNPKYEVSNEECVSLRLELSQSSVKLDTIFEASFKFMIYDQLIGKHKVHLGNHSFQTASTSSAIAFMLPLKALRQSSRFIVNNSCVFGIGFIKVATIKVNTTLETLFVRKMNIFNEAKVYTWKIEDFSALKNPSHSPEFEIAGYTW

SEQ ID NO: 189225 - protein, 275 aa, Zea Mays
MIVLSISGSAYVSTADEVKFWYLKLNPKYEVSNEECVSLRLELSQSSVKLDTIFEASFKFMIYDQLIGKHKVHLGNHSFQTASTSSAIAFMLPLKALRQSSRFIVNNSCVFGIGFIKVATIKVNTTLETLFVRKMNIFNEAKVYTWKIEDFSALKNPSHSPEFEIAGYTWIISLNPSYDGNSLSLFLKMKKTNDVPKGSGSLVEFALSIKDQENGKDRKYPGRCQFSSKHHRWGWKKFISLEDFKDSSKGYLIKGKCCIEAEVAISGSSKTEYSM

SEQ ID NO: 189226 - protein, 51 aa, Zea Mays
MAEEEGEGERSGDGRMDMDLSAVLEDDVGVAGVGERVGDDQVVAPHHADVE

SEQ ID NO: 189227 - protein, 202 aa, Zea Mays
MGHHCCSKQKVKRGLWSPEEDEKLVKYITAHGHSCWSAVPKHAGLQRCGKSCRLRWINYLRPDLKRGTFSDHEERTIIDVHRILGNRSPSTCPGARITRSRTSGTRASRRSSSRRASTPRPTTSCRPPGLSSTATGQTLAATILPTSTQTAALLSSPSPRRPSPSAPRPRPPPTAPSRPRRRRRRWRRQRTTSLIITLTACS

SEQ ID NO: 189228 - protein, 2273 aa, Zea Mays
MTILNTFISFIKVSMPRSDVIILTDPGSKFSVNQGSATLLPIEGNYSRGNLMLQRIKTYIYVSGARVLKMKERSSLCESAADGNWGLKYKRKRSKLTVSPSNENEATSPTSDSRMSHGSTKKKLKHDNNISPSAKKIRGHDGYFFECVECDLGGNLLCCDSCPRVYHLECLNPPLKRAPPGKWQCPRCRPKKVSLKLLGNADVDTSKREKSTRTYASTASDSPPSHTKVSFKTRNSTQDKTGLNEQGKESSGGTMNGGETSTKNNEVEKKKTLILHLKKRSTKELSENTKPSKSEFVELSEEKIVKHGSVLKLKKHPHRMDLSPSKSKTRRQSSQRESKRSGTKKIKYSMSDDDSVSSSEPSTSLDNSESPPKRKHSDGKAPSSSTKKGKKKVKFVEKKHSEEQGVVGDKMMTTQEDQQVDRILGCRLQMSQINPPSHASLEQFESANLQVDGMVLPHASAGIPNRPHDGTESSRNGTIEDICADESANHSGHNLEMRKDTDSKSHEKESHKREQVKKILSVCSGDETNIMKDDQVVRENVSASKKGEDETSDLPAEKDDTILPVTRACTMIRTNQDHTDESKQHGKIEQITNKDYNDAGYEFLIKWVGKSNIHNSWVSESEVKILAKRKLENYKAKYGMSLINICKEQWCQPQRVIGLRASVDEVEEVLIKWCGLPYDECTWERSDEPTLMKYSHLVTQFKNFECQALDKDVVKDYANARNRHELNVLVDQPKELQGGMLFPHQLEALNWLRKCWYKSKNVILADEMGLGKTVSACAFLSSLYCEFKINLPCLVLVPLSTMPNWMAEFSSWAPHLNVVEYHGSARSRSIIRQYEWHAGDASQIGKTKRSYKFNVLLTTYEMVLVDAAYLRSVSWEVLIVDEGHRLKNSSSKLFSLLNSFSFQHRVLLTGTPLQNNIGEMYNLLNFLQPTSFPSLSSFEEKFNDLTTAEKVEELKKLVAPHMLRRLKKDAMQNIPPKIERMVPVELTSIQAEYYRAMLTKNYQVLRNIGKGGAHQSLLNIVMQLRKVCNHPYLIPGTEPESGSPEFLHEMRIKASAKLTLLHLMLKILHKEGHRVLIFSQMTKLLDILEDYLTLEFGPKTFERVDGSVSVAERQAAIVRFNQDKTRFVFLLSTRSCGLGINLATADTVIIYDSDFNPHADIQAMNRAHRIGQSNRLLVYRLVVRASVEERILQLAKKKLMLDQLFVNKSESQKEVEDIIRWGTEELFGNSDSVDGKDNSEVPGPVADVEFKHRRKTGGLGDVYEDKCIGGSTKLVWDENAILKLLDRSNLPSSMAESTDGDLDNDMLGTVKSIDWNDELNDDPGTNEDTAPIDNDGSEQASESKQGATNRSEENEWDKLLRVRWEQYQIEEEACLGRGKRLRKAVSYRETFATLPNEALSEDSDEGDEPKREYTAAGLALKEKYGKLRARQKERIAQRHIIKNYADDNLEEFMTPYDSIANEPAENPLVIVEDLNSSQLSGAKRFSDSTGEMRQSSKKSKRYSEIPQDLYAKIPGNTASFKHHSKATDVFNPGTPNHLLPVLGLCAPNADQVNSYKNSICAPSIKERKRASGDIVKQLSTPADHSNVHRNEAQSASDKAIFPGASEEALRRISNMIPDSYFPFSHIPPISGKGVDPVENPGPSIASFQGNLGLPNFSLEDNAPLKHIKPIPDIFPSLSLGAHKDYIRSSVPELPDGSLLPNFMADITGTSKQKSFMSGLLPGLGLSPGQPIHSAMPDNHKKVLDNIMMRAQYASNKFLKKRSKLDYWSEDELDALWIGVRRHGRGNWDAMLRDPKLKFLNNRTSEELALRWILEEQKIIDEPMSTSTRRSNSAAFPGISDAMMSRALNESNFSKMRMEQPKLQSHLTDIQLGSSDILSTFPHVDAASYINSGEGGPSQIPWQDFKHRSSYAGDFPAGAFDKLEKPDVGPIPPFMPNPFMTDSIGSLPINRKNNSSIPHSEIRSSSRENILSGVSDGQINLLHEMQRRRRVRSGKEPIEMNLNHIDHSNLQLDNTSDLGGLKPNKLPHWLQEAVRAPSSKPPERELPATVSAIAQSVCLLLGEQEPSIPPFLIPGTPLSRPKDPRINSKKKLRKAQQSNSHVEHSKIGSGEGDCVTTPAPPSIEASPALPVDCDDGEPSLNLKSASLSSSAGSKGLDELPPTFKEANQTVDGSEAVAAKSDAPEIGCQVPGSSPLHDKGSESSGSPVKDTPDAGIRLPGSDNSVMAFSALPLVDEAPGTSSRAADTPVPCDGNESKEDVPLDNAESTRKLEPNG

SEQ ID NO: 189229 - protein, 2259 aa, Zea Mays
MPRSDVIILTDPGSKFSVNQGSATLLPIEGNYSRGNLMLQRIKTYIYVSGARVLKMKERSSLCESAADGNWGLKYKRKRSKLTVSPSNENEATSPTSDSRMSHGSTKKKLKHDNNISPSAKKIRGHDGYFFECVECDLGGNLLCCDSCPRVYHLECLNPPLKRAPPGKWQCPRCRPKKVSLKLLGNADVDTSKREKSTRTYASTASDSPPSHTKVSFKTRNSTQDKTGLNEQGKESSGGTMNGGETSTKNNEVEKKKTLILHLKKRSTKELSENTKPSKSEFVELSEEKIVKHGSVLKLKKHPHRMDLSPSKSKTRRQSSQRESKRSGTKKIKYSMSDDDSVSSSEPSTSLDNSESPPKRKHSDGKAPSSSTKKGKKKVKFVEKKHSEEQGVVGDKMMTTQEDQQVDRILGCRLQMSQINPPSHASLEQFESANLQVDGMVLPHASAGIPNRPHDGTESSRNGTIEDICADESANHSGHNLEMRKDTDSKSHEKESHKREQVKKILSVCSGDETNIMKDDQVVRENVSASKKGEDETSDLPAEKDDTILPVTRACTMIRTNQDHTDESKQHGKIEQITNKDYNDAGYEFLIKWVGKSNIHNSWVSESEVKILAKRKLENYKAKYGMSLINICKEQWCQPQRVIGLRASVDEVEEVLIKWCGLPYDECTWERSDEPTLMKYSHLVTQFKNFECQALDKDVVKDYANARNRHELNVLVDQPKELQGGMLFPHQLEALNWLRKCWYKSKNVILADEMGLGKTVSACAFLSSLYCEFKINLPCLVLVPLSTMPNWMAEFSSWAPHLNVVEYHGSARSRSIIRQYEWHAGDASQIGKTKRSYKFNVLLTTYEMVLVDAAYLRSVSWEVLIVDEGHRLKNSSSKLFSLLNSFSFQHRVLLTGTPLQNNIGEMYNLLNFLQPTSFPSLSSFEEKFNDLTTAEKVEELKKLVAPHMLRRLKKDAMQNIPPKIERMVPVELTSIQAEYYRAMLTKNYQVLRNIGKGGAHQSLLNIVMQLRKVCNHPYLIPGTEPESGSPEFLHEMRIKASAKLTLLHLMLKILHKEGHRVLIFSQMTKLLDILEDYLTLEFGPKTFERVDGSVSVAERQAAIVRFNQDKTRFVFLLSTRSCGLGINLATADTVIIYDSDFNPHADIQAMNRAHRIGQSNRLLVYRLVVRASVEERILQLAKKKLMLDQLFVNKSESQKEVEDIIRWGTEELFGNSDSVDGKDNSEVPGPVADVEFKHRRKTGGLGDVYEDKCIGGSTKLVWDENAILKLLDRSNLPSSMAESTDGDLDNDMLGTVKSIDWNDELNDDPGTNEDTAPIDNDGSEQASESKQGATNRSEENEWDKLLRVRWEQYQIEEEACLGRGKRLRKAVSYRETFATLPNEALSEDSDEGDEPKREYTAAGLALKEKYGKLRARQKERIAQRHIIKNYADDNLEEFMTPYDSIANEPAENPLVIVEDLNSSQLSGAKRFSDSTGEMRQSSKKSKRYSEIPQDLYAKIPGNTASFKHHSKATDVFNPGTPNHLLPVLGLCAPNADQVNSYKNSICAPSIKERKRASGDIVKQLSTPADHSNVHRNEAQSASDKAIFPGASEEALRRISNMIPDSYFPFSHIPPISGKGVDPVENPGPSIASFQGNLGLPNFSLEDNAPLKHIKPIPDIFPSLSLGAHKDYIRSSVPELPDGSLLPNFMADITGTSKQKSFMSGLLPGLGLSPGQPIHSAMPDNHKKVLDNIMMRAQYASNKFLKKRSKLDYWSEDELDALWIGVRRHGRGNWDAMLRDPKLKFLNNRTSEELALRWILEEQKIIDEPMSTSTRRSNSAAFPGISDAMMSRALNESNFSKMRMEQPKLQSHLTDIQLGSSDILSTFPHVDAASYINSGEGGPSQIPWQDFKHRSSYAGDFPAGAFDKLEKPDVGPIPPFMPNPFMTDSIGSLPINRKNNSSIPHSEIRSSSRENILSGVSDGQINLLHEMQRRRRVRSGKEPIEMNLNHIDHSNLQLDNTSDLGGLKPNKLPHWLQEAVRAPSSKPPERELPATVSAIAQSVCLLLGEQEPSIPPFLIPGTPLSRPKDPRINSKKKLRKAQQSNSHVEHSKIGSGEGDCVTTPAPPSIEASPALPVDCDDGEPSLNLKSASLSSSAGSKGLDELPPTFKEANQTVDGSEAVAAKSDAPEIGCQVPGSSPLHDKGSESSGSPVKDTPDAGIRLPGSDNSVMAFSALPLVDEAPGTSSRAADTPVPCDGNESKEDVPLDNAESTRKLEPNG

SEQ ID NO: 189230 - protein, 1461 aa, Zea Mays
MKERSSLCESAADGNWGLKYKRKRSKLTVSPSNENEATSPTSDSRMSHGSTKKKLKHDNNISPSAKKIRGHDGYFFECVECDLGGNLLCCDSCPRVYHLECLNPPLKRAPPGKWQCPRCRPKKVSLKLLGNADVDTSKREKSTRTYASTASDSPPSHTKVSFKTRNSTQDKTGLNEQGKESSGGTMNGGETSTKNNEVEKKKTLILHLKKRSTKELSENTKPSKSEFVELSEEKIVKHGSVLKLKKHPHRMDLSPSKSKTRRQSSQRESKRSGTKKIKYSMSDDDSVSSSEPSTSLDNSESPPKRKHSDGKAPSSSTKKGKKKVKFVEKKHSEEQGVVGDKMMTTQEDQQVDRILGCRLQMSQINPPSHASLEQFESANLQVDGMVLPHASAGIPNRPHDGTESSRNGTIEDICADESANHSGHNLEMRKDTDSKSHEKESHKREQVKKILSVCSGDETNIMKDDQVVRENVSASKKGEDETSDLPAEKDDTILPVTRACTMIRTNQDHTDESKQHGKIEQITNKDYNDAGYEFLIKWVGKSNIHNSWVSESEVKILAKRKLENYKAKYGMSLINICKEQWCQPQRVIGLRASVDEVEEVLIKWCGLPYDECTWERSDEPTLMKYSHLVTQFKNFECQALDKDVVKDYANARNRHELNVLVDQPKELQGGMLFPHQLEALNWLRKCWYKSKNVILADEMGLGKTVSACAFLSSLYCEFKINLPCLVLVPLSTMPNWMAEFSSWAPHLNVVEYHGSARSRSIIRQYEWHAGDASQIGKTKRSYKFNVLLTTYEMVLVDAAYLRSVSWEVLIVDEGHRLKNSSSKLFSLLNSFSFQHRVLLTGTPLQNNIGEMYNLLNFLQPTSFPSLSSFEEKFNDLTTAEKVEELKKLVAPHMLRRLKKDAMQNIPPKIERMVPVELTSIQAEYYRAMLTKNYQVLRNIGKGGAHQSLLNIVMQLRKVCNHPYLIPGTEPESGSPEFLHEMRIKASAKLTLLHLMLKILHKEGHRVLIFSQMTKLLDILEDYLTLEFGPKTFERVDGSVSVAERQAAIVRFNQDKTRFVFLLSTRSCGLGINLATADTVIIYDSDFNPHADIQAMNRAHRIGQSNRLLVYRLVVRASVEERILQLAKKKLMLDQLFVNKSESQKEVEDIIRWGTEELFGNSDSVDGKDNSEVPGPVADVEFKHRRKTGGLGDVYEDKCIGGSTKLVWDENAILKLLDRSNLPSSMAESTDGDLDNDMLGTVKSIDWNDELNDDPGTNEDTAPIDNDGSEQASESKQGATNRSEENEWDKLLRVRWEQYQIEEEACLGRGKRLRKAVSYRETFATLPNEALSEDSDEGDEPKREYTAAGLALKEKYGKLRARQKERIAQRHIIKNYADDNLEEFMTPYDSIANEPAENPLVIVEDLNSSQLSGAKRFSDSTGEMRQSSKKSKRYSEIPQDLYAKIPGELIQKLNLCTKHKGA

SEQ ID NO: 189231 - protein, 2181 aa, Zea Mays
MKERSSLCESAADGNWGLKYKRKRSKLTVSPSNENEATSPTSDSRMSHGSTKKKLKHDNNISPSAKKIRGHDGYFFECVECDLGGNLLCCDSCPRVYHLECLNPPLKRAPPGKWQCPRCRPKKVSLKLLGNADVDTSKREKSTRTYASTASDSPPSHTKVSFKTRNSTQDKTGLNEQGKESSGGTMNGGETSTKNNEVEKKKTLILHLKKRSTKELSENTKPSKSEFVELSEEKIVKHGSVLKLKKHPHRMDLSPSKSKTRRQSSQRESKRSGTKKIKYSMSDDDSVSSSEPSTSLDNSESPPKRKHSDGKAPSSSTKKGKKKVKFVEKKHSEEQGVVGDKMMTTQEDQQVDRILGCRLQMSQINPPSHASLEQFESANLQVDGMVLPHASAGIPNRPHDGTESSRNGTIEDICADESANHSGHNLEMRKDTDSKSHEKESHKREQVKKILSVCSGDETNIMKDDQVVRENVSASKKGEDETSDLPAEKDDTILPVTRACTMIRTNQDHTDESKQHGKIEQITNKDYNDAGYEFLIKWVGKSNIHNSWVSESEVKILAKRKLENYKAKYGMNEVEEVLIKWCGLPYDECTWERSDEPTLMKYSHLVTQFKNFECQALDKDVVKDYANARNRHELNVLVDQPKELQGGMLFPHQLEALNWLRKCWYKSKNVILADEMGLGKTVSACAFLSSLYCEFKINLPCLVLVPLSTMPNWMAEFSSWAPHLNVVEYHGSARSRSIIRQYEWHAGDASQIGKTKRSYKFNVLLTTYEMVLVDAAYLRSVSWEVLIVDEGHRLKNSSSKLFSLLNSFSFQHRVLLTGTPLQNNIGEMYNLLNFLQPTSFPSLSSFEEKFNDLTTAEKVEELKKLVAPHMLRRLKKDAMQNIPPKIERMVPVELTSIQAEYYRAMLTKNYQVLRNIGKGGAHQSLLNIVMQLRKVCNHPYLIPGTEPESGSPEFLHEMRIKASAKLTLLHLMLKILHKEGHRVLIFSQMTKLLDILEDYLTLEFGPKTFERVDGSVSVAERQAAIVRFNQDKTRFVFLLSTRSCGLGINLATADTVIIYDSDFNPHADIQAMNRAHRIGQSNRLLVYRLVVRASVEERILQLAKKKLMLDQLFVNKSESQKEVEDIIRWGTEELFGNSDSVDGKDNSEVPGPVADVEFKHRRKTGGLGDVYEDKCIGGSTKLVWDENAILKLLDRSNLPSSMAESTDGDLDNDMLGTVKSIDWNDELNDDPGTNEDTAPIDNDGSEQASESKQGATNRSEENEWDKLLRVRWEQYQIEEEACLGRGKRLRKAVSYRETFATLPNEALSEDSDEGDEPKREYTAAGLALKEKYGKLRARQKERIAQRHIIKNYADDNLEEFMTPYDSIANEPAENPLVIVEDLNSSQLSGAKRFSDSTGEMRQSSKKSKRYSEIPQDLYAKIPGNTASFKHHSKATDVFNPGTPNHLLPVLGLCAPNADQVNSYKNSICAPSIKERKRASGDIVKQLSTPADHSNVHRNEAQSASDKAIFPGASEEALRRISNMIPDSYFPFSHIPPISGKGVDPVENPGPSIASFQGNLGLPNFSLEDNAPLKHIKPIPDIFPSLSLGAHKDYIRSSVPELPDGSLLPNFMADITGTSKQKSFMSGLLPGLGLSPGQPIHSAMPDNHKKVLDNIMMRAQYASNKFLKKRSKLDYWSEDELDALWIGVRRHGRGNWDAMLRDPKLKFLNNRTSEELALRWILEEQKIIDEPMSTSTRRSNSAAFPGISDAMMSRALNESNFSKMRMEQPKLQSHLTDIQLGSSDILSTFPHVDAASYINSGEGGPSQIPWQDFKHRSSYAGDFPAGAFDKLEKPDVGPIPPFMPNPFMTDSIGSLPINRKNNSSIPHSEIRSSSRENILSGVSDGQINLLHEMQRRRRVRSGKEPIEMNLNHIDHSNLQLDNTSDLGGLKPNKLPHWLQEAVRAPSSKPPERELPATVSAIAQSVCLLLGEQEPSIPPFLIPGTPLSRPKDPRINSKKKLRKAQQSNSHVEHSKIGSGEGDCVTTPAPPSIEASPALPVDCDDGEPSLNLKSASLSSSAGSKGLDELPPTFKEANQTVDGSEAVAAKSDAPEIGCQVPGSSPLHDKGSESSGSPVKDTPDAGIRLPGSDNSVMAFSALPLVDEAPGTSSRAADTPVPCDGNESKEDVPLDNAESTRKLEPNG

SEQ ID NO: 189232 - protein, 1863 aa, Zea Mays
MMTTQEDQQVDRILGCRLQMSQINPPSHASLEQFESANLQVDGMVLPHASAGIPNRPHDGTESSRNGTIEDICADESANHSGHNLEMRKDTDSKSHEKESHKREQVKKILSVCSGDETNIMKDDQVVRENVSASKKGEDETSDLPAEKDDTILPVTRACTMIRTNQDHTDESKQHGKIEQITNKDYNDAGYEFLIKWVGKSNIHNSWVSESEVKILAKRKLENYKAKYGMSLINICKEQWCQPQRVIGLRASVDEVEEVLIKWCGLPYDECTWERSDEPTLMKYSHLVTQFKNFECQALDKDVVKDYANARNRHELNVLVDQPKELQGGMLFPHQLEALNWLRKCWYKSKNVILADEMGLGKTVSACAFLSSLYCEFKINLPCLVLVPLSTMPNWMAEFSSWAPHLNVVEYHGSARSRSIIRQYEWHAGDASQIGKTKRSYKFNVLLTTYEMVLVDAAYLRSVSWEVLIVDEGHRLKNSSSKLFSLLNSFSFQHRVLLTGTPLQNNIGEMYNLLNFLQPTSFPSLSSFEEKFNDLTTAEKVEELKKLVAPHMLRRLKKDAMQNIPPKIERMVPVELTSIQAEYYRAMLTKNYQVLRNIGKGGAHQSLLNIVMQLRKVCNHPYLIPGTEPESGSPEFLHEMRIKASAKLTLLHLMLKILHKEGHRVLIFSQMTKLLDILEDYLTLEFGPKTFERVDGSVSVAERQAAIVRFNQDKTRFVFLLSTRSCGLGINLATADTVIIYDSDFNPHADIQAMNRAHRIGQSNRLLVYRLVVRASVEERILQLAKKKLMLDQLFVNKSESQKEVEDIIRWGTEELFGNSDSVDGKDNSEVPGPVADVEFKHRRKTGGLGDVYEDKCIGGSTKLVWDENAILKLLDRSNLPSSMAESTDGDLDNDMLGTVKSIDWNDELNDDPGTNEDTAPIDNDGSEQASESKQGATNRSEENEWDKLLRVRWEQYQIEEEACLGRGKRLRKAVSYRETFATLPNEALSEDSDEGDEPKREYTAAGLALKEKYGKLRARQKERIAQRHIIKNYADDNLEEFMTPYDSIANEPAENPLVIVEDLNSSQLSGAKRFSDSTGEMRQSSKKSKRYSEIPQDLYAKIPGNTASFKHHSKATDVFNPGTPNHLLPVLGLCAPNADQVNSYKNSICAPSIKERKRASGDIVKQLSTPADHSNVHRNEAQSASDKAIFPGASEEALRRISNMIPDSYFPFSHIPPISGKGVDPVENPGPSIASFQGNLGLPNFSLEDNAPLKHIKPIPDIFPSLSLGAHKDYIRSSVPELPDGSLLPNFMADITGTSKQKSFMSGLLPGLGLSPGQPIHSAMPDNHKKVLDNIMMRAQYASNKFLKKRSKLDYWSEDELDALWIGVRRHGRGNWDAMLRDPKLKFLNNRTSEELALRWILEEQKIIDEPMSTSTRRSNSAAFPGISDAMMSRALNESNFSKMRMEQPKLQSHLTDIQLGSSDILSTFPHVDAASYINSGEGGPSQIPWQDFKHRSSYAGDFPAGAFDKLEKPDVGPIPPFMPNPFMTDSIGSLPINRKNNSSIPHSEIRSSSRENILSGVSDGQINLLHEMQRRRRVRSGKEPIEMNLNHIDHSNLQLDNTSDLGGLKPNKLPHWLQEAVRAPSSKPPERELPATVSAIAQSVCLLLGEQEPSIPPFLIPGTPLSRPKDPRINSKKKLRKAQQSNSHVEHSKIGSGEGDCVTTPAPPSIEASPALPVDCDDGEPSLNLKSASLSSSAGSKGLDELPPTFKEANQTVDGSEAVAAKSDAPEIGCQVPGSSPLHDKGSESSGSPVKDTPDAGIRLPGSDNSVMAFSALPLVDEAPGTSSRAADTPVPCDGNESKEDVPLDNAESTRKLEPNG

SEQ ID NO: 189233 - protein, 1355 aa, Zea Mays
MKERSSLCESAADGNWGLKYKRKRSKLTVSPSNENEATSPTSDSRMSHGSTKKKLKHDNNISPSAKKIRGHDGYFFECVECDLGGNLLCCDSCPRVYHLECLNPPLKRAPPGKWQCPRCRPKKVSLKLLGNADVDTSKREKSTRTYASTASDSPPSHTKVSFKTRNSTQDKTGLNEQGKESSGGTMNGGETSTKNNEVEKKKTLILHLKKRSTKELSENTKPSKSEFVELSEEKIVKHGSVLKLKKHPHRMDLSPSKSKTRRQSSQRESKRSGTKKIKYSMSDDDSVSSSEPSTSLDNSESPPKRKHSDGKAPSSSTKKGKKKVKFVEKKHSEEQGVVGDKMMTTQEDQQVDRILGCRLQMSQINPPSHASLEQFESANLQVDGMVLPHASAGIPNRPHDGTESSRNGTIEDICADESANHSGHNLEMRKDTDSKSHEKESHKREQVKKILSVCSGDETNIMKDDQVVRENVSASKKGEDETSDLPAEKDDTILPVTRACTMIRTNQDHTDESKQHGKIEQITNKDYNDAGYEFLIKWVGKSNIHNSWVSESEVKILAKRKLENYKAKYGMSLINICKEQWCQPQRVIGLRASVDEVEEVLIKWCGLPYDECTWERSDEPTLMKYSHLVTQFKNFECQALDKDVVKDYANARNRHELNVLVDQPKELQGGMLFPHQLEALNWLRKCWYKSKNVILADEMGLGKTVSACAFLSSLYCEFKINLPCLVLVPLSTMPNWMAEFSSWAPHLNVVEYHGSARSRSIIRQYEWHAGDASQIGKTKRSYKFNVLLTTYEMVLVDAAYLRSVSWEVLIVDEGHRLKNSSSKLFSLLNSFSFQHRVLLTGTPLQNNIGEMYNLLNFLQPTSFPSLSSFEEKFNDLTTAEKVEELKKLVAPHMLRRLKKDAMQNIPPKIERMVPVELTSIQAEYYRAMLTKNYQVLRNIGKGGAHQSLLNIVMQLRKVCNHPYLIPGTEPESGSPEFLHEMRIKASAKLTLLHLMLKILHKEGHRVLIFSQMTKLLDILEDYLTLEFGPKTFERVDGSVSVAERQAAIVRFNQDKTRFVFLLSTRSCGLGINLATADTVIIYDSDFNPHADIQAMNRAHRIGQSNRLLVYRLVVRASVEERILQLAKKKLMLDQLFVNKSESQKEVEDIIRWGTEELFGNSDSVDGKDNSEVPGPVADVEFKHRRKTGGLGDVYEDKCIGGSTKLVWDENAILKLLDRSNLPSSMAESTDGDLDNDMLGTVKSIDWNDELNDDPGTNEDTAPIDNDGSEQASESKQGATNRSEENEWDKLLRVRWEQYQIEEEACLGRGKRLRKAVSYRETFATLPNEALSEVFKMLMEAIALCLGRRFKGRCSI

SEQ ID NO: 189234 - protein, 1381 aa, Zea Mays
MKERSSLCESAADGNWGLKYKRKRSKLTVSPSNENEATSPTSDSRMSHGSTKKKLKHDNNISPSAKKIRGHDGYFFECVECDLGGNLLCCDSCPRVYHLECLNPPLKRAPPGKWQCPRCRPKKVSLKLLGNADVDTSKREKSTRTYASTASDSPPSHTKVSFKTRNSTQDKTGLNEQGKESSGGTMNGGETSTKNNEVEKKKTLILHLKKRSTKELSENTKPSKSEFVELSEEKIVKHGSVLKLKKHPHRMDLSPSKSKTRRQSSQRESKRSGTKKIKYSMSDDDSVSSSEPSTSLDNSESPPKRKHSDGKAPSSSTKKGKKKVKFVEKKHSEEQGVVGDKMMTTQEDQQVDRILGCRLQMSQINPPSHASLEQFESANLQVDGMVLPHASAGIPNRPHDGTESSRNGTIEDICADESANHSGHNLEMRKDTDSKSHEKESHKREQVKKILSVCSGDETNIMKDDQVVRENVSASKKGEDETSDLPAEKDDTILPVTRACTMIRTNQDHTDESKQHGKIEQITNKDYNDAGYEFLIKWVGKSNIHNSWVSESEVKILAKRKLENYKAKYGMSLINICKEQWCQPQRVIGLRASVDEVEEVLIKWCGLPYDECTWERSDEPTLMKYSHLVTQFKNFECQALDKDVVKDYANARNRHELNVLVDQPKELQGGMLFPHQLEALNWLRKCWYKSKNVILADEMGLGKTVSACAFLSSLYCEFKINLPCLVLVPLSTMPNWMAEFSSWAPHLNVVEYHGSARSRSIIRQYEWHAGDASQIGKTKRSYKFNVLLTTYEMVLVDAAYLRSVSWEVLIVDEGHRLKNSSSKLFSLLNSFSFQHRVLLTGTPLQNNIGEMYNLLNFLQPTSFPSLSSFEEKFNDLTTAEKVEELKKLVAPHMLRRLKKDAMQNIPPKIERMVPVELTSIQAEYYRAMLTKNYQVLRNIGKGGAHQSLLNIVMQLRKVCNHPYLIPGTEPESGSPEFLHEMRIKASAKLTLLHLMLKILHKEGHRVLIFSQMTKLLDILEDYLTLEFGPKTFERVDGSVSVAERQAAIVRFNQDKTRFVFLLSTRSCGLGINLATADTVIIYDSDFNPHADIQAMNRAHRIGQSNRLLVYRLVVRASVEERILQLAKKKLMLDQLFVNKSESQKEVEDIIRWGTEELFGNSDSVDGKDNSEVPGPVADVEFKHRRKTGGLGDVYEDKCIGGSTKLVWDENAILKLLDRSNLPSSMAESTDGDLDNDMLGTVKSIDWNDELNDDPGTNEDTAPIDNDGSEQASESKQGATNRSEENEWDKLLRVRWEQYQIEEEACLGRGKRLRKAVSYRETFATLPNEALSEDSDEGDEPKREYTAAGLALKEKYFELDKRKGLLSDTLSRTMLMIILKSS

SEQ ID NO: 189235 - protein, 1949 aa, Zea Mays
MKERSSLCESAADGNWGLKYKRKRSKLTVSPSNENEATSPTSDSRMSHGSTKKKLKHDNNISPSAKKIRGHDGEQGVVGDKMMTTQEDQQVDRILGCRLQMSQINPPSHASLEQFESANLQVDGMVLPHASAGIPNRPHDGTESSRNGTIEDICADESANHSGHNLEMRKDTDSKSHEKESHKREQVKKILSVCSGDETNIMKDDQVVRENVSASKKGEDETSDLPAEKDDTILPVTRACTMIRTNQDHTDESKQHGKIEQITNKDYNDAGYEFLIKWVGKSNIHNSWVSESEVKILAKRKLENYKAKYGMSLINICKEQWCQPQRVIGLRASVDEVEEVLIKWCGLPYDECTWERSDEPTLMKYSHLVTQFKNFECQALDKDVVKDYANARNRHELNVLVDQPKELQGGMLFPHQLEALNWLRKCWYKSKNVILADEMGLGKTVSACAFLSSLYCEFKINLPCLVLVPLSTMPNWMAEFSSWAPHLNVVEYHGSARSRSIIRQYEWHAGDASQIGKTKRSYKFNVLLTTYEMVLVDAAYLRSVSWEVLIVDEGHRLKNSSSKLFSLLNSFSFQHRVLLTGTPLQNNIGEMYNLLNFLQPTSFPSLSSFEEKFNDLTTAEKVEELKKLVAPHMLRRLKKDAMQNIPPKIERMVPVELTSIQAEYYRAMLTKNYQVLRNIGKGGAHQSLLNIVMQLRKVCNHPYLIPGTEPESGSPEFLHEMRIKASAKLTLLHLMLKILHKEGHRVLIFSQMTKLLDILEDYLTLEFGPKTFERVDGSVSVAERQAAIVRFNQDKTRFVFLLSTRSCGLGINLATADTVIIYDSDFNPHADIQAMNRAHRIGQSNRLLVYRLVVRASVEERILQLAKKKLMLDQLFVNKSESQKEVEDIIRWGTEELFGNSDSVDGKDNSEVPGPVADVEFKHRRKTGGLGDVYEDKCIGGSTKLVWDENAILKLLDRSNLPSSMAESTDGDLDNDMLGTVKSIDWNDELNDDPGTNEDTAPIDNDGSEQASESKQGATNRSEENEWDKLLRVRYSAILWEQYQIEEEACLGRGKRLRKAVSYRETFATLPNEALSEDSDEGDEPKREYTAAGLALKEKYGKLRARQKERIAQRHIIKNYADDNLEEFMTPYDSIANEPAENPLVIVEDLNSSQLSGAKRFSDSTGEMRQSSKKSKRYSEIPQDLYAKIPGNTASFKHHSKATDVFNPGTPNHLLPVLGLCAPNADQVNSYKNSICAPSIKERKRASGDIVKQLSTPADHSNVHRNEAQSASDKAIFPGASEEALRRISNMIPDSYFPFSHIPPISGKGVDPVENPGPSIASFQGNLGLPNFSLEDNAPLKHIKPIPDIFPSLSLGAHKDYIRSSVPELPDGSLLPNFMADITGTSKQKSFMSGLLPGLGLSPGQPIHSAMPDNHKKVLDNIMMRAQYASNKFLKKRSKLDYWSEDELDALWIGVRRHGRGNWDAMLRDPKLKFLNNRTSEELALRWILEEQKIIDEPMSTSTRRSNSAAFPGISDAMMSRALNESNFSKMRMEQPKLQSHLTDIQLGSSDILSTFPHVDAASYINSGEGGPSQIPWQDFKHRSSYAGDFPAGAFDKLEKPDVGPIPPFMPNPFMTDSIGSLPINRKNNSSIPHSEIRSSSRENILSGVSDGQINLLHEMQRRRRVRSGKEPIEMNLNHIDHSNLQLDNTSDLGGLKPNKLPHWLQEAVRAPSSKPPERELPATVSAIAQSVCLLLGEQEPSIPPFLIPGTPLSRPKDPRINSKKKLRKAQQSNSHVEHSKIGSGEGDCVTTPAPPSIEASPALPVDCDDGEPSLNLKSASLSSSAGSKGLDELPPTFKEANQTVDGSEAVAAKSDAPEIGCQVPGSSPLHDKGSESSGSPVKDTPDAGIRLPGSDNSVMAFSALPLVDEAPGTSSRAADTPVPCDGNESKEDVPLDNAESTRKLEPNG

SEQ ID NO: 189236 - protein, 2209 aa, Zea Mays
MKERSSLCESAADGNWGLKYKRKRSKLTVSPSNENEATSPTSDSRMSHGSTKKKLKHDNNISPSAKKIRGHDGYFFECVECDLGGNLLCCDSCPRVYHLECLNPPLKRAPPGKWQCPRCRPKKVSLKLLGNADVDTSKREKSTRTYASTASDSPPSHTKVSFKTRNSTQDKTGLNEQGKESSGGTMNGGETSTKNNEVEKKKTLILHLKKRSTKELSENTKPSKSEFVELSEEKIVKHGSVLKLKKHPHRMDLSPSKSKTRRQSSQRESKRSGTKKIKYSMSDDDSVSSSEPSTSLDNSESPPKRKHSDGKAPSSSTKKGKKKVKFVEKKHSEEQGVVGDKMMTTQEDQQVDRILGCRLQMSQINPPSHASLEQFESANLQVDGMVLPHASAGIPNRPHDGTESSRNGTIEDICADESANHSGHNLEMRKDTDSKSHEKESHKREQVKKILSVCSGDETNIMKDDQVVRENVSASKKGEDETSDLPAEKDDTILPVTRACTMIRTNQDHTDESKQHGKIEQITNKDYNDAGYEFLIKWVGKSNIHNSWVSESEVKILAKRKLENYKAKYGMSLINICKEQWCQPQRVIGLRASVDEVEEVLIKWCGLPYDECTWERSDEPTLMKYSHLVTQFKNFECQALDKDVVKDYANARNRHELNVLVDQPKELQGGMLFPHQLEALNWLRKCWYKSKNVILADEMGLGKTVSACAFLSSLYCEFKINLPCLVLVPLSTMPNWMAEFSSWAPHLNVVEYHGSARSRSIIRQYEWHAGDASQIGKTKRSYKFNVLLTTYEMVLVDAAYLRSVSWEVLIVDEGHRLKNSSSKLFSLLNSFSFQHRVLLTGTPLQNNIGEMYNLLNFLQPTSFPSLSSFEEKFNDLTTAEKVEELKKLVAPHMLRRLKKDAMQNIPPKIERMVPVELTSIQAEYYRAMLTKNYQVLRNIGKGGAHQSLLNIVMQLRKVCNHPYLIPGTEPESGSPEFLHEMRIKASAKLTLLHLMLKILHKEGHRVLIFSQMTKLLDILEDYLTLEFGPKTFERVDGSVSVAERQAAIVRFNQDKTRFVFLLSTRSCGLGINLATADTVIIYDSDFNPHADIQAMNRAHRIGQSNRLLVYRLVVRASVEERILQLAKKKLMLDQLFVNKSESQKEVEDIIRWGTEELFGNSDSVDGKDNSEVPGPVADVEFKHRRKTGGLGDVYEDKCIGGSTKLVWDENAILKLLDRSNLPSSMAESTDGDLDNDMLGTVKSIDWNDELNDDPGTNEDTAPIDNDGSEQASESKQGATNRSEENEWDKLLRVRYSAILWEQYQIEEEACLGRGKRLRKAVSYRETFATLPNEALSEDSDEGDEPKREYTAAGLALKEKYGKLRARQKERIAQRHIIKNYADDNLEEFMTPYDSIANEPAENPLVIVEDLNSSQLSGAKRFSDSTGEMRQSSKKSKRYSEIPQDLYAKIPGNTASFKHHSKATDVFNPGTPNHLLPVLGLCAPNADQVNSYKNSICAPSIKERKRASGDIVKQLSTPADHSNVHRNEAQSASDKAIFPGASEEALRRISNMIPDSYFPFSHIPPISGKGVDPVENPGPSIASFQGNLGLPNFSLEDNAPLKHIKPIPDIFPSLSLGAHKDYIRSSVPELPDGSLLPNFMADITGTSKQKSFMSGLLPGLGLSPGQPIHSAMPDNHKKVLDNIMMRAQYASNKFLKKRSKLDYWSEDELDALWIGVRRHGRGNWDAMLRDPKLKFLNNRTSEELALRWILEEQKIIDEPMSTSTRRSNSAAFPGISDAMMSRALNESNFSKMRMEQPKLQSHLTDIQLGSSDILSTFPHVDAASYINSGEGGPSQIPWQDFKHRSSYAGDFPAGAFDKLEKPDVGPIPPFMPNPFMTDSIGSLPINRKNNSSIPHSEIRSSSRENILSGVSDGQINLLHEMQRRRRVRSGKEPIEMNLNHIDHSNLQLDNTSDLGGLKPNKLPHWLQEAVRAPSSKPPERELPATVSAIAQSVCLLLGEQEPSIPPFLIPGTPLSRPKDPRINSKKKLRKAQQSNSHVEHSKIGSGEGDCVTTPAPPSIEASPALPVDCDDGEPSLNLKSASLSSSAGSKGLDELPPTFKEANQTVDGSEAVAAKSDAPEIGCQVPGSSPLHDKGSESSGSPVKDTPDAGIRLPGSDNSVMAFSALPLVDEAPGTSSRAADTPVPCDGNESKEDVPLDNAESTRKLEPNG

SEQ ID NO: 189237 - protein, 106 aa, Zea Mays
MQIFVKTLTGKTITLEVESSDTVANDKAKIQDKEGIPPDQQRLIFAGKQLEDDRTLADYSIQKDSTLHLVLRLRGGGRGGYPLMSVPWDLINLARKHNEDKMICRN

SEQ ID NO: 189238 - protein, 194 aa, Zea Mays
MAPVSALAKYKLVFLGDQSVGKTSIITRFMYDKFDNTYQATIGIDFLSKTMYLEDRTVRLQLWDTAGQERFRSLIPSYIRDSSVAVIVFDVASRQSFLNTSKWIDEVRTERGSDVIIVLVGNKTDLVDKRQVSIEEGEGKAKDLGVMFIETSAKAGFNIKTLSSAKQEDMVDVNLRSGNANSSQSQAQAGGCSC

SEQ ID NO: 189239 - protein, 83 aa, Zea Mays
MSNRQHTNTFSLSNRQHTLTLISHVSTLSMANMGLIKKPIAMSRFMQPSLCGPTVGAAHCCRFVRSHLLPGNCFRRLHHRPTF

SEQ ID NO: 189240 - protein, 222 aa, Zea Mays
MSHCLASGDIMISCLGDKEGNAAGNGFLLLDSEFNVKGRGSNRLFPISKERTHLYENYAWGLFWSWIQCCSLFYTTGAELMCLTASGVHVISCLDNYIMEVIDASLPLQDQTGANNPILCLRSIHWKNINQDYGVVEVSFSGRGGSDPDAYAVVLKRKLDLYYVVVAKFAAGTSAGRPRTFAKHDEKDVYSRRGHQKKRIIRFYETSKMLQSLCAREMQGHL

SEQ ID NO: 189241 - protein, 192 aa, Zea Mays
MVDVETTQEAAMAEILVRCLRCAEGGEECGKNVRVATKCNDMESAKLWPGEFYNYSGCGNNFNCNHPVIRGFIEDCLRTAPLPDPAFVVVVESEDIAENTGLGFPHMSHCLASGDIMISCLGDKEGNAAGNGFLLLDSEFNVKGRGSNRLFPISKERTHLYENYAWGLFWSWIQCCSLFYTTGAELMCLTAR

SEQ ID NO: 189242 - protein, 271 aa, Zea Mays
MTRGCRTAPLPDPAFVVVVESEDIAENTGLGFPHMSHCLASGDIMISCLGDKEGNAAGNGFLLLDSEFNVKGRGSNRLFPISKERTHLYENYAWGLFWSWIQCCSLFYTTGAELMCLTASGVHVISCLDNYIMEVIDASLPLQDQTGANNPILCLRSIHWKNINQDYGVVEVSFSGRGGSDPDAYAVVLKRKLDLYYVVVAKFGVHDEKDVYSRRGHQKKRIIRFYETSKQLPNGIKNREMETLEKHHVVKSQSHVRCNGLAFDKLECKGG

SEQ ID NO: 189243 - protein, 1228 aa, Zea Mays
MATQSHSSSAAAIDMYETASQPDASVAGDAYTFLEFNTQGDEFDYPDFPELSQPPPRSTPLTSSIPGAGASSSSWPAPPPPPSDAASAEPDLTSLDVPTPPASSSSPSPRSASKARSLAAADGLASGVAALSFEDPVGAGAGEDGYDYGKGDFVEHACRYCGIHNPACVARCNVPSCRKWFCNSRGNTSGSHIVNHLVRAKHKEVCLHKDSPLGETILECYNCGCRNVFLLGFISAKLENVVVLLCREPCLSVNALKDMNWDLSQWCPLIDDRCFLSWLVKVPSEQEQLRARQISAQQINKVEELWKTNPDASLEDLEKPGVDDEPQPVVLKYEDAYQYQNVFAPLIKLEADYDKMTKESQSKDNVTVRWDIGLNKKRVAYFVFPKEDNELRLVPGDELRLRYPGDSSHPTWQSVGHVIKLTAQEEVALELRASQGVPTELNVGFSVDFVWKSTSFDRMQGAMKTFAVDETSVSGYIYHHLLGHEVEHQIIRNTLPRRFGAPGLPELNASQVLAVKSVLQKPVSLIQGPPGTGKTVTSGAIVYHMAKQGQGQVLVCAPSNVAVDQLAEKISSTGLKVVRLCAKSREAVSSPVEHLTLHYQVRHLDTSEKSEFHKLQQLKDEQGELSSSDEKKYKALKRATEREILQSADVICCTCVGAGDPRLSNFRFRQVVLVGDHCQLGPVIMCKKAARAGLAQSLFERLVILGVKPFRLQVQYRMHPCLSEFPSNCFYEGTLQNGVTVNERHSSGIDFPWPVPNRPMFFYVQMGQEEISASGTSYLNRTEAANVEKIVTTFLRSGVVPSQIGVITPYEGQRAYIVNYMSRNGSLRQQLYKEIEVASVDSFQGREKDYIILSCVRSNEHQGIGFLNDPRRLNVALTRARYGIVILGNPKVLSKQPLWNSLLTHYKEHECLVEGPLNNLKQSMVQFQKPKKIYNDRRLLLGGAQGMHGANFGAGASSQAADKRSGRGKAGQSFVSYGPPNGVHKPGVHPAGYAVPRMPFPPFPGAPHSQPYAIPTRGLHGPIGAVPPVHQPGSRSFGAPRSNTGGPIGGHLAHQQNSQQAMGGIGSNFNYAGMENSSSQPSGVAQMSQSGLMTQDFIVDDFKSQGSHVPYNIAEFSTQASQGGYGVEFTQAPQSGYSGNYMNQNTHPGYSHIGTTNDIVSQDHMAHGSHGMFTQVGYNDPSQDESSQIHYGMAAAGPLHSQSMMNPLYSQSYAHYNTQPHSLQPPPQ

SEQ ID NO: 189244 - protein, 743 aa, Zea Mays
MATQSHSSSAAAIDMYETASQPDASVAGDAYTFLEFNTQGDEFDYPDFPELSQPPPRSTPLTSSIPGAGASSSSWPAPPPPPSDAASAEPDLTSLDVPTPPASSSSPSPRSASKARSLAAADGLASGVAALSFEDPVGAGAGEDGYDYGKGDFVEHACRYCGIHNPACVARCNVPSCRKWFCNSRGNTSGSHIVNHLVRAKHKEVCLHKDSPLGETILECYNCGCRNVFLLGFISAKLENVVVLLCREPCLSVNALKDMNWDLSQWCPLIDDRCFLSWLVKVPSEQEQLRARQISAQQINKVEELWKTNPDASLEDLEKPGVDDEPQPVVLKYEDAYQYQNVFAPLIKLEADYDKMTKESQSKDNVTVRWDIGLNKKRVAYFVFPKEDNELRLVPGDELRLRYPGDSSHPTWQSVGHVIKLTAQEEVALELRASQGVPTELNVGFSVDFVWKSTSFDRMQGAMKTFAVDETSVSGYIYHHLLGHEVEHQIIRNTLPRRFGAPGLPELNASQVLAVKSVLQKPVSLIQGPPGTGKTVTSGAIVYHMAKQGQGQVLVCAPSNVAVDQLAEKISSTGLKVVRLCAKSREAVSSPVEHLTLHYQVRHLDTSEKSEFHKLQQLKDEQGELSSSDEKKYKALKRATEREILQSADVICCTCVGAGDPRLSNFRFRQVLIDESTQATEPECLIPLVLGVKQVVLVGDHCQLGPVIMCKKAARAGLAQSLFERLVILGVKPFRLQAHCKME

SEQ ID NO: 189245 - protein, 1182 aa, Zea Mays
MATQSHSSSAAAIDMYETASQPDASVAGDAYTFLEFNTQGDEFDYPDFPELSQPPPRSTPLTSSIPGAGASSSSWPAPPPPPSDAASAEPDLTSLDVPTPPASSSSPSPRSASKARSLAAADGLASGVAALSFEDPVGAGAGEDGYDYGKGDFVEHACRYCGIHNPACVARCNVPSCRKWFCNSRGNTSGSHIVNHLVRAKHKEVCLHKDSPLGETILECYNCGCRNVFLLGFISAKLENVVVLLCREPCLSVNALKDMNWDLSQWCPLIDDRCFLSWLVKVPSEQEQLRARQISAQQINKVEELWKTNPDASLEDLEKPGVDDEPQPVVLKYEDAYQYQNVFAPLIKLEADYDKMTKESQSKDNVTVRWDIGLNKKRVAYFVFPKEDNELRLVPGDELRLRYPGDSSHPTWQSVGHVIKLTAQEEVALELRASQGVPTELNVGFSVDFVWKSTSFDRMQGAMKTFAVDETSVSGYIYHHLLGHEVEHQIIRNTLPRRFGAPGLPELNASQVLAVKSVLQKPVSLIQGPPGTGKTVTSGAIVYHMAKQGQGQVLVCAPSNVAVDQLAEKISSTGLKVVRLCAKSREAVSSPVEHLTLHYQVRHLDTSEKSEFHKLQQLKDEQGELSSSDEKKYKALKRATEREILQSADVICCTCVGAGDPRLSNFRFRQVLIDESTQATEPECLIPLVLGVKQVVLVGDHCQLGPVIMCKKAARAGLAQSLFERLVILGVKPFRLQVQYRMHPCLSEFPSNCFYEGTLQNGVTVNERHSSGIDFPWPVPNRPMFFYVQMGQEEISASGTSYLNRTEAANVEKIVTTFLRSGVVPSQIGVITPYEGQRAYIVNYMSRNGSLRQQLYKEIEVASVDSFQGREKDYIILSCVRSNEHQGIGFLNDPRRLNVALTRARYGIVILGNPKVLSKQPLWNSLLTHYKEHECLVEGPLNNLKQSMVQFQKPKKIYNDRRLLLGGAQGMHGANFGAGASSQAADKRSGRGKAGQSFVSYGPPNGVHKPGVHPAGYAVPRMPFPPFPGAPHSQPYAIPTRGLHGPIGAVPPVHQPGSRSFGAPRSNTGGPIGGHLAHQQNSQQAMGGIGSNFNYAGMENSSSQPSGVAQMSQSGLMTQMPVQGLSQTFRDGFSIGGMSQMILRAKDHMCHTTLQNFLPRLLKVVMVLSLLKRPNLDTLGII

SEQ ID NO: 189246 - protein, 738 aa, Zea Mays
MTKESQSKDNVTVRWDIGLNKKRVAYFVFPKEDNELRLVPGDELRLRYPGDSSHPTWQSVGHVIKLTAQEEVALELRASQGVPTELNVGFSVDFVWKSTSFDRMQGAMKTFAVDETSVSGYIYHHLLGHEVEHQIIRNTLPRRFGAPGLPELNASQVLAVKSVLQKPVSLIQGPPGTGKTVTSGAIVYHMAKQGQGQVLVCAPSNVAVDQLAEKISSTGLKVVRLCAKSREAVSSPVEHLTLHYQVRHLDTSEKSEFHKLQQLKDEQGELSSSDEKKYKALKRATEREILQSADVICCTCVGAGDPRLSNFRFRQVLIDESTQATEPECLIPLVLGVKQVVLVGDHCQLGPVIMCKKAARAGLAQSLFERLVILGVKPFRLQVQYRMHPCLSEFPSNCFYEGTLQNGVTVNERHSSGIDFPWPVPNRPMFFYVQMGQEEISASGTSYLNRTEAANVEKIVTTFLRSGVVPSQIGVITPYEGQRAYIVNYMSRNGSLRQQLYKEIEVASVDSFQGREKDYIILSCVRSNEHQGIGFLNDPRRLNVALTRARYGIVILGNPKVLSKQPLWNSLLTHYKEHECLVEGPLNNLKQSMVQFQKPKKACMELTSGLGPQAKQQIREVAGGKGNHLFLMALQMGCTSLVCTQQVMLYLVCLFLHFLGLHILNHMQFRLGVCMGPLELFHRCINLEVEVLGHLVQILVGLLVATLLINRIPSKLWVALGQILTTLAWRIRVVSLLV

SEQ ID NO: 189247 - protein, 469 aa, Zea Mays
MFFYVQMGQEEISASGTSYLNRTEAANVEKIVTTFLRSGVVPSQIGVITPYEGQRAYIVNYMSRNGSLRQQLYKEIEVASVDSFQGREKDYIILSCVRSNEHQGIGFLNDPRRLNVALTRARYGIVILGNPKVLSKQPLWNSLLTHYKEHECLVEGPLNNLKQSMVQFQKPKKIYNDRRLLLGGAQGMHGANFGAGASSQAADKRSGRGKAGQSFVSYGPPNGVHKPGVHPAGYAVPRMPFPPFPGAPHSQPYAIPTRGLHGPIGAVPPVHQPGSRSFGAPRSNTGGPIGGHLAHQQNSQQAMGGIGSNFNYAGMENSSSQPSGVAQMSQSGLMTQDFIVDDFKSQGSHVPYNIAEFSTQASQGGYGVEFTQAPQSGYSGNYMNQNTHPGYSHIGTTNDIVSQDHMAHGSHGMFTQVGYNDPSQDESSQIHYGMAAAGPLHSQSMMNPLYSQSYAHYNTQPHSLQPPPQ

SEQ ID NO: 189248 - protein, 957 aa, Zea Mays
MATQSHSSSAAAIDMYETASQPDASVAGDAYTFLEFNTQGDEFDYPDFPELSQPPPRSTPLTSSIPGAGASSSSWPAPPPPPSDAASAEPDLTSLDVPTPPASSSSPSPRSASKARSLAAADGLASGVAALSFEDPVGAGAGEDGYDYGKGDFVEHACRYCGIHNPACVARCNVPSCRKWFCNSRGNTSGSHIVNHLVRAKHKEVCLHKDSPLGETILECYNCGCRNVFLLGFISAKLENVVVLLCREPCLSVNALKDMNWDLSQWCPLIDDRCFLSWLVKVPSEQEQLRARQISAQQINKVEELWKTNPDASLEDLEKPGVDDEPQPVVLKYEDAYQYQNVFAPLIKLEADYDKMTKESQSKDNVTVRWDIGLNKKRVAYFVFPKEDNELRLVPGDELRLRYPGDSSHPTWQSVGHVIKLTAQEEVALELRASQGVPTELNVGFSVDFVWKSTSFDRMQGAMKTFAVDETSVSGYIYHHLLGHEVEHQIIRNTLPRRFGAPGLPELNASQVLAVKSVLQKPVSLIQGPPGTGKTVTSGAIVYHMAKQGQGQVLVCAPSNVAVDQLAEKISSTGLKVVRLCAKSREAVSSPVEHLTLHYQVRHLDTSEKSEFHKLQQLKDEQGELSSSDEKKYKALKRATEREILQSADVICCTCVGAGDPRLSNFRFRQVLIDESTQATEPECLIPLVLGVKQVVLVGDHCQLGPVIMCKKAARAGLAQSLFERLVILGVKPFRLQVQYRMHPCLSEFPSNCFYEGTLQNGVTVNERHSSGIDFPWPVPNRPMFFYVQMGQEEISASGTSYLNRTEAANVEKIVTTFLRSGVVPSQIGVITPYEGQRAYIVNYMSRNGSLRQQLYKEIEVASVDSFQGREKDYIILSCVRSNEHQGIGFLNDPRRLNVALTRARYGIVILGNPKVLSKQPLWNSLLTHYKEHECLVEGPLNNLKQSMVQFQKPKKI

SEQ ID NO: 189249 - protein, 112 aa, Zea Mays
MVIVPATTGQMGVLPGHVATIAELKPGVLSVHEGNDVTKYFVSSGFAFVHANSIADIVAVEAVPVDQIDPAFVQKGLAEFTAKLGSASTDLEKAEAQIGVDVHSALNAALTG

SEQ ID NO: 189250 - protein, 509 aa, Zea Mays
MPFLSTPSFDLSAGAEPTLGPRSAAPPPPPTAAAHHQPPVSEAAARRLREAEERLREAIEELHRHQGGGVKGDGDEQREGERGCGHDGESCAAHAAGNLCQSFLLSYGVRVGIGILLRAFKLVRRRSYGSLLDLKQLVSEKDLIVREEACRVGLLFGGFTGSYHALRCFLRRFRKKETPFNAILAGSVAGLAILALDDSSRRRTLSLYLLARLAQCAYNSAKSKNKFHFWGSHWRHGDALLFSLACAQVMYAFVMRPESLPKSYQEFILKTGPVAEPVYKVVKECCRGGPVDLTALSAHLSNKRNPDLINLTTNPSIIPCSVIHPDRASCLAQNVNVVSSTFKKTFPLYFSLTFVPFVVLRLQKFLESPTTTCWRALVGAVRSTTFLSAFVTVFQAAICLHRKVANKDHKLVYWFAGLMSGLSILLEKKARRAELALYVLPRAGDSLWNHVFSGVRARHNGSIPQRAHQALPGKQDQQSKPPASQSECLLLVPSDAECSGSIKNPTRGG

SEQ ID NO: 189251 - protein, 385 aa, Zea Mays
MHFDVSLGDLGKRRHHSMRSVAGLAILALDDSSRRRTLSLYLLARLAQCAYNSAKSKNKFHFWGSHWRHGDALLFSLACAQVMYAFVMRPESLPKSYQEFILKTGPVAEPVYKVVKECCRGGPVDLTALSAHLSNKRNPDLINLTTNPSIIPCSVIHPDRASCLAQNVNVVSSTFKKTFPLYFSLTFVPFVVLRLQKFLESPTTTCWRALVGAVRSTTFLSAFVTVFQAAICLHRKVANKDHKLVYWFAGLMSGLSILLEKKARRAELALYVLPRAGDSLWYILINRHLLPNIKNAEVALFCMCMGGIMYFLEYEPDTMAPFLRGLIRRFLASKISNPSPPPPNRNASYSYLQTLNALDQSRTQPGVDNGLTTSEKYNLESIPGL

SEQ ID NO: 189252 - protein, 386 aa, Zea Mays
MHFDVSLGDLGKRRHHSMPGSVAGLAILALDDSSRRRTLSLYLLARLAQCAYNSAKSKNKFHFWGSHWRHGDALLFSLACAQVMYAFVMRPESLPKSYQEFILKTGPVAEPVYKVVKECCRGGPVDLTALSAHLSNKRNPDLINLTTNPSIIPCSVIHPDRASCLAQNVNVVSSTFKKTFPLYFSLTFVPFVVLRLQKFLESPTTTCWRALVGAVRSTTFLSAFVTVFQAAICLHRKVANKDHKLVYWFAGLMSGLSILLEKKARRAELALYVLPRAGDSLWYILINRHLLPNIKNAEVALFCMCMGGIMYFLEYEPDTMAPFLRGLIRRFLASKISNPSPPPPNRNASYSYLQTLNALDQSRTQPGVDNGLTTSEKYNLESIPGL

SEQ ID NO: 189253 - protein, 213 aa, Zea Mays
MAEAIVGPLVGKLQEMAVSEAKALVAVNDDIRGLRDRLMWMQAFLRHADPRRRDTSDELIRVWLKQTRDVAFDAEDAIDDYSLKVDLSRYPNWSQSIVCFFSGFTTQVSIRHNLSRKIAEINLRLEDIINNKEKYKIEAAPNDFPLVTWKPSTDISTVAKSLIEKATQTATRQFGSRMYLSMRRAGRSPRLSSSLCILLPPSLAPSSWPSQIE

SEQ ID NO: 189254 - protein, 68 aa, Zea Mays
MLKDVFVTRCSLDSVFCLEKYNPLCSYLCIHIMYTLALTGLPFFFVHSHSIYAVLNLKFITPHRLILK

SEQ ID NO: 189255 - protein, 381 aa, Zea Mays
MPSTTMPLLPNLLQCWVTPLSGLLRCCGEHGSPQESTNSYIKEMLQVSKFLRVINLQGIEIGESLPTTIGNVAHLQYLGVTACSLKYIPSTIENLKNLQTLDVRDTFVYKLPEAFWSITTLRHVFGEGLFLPKQVGDLKHLQTLESIDPDKDNGWDSSTFEKMAHLQSLHVWDSKENGVNAEALSAVIDKANFLEHLDTLTLDVHDIPLSVFTSSSLRRLRTLNLDGKLDMLVLQSKEKESKFHFPNLSFLSLANTEVSQNFINKLGKLPSLTTLILDVKSYKDDQDQLAFQAGGFTSLTKLILSDLEIVKLEIKKYALPELTDLEVELYYDEIEIEVYGEHEFVKKIEQVDEYLYGRITQVPVAPKKIGQLPSMKQRVAS

SEQ ID NO: 189256 - protein, 64 aa, Zea Mays
MEYMELRGFSLPASCSFLIKLSYANSSNVFVEPRDYHRICQQICCGHKLCCEHNIRSCVVRQVY

SEQ ID NO: 189257 - protein, 122 aa, Zea Mays
MSQGLLLISGTPDTTRAADQASTRNASSRLDAVAAPGLASRRVRSNSVDSIQADHAPGQPIHLCSKAQGPRGCWRMEGVCGIDVVCGRLVRFMHNIIISRLFCMLSPSHGSMIIHQNLEVAY

SEQ ID NO: 189258 - protein, 61 aa, Zea Mays
MGASATHGVRPRRACSAAGSRTRWPTGHDARVRAAATAAGKASVGAVALVACVGHSSSVEQ

SEQ ID NO: 189259 - protein, 474 aa, Zea Mays
MDDFLEMEKLASASKGDAVEDASGQVLRLEEKVKKLAAEKAEREKALHEAQRELRTSRQRVMVAEERSAELQRQLNLANGEKHAMGAEVKAAEAKRGELEGLLELARAEIAGLLDKGRILEERLESEKALTLELAAKYQDMEALRAEKRELSAQLETSRSEAKKLGDKIALMERKLEVEKALSIRLATKCHGIDALEAKKKGVELELETAREEIASLQNKASSLELRRVEEEKASSAALALRCQELDDLRSQLESSNSRIVELNEKVKTLEDVVEEQRPVTVELESQLRSRRAEISSLKEDISLLQKKLESQKNLSSAYISALGASETEKKELASRFELGEKEAEELRGKMSLLEEQIRKEKARSSEFAVKCQKMEEQISCRSLLGHQPVKSSAAIKDLQLRKETELAKAAEKLADCQKTIASLSSQLKSLADFDEFPPETETSGADSDDAWDSDLKLLQPASYPTQIGCLAVT

SEQ ID NO: 189260 - protein, 771 aa, Zea Mays
MDNEDDTAKSSPNSTQSPEVTSKELEDGDNVKVKVLSERLSSVVLDIRAKDDLVKQHSKVAEEAVLGWEKAETEIASLKAQLNAAAAKNSALEDRLVHLDGALKECVRQLRRAKDEQDQTVQGALAQQARQWESHKADLELRVVELTARLEAKSERSVAAADCDTGSRLAALEKENSALRTQLLAKTEELELRTIEKELNRRAAETASKQQLEGIKKVAKLQVECRRLQAAAQRRPSVNVELRRSPSSACAESVTDCQSDCSDSWASVLVAELDQFRIDRSGASSRAASLATADIGVMDDFLEMEKLASASKGDAVEDASGQVLRLEEKVKKLAAEKAEREKALHEAQRELRTSRQRVMVAEERSAELQRQLNLANGEKHAMGAEVKAAEAKRGELEGLLELARAEIAGLLDKGRILEERLESEKALTLELAAKYQDMEALRAEKRELSAQLETSRSEAKKLGDKIALMERKLEVEKALSIRLATKCHGIDALEAKKKGVELELETAREEIASLQNKASSLELRRVEEEKASSAALALRCQELDDLRSQLESSNSRIVELNEKVKTLEDVVEEQRPVTVELESQLRSRRAEISSLKEDISLLQKKLESQKNLSSAYISALGASETEKKELASRFELGEKEAEELRGKMSLLEEQIRKEKARSSEFAVKCQKMEEQISCRSLLGHQPVKSSAAIKDLQLRKETELAKAAEKLADCQKTIASLSSQLKSLADFDEFPPETETSGADSDDAWDSDLKLLQPASYPTQIGCLAVT

SEQ ID NO: 189261 - protein, 174 aa, Zea Mays
MNPICQTMYLLFSYEPILGIPAFQKNLNPVTTPDQKPHQARFTQFIDGMTSPARVTNGDGSGGGRRGARLLEAPNRHAGRDGGGPGAARLPRPVRARRTSSRSTSVVSPSCTSPGSASPSVVPMRSFSKSSSWSGCSRCRISVRRRRPRSREAPPLASSQPSPSSPDPVPLRSA

SEQ ID NO: 189262 - protein, 90 aa, Zea Mays
MHTNSLLMMQLCTREAMMRNLCIREKKSLLMFYLLFPALAYAFSSSQAAFMSEHCHCSLPFHLDNLVKTPLTRNWNDMFKKGFDGILIVC

SEQ ID NO: 189263 - protein, 196 aa, Zea Mays
MDPWLLVYERSLKMEAELRAVHEMRADLAQVRMDIQNLGAERQELMGQVQGLTQDLARSAEDLQKVSALKSEIQEIKHETQHLRSCIELEKKGYAESYEQGQEMQKNLISVASEVEKLRAEVANAEKRSRAIVSAGNQGYNGSYGNPKANYAANPYNSGYGMNQATAATDSGSQYGTGATHGSWGAYDLQRASGRR

SEQ ID NO: 189264 - protein, 325 aa, Zea Mays
MFIYVVITKCNYNSLCQGGRKYQIKGSTGTGAFAKVYKATVDSNAEEMVALKIQNPSFTLEFYMYCQLDLRISDVERPSFGYAHEMHIFSDVSVLVCDYLPYGTLLDVINSHLVVGRYMDEVLCMYYTIEMLNMLETLHSVGIIHGDFKPDNILVCYPSGEITEDNFRSEKRVERNQGLCLVDWGRGIDLALFPSCTEFHGDCGTSGFRCIEMQEHRNWTYQVDTYGLCVVVHMMLHGSGMNVKKVPRIGGGYEWQPKQPFKRYWNVDLWQKLFSTLLNPPSNDSDVAALQSLRASFRQYMCSNRQLVGKLNQLLAKQKASLCSS

SEQ ID NO: 189265 - protein, 338 aa, Zea Mays
MFQEHALLYDSYAQYLIAHGKLVEADKVYGIGISRKAEPLDNLKKMHLTFLKHLENILEEADAEEQCKSSNIQKNEPSVIDPWSPSTRNTLLEKINGGLRKFSGYYKSNKVYCGKVPLTSSLNVLRNKGIKLGGRKYQIKGSTGTGAFAKVYKATVDSNAEEMVALKIQNPSFTLEFYMYCQLDLRISDVERPSFGYAHEMHIFSDVSVLVCDYLPYGTLLDVINSHLVVGRYMDEVLCMYYTIEMLNMLETLHSVGIIHGDFKPDNILVCYPSGEITEDNFRSEKRVERNQGLCLVDWGRGIDLALFPSCTEFHGDCGTSGFRCIEMQEHRNWTYQA

SEQ ID NO: 189266 - protein, 171 aa, Zea Mays
MELSCGEITEDNFRSEKRVERNQGLCLVDWGRGIDLALFPSCTEFHGDCGTSGFRCIEMQEHRNWTYQVDTYGLCVVVHMMLHGSGMNVKKVPRIGGGYEWQPKQPFKRYWNVDLWQKLFSTLLNPPSNDSDVAALQSLRASFRQYMCSNRQLVGKLNQLLAKQKASLCSS

SEQ ID NO: 189267 - protein, 648 aa, Zea Mays
MQNGDIINIDVNVFQNGYHGGTFRTFACGQDQLHPSSTKRQARTLPLPRQRHAAEISNLGGGREGDSWRKRSSAHQKKQSWTKEAVPEAGTSRSRRSRAHYQIPMGSRSGGGSVSGSCLLLFPFLLLLHLISLRSGPSAVLVSAAGSGEPYVGVTIGTQVTNLLSPSDLASFLRAQRITRVRLYDADPRLLSALAASGVRAIVGVPNDELLALGSSPATAASWVSRRVVPFAGVNSSTPNVVSAIAVGDEVPTALPSALPVLLPAIRSLAAALAAANLSSIPVSTPLPFSVVVDPFPPSQAFFNQSLDKSFVAPLLAHLANTSAPLMLNLYPYYSLMQSKGVIPLDNALFRPLPPSMEMVDPNTLLRYTNVFDAMLDAVRVAVRNLNATGGAGVPILVTETGWPSYGDRRAEPYAGRDNADAYNSNLIKHVLEEKAGTPMAPGAGAQSSAYIYELFNEDLRAGPVSEANWGLFYGNGTPVYLLHVSGADGFLGNDTTDRTFCVAADDADQKAVQAAMDWACGPGRADCTAIQPGQACYQPDDVRSHASFAFDAYYQSQGRAAGSCYFQGAGMVTTVDPSHDSCLFPGSKLLNNATGSGNTNTSSTPTSDAEGSAIWRLRTGRDKGLLLFLRLVLSIAVAIVVDSNFWT

SEQ ID NO: 189268 - protein, 647 aa, Zea Mays
MQNGDIINIDVNVFQNGYHGGTFRTFACGQDQLHPSSTKRQARTLPLPRQRHAAEISNLGGGREGDSWRKRSSAHQKKQSWTKEAVPEAGTSRSRRSRAHYQIPMGSRSGGGSVSGSCLLLFPFLLLLHLISLRCPSAVLVSAAGSGEPYVGVTIGTQVTNLLSPSDLASFLRAQRITRVRLYDADPRLLSALAASGVRAIVGVPNDELLALGSSPATAASWVSRRVVPFAGVNSSTPNVVSAIAVGDEVPTALPSALPVLLPAIRSLAAALAAANLSSIPVSTPLPFSVVVDPFPPSQAFFNQSLDKSFVAPLLAHLANTSAPLMLNLYPYYSLMQSKGVIPLDNALFRPLPPSMEMVDPNTLLRYTNVFDAMLDAVRVAVRNLNATGGAGVPILVTETGWPSYGDRRAEPYAGRDNADAYNSNLIKHVLEEKAGTPMAPGAGAQSSAYIYELFNEDLRAGPVSEANWGLFYGNGTPVYLLHVSGADGFLGNDTTDRTFCVAADDADQKAVQAAMDWACGPGRADCTAIQPGQACYQPDDVRSHASFAFDAYYQSQGRAAGSCYFQGAGMVTTVDPSHDSCLFPGSKLLNNATGSGNTNTSSTPTSDAEGSAIWRLRTGRDKGLLLFLRLVLSIAVAIVVDSNFWT

SEQ ID NO: 189269 - protein, 76 aa, Zea Mays
MLLCCIGHDSCLFPGSKLLNNATGSGNTNTSSTPTSDAEGSAIWRLRTGRDKGLLLFLRLVLSIAVAIVVDSNFWT

SEQ ID NO: 189270 - protein, 86 aa, Zea Mays
MLVANWRKCWEHAALSGHDSCLFPGSKLLNNATGSGNTNTSSTPTSDAEGSAIWRLRTGRDKGLLLFLRLVLSIAVAIVVDSNFWT

SEQ ID NO: 189271 - protein, 340 aa, Zea Mays
MYARDNTGDYVLRLGADQSSENLTLLETGEPIYSPTLQEGPIMTAELIKETEELVLRTGSLGAGCSQLLSDMQAFKAANPGCVLEDFVRWHSPPDWSEDCAANSTTVGEGSSRRGRLSDRMQTKEGNLWKELWEAAKPIPAVEQTPIYDEDLAVESIFDALEVIEPSKLFEQLLGVILSVCFVAAESVLAADSNLSKLFYDCKDYIIGVYHNDMSKDELDEMYKVYETMEAIVTHPEEALQIMEQPDEKSVDNKNRFTLKLNFMAKDRPPLWKRTTKDDKISQKVEKNTSEEKNTKIFSNLFDKKVSIFSKKNVRSSEVPPASTSSSSPGPFDESEWTIL

SEQ ID NO: 189272 - protein, 427 aa, Zea Mays
MPPPPPPHHSPAIQRPSTTGSDVPLNFHRCHYQIPFFKIKIQGSLLPVPRAPAPLPPHVPTSCAAPGHCQVGHTMQPPQSLVSRARTAIHSAAARVLTDIKADLRDAEGSGGRSRAPSPRTSLDREAAEASATGREPDVKPPSPRDEVLEISPPENEDSSSIPTESTCSTKLTFPPASIVKQLVSAIENGKSFKSMSDMRYTGEQLLKDKGGLSLSVVKSLVRRDKEERSSSDFFGDEETQSLMYSLFKLEEQFSFEASQCFPELVHSRSVSKDLHGAPPGSFIHHLAVVIGSISSVHKMAFFWQSVVLELRKLWSDWQPVPRMPLEVAPDLNSCLLHQEIQVVNCCIARKKRRKAAKESLDSLLNQASIGKSEPRLSEAKFPDSEMYARDNTGDYVLRLGADQSSENLTLLETGEPIYSPTLQAPS

SEQ ID NO: 189273 - protein, 725 aa, Zea Mays
MPPPPPPHHSPAIQRPSTTGSDVPLNFHRCHYQIPFFKIKIQGSLLPVPRAPAPLPPHVPTSCAAPGHCQVGHTMQPPQSLVSRARTAIHSAAARVLTDIKADLRDAEGSGGRSRAPSPRTSLDREAAEASATGREPDVKPPSPRDEVLEISPPENEDSSSIPTESTCSTKLTFPPASIVKQLVSAIENGKSFKSMSDMRYTGEQLLKDKGGLSLSVVKSLVRRDKEERSSSDFFGDEETQSLMYSLFKLEEQFSFEASQCFPELVHSRSVSKDLHGAPPGSFIHHLAVVIGSISSVHKMAFFWQSVVLELRKLWSDWQPVPRMPLEVAPDLNSCLLHQEIQVVNCCIARKKRRKAAKESLDSLLNQASIGKSEPRLSEAKFPDSEMYARDNTGDYVLRLGADQSSENLTLLETGEPIYSPTLQEGPIMTAELIKETEELVLRTGSLGAGCSQLLSDMQAFKAANPGCVLEDFVRWHSPPDWSEDCAANSTTVGEGSSRRGRLSDRMQTKGNLWKELWEAAKPIPAVEQTPIYDEDLAVESIFDALEVIEPSKLFEQLLGVILSVCFVAAESVLAADSNLSKLFYDCKDYIIGVYHNDMSKDELDEMYKVYETMEAIVTHPEEALQIMEQPDEKSVDNKNRFTLKLNFMAKDRPPLWKRTTKDDKISQKVEKNTSEEKNTKIFSNLFDKKVSIFSKKNVRSSEVPPASTSSSSPGPFDESEWTIL

SEQ ID NO: 189274 - protein, 704 aa, Zea Mays
MPPPPPPHHSPAIQRPSTTGSDVPLNFHRCHYQIPFFKIKIQGSLLPVPRAPAPLPPHVPTSCAAPGHCQVGHTMQPPQSLVSRARTAIHSAAARVLTDIKADLRDAEGSGGRSRAPSPRTSLDREAAEASATGREPDVKPPSPRDEVLEISPPENEDSSSIPTESTCSTKLTFPPASIVKQLVSAIENGKSFKSMSDMRYTGEQLLKDKGGLSLSVVKSLVRRDKEERSSSDFFGDEETQSLMYSLFKLEEQFSFEASQCFPELVHSRSVSKDLHGAPPGSFIHHLAVVIGSISSVHKMAFFWQSVVLELRKLWSDWQPVPRMPLEVKKRRKAAKESLDSLLNQASIGKSEPRLSEAKFPDSEMYARDNTGDYVLRLGADQSSENLTLLETGEPIYSPTLQEGPIMTAELIKETEELVLRTGSLGAGCSQLLSDMQAFKAANPGCVLEDFVRWHSPPDWSEDCAANSTTVGEGSSRRGRLSDRMQTKEGNLWKELWEAAKPIPAVEQTPIYDEDLAVESIFDALEVIEPSKLFEQLLGVILSVCFVAAESVLAADSNLSKLFYDCKDYIIGVYHNDMSKDELDEMYKVYETMEAIVTHPEEALQIMEQPDEKSVDNKNRFTLKLNFMAKDRPPLWKRTTKDDKISQKVEKNTSEEKNTKIFSNLFDKKVSIFSKKNVRSSEVPPASTSSSSPGPFDESEWTIL

SEQ ID NO: 189275 - protein, 343 aa, Zea Mays
MYARDNTGDYVLRLGADQSSENLTLLETGEPIYSPTLQEGPIMTAELIKETEELVLRTGSLGAGCSQLLSDMQAFKAANPGCVLEDFVRWHSPPDWSEDCAANSTTVGEGSSRRGRLSDRMQTKEGNLWKELWEAAKPIPAVEQTPIYDEDLAVESIFDALEVIEPSKLFEQLLGVILSVCFVAAESVLAADSNLSKLFYDCKDYIIGVYHNDMSKDELDEMYKVYETMEAIVTHPEEALQIMEQPDEKSVDNKNRFTLKLNFMAKDRPPLWKRTTKDDKISQKVEKNTSEEKNTKIFSNLFDKKVSIFSKKNVRSSEVPPASTSSSSPGPFDESLENKIRWP

SEQ ID NO: 189276 - protein, 1058 aa, Zea Mays
MILEKLQKKDTYGVFAEPVDPEELPDYHDVIEHPMDFGTVRKKLARNAYRSFEQFEDDVFLICSNAMQYNAPDTIYFRQAHSIQELARKKFQELRDEGIPTENPIKIGQKIRPNFCTGALVKKPVLRYPDDDIDLSHKEKVKRPNSNNVDDDMSFKNQVKKTMSKNSQDRSCLLQKERIKKPIPRNSEDNLSSSFHKERPKKLISRHSKDDPDSPSGKEQVRKVISKNLENDESSPFHKHQVKKSTPQSSKDDFLSQKKHIKPIGRNGEDPGFSSRKKPIEDPVRTNVEDAGFSSTKRLSEKPISVNGEEDRDHCHQESSKEPSCGVEQDGQGYSCDEEAVKKPVCMDSHDAQGSDISAATIASVGDGSNGLSMSQPNATEPTGCPLTNGVIDKDISSPLDEIRSEKTDDILAKPSYKPIVVDETRRKTYDASEEQPLMKSDPVFDVFSAEPKELVNVGLDAEHSYAYVRSLARFAGSLGTQGWRIASDRIRQALPADVNYGRGWVGEYEPPLPSILVVNDQPRYPKSSETNRRRNAPLPRDNERFRSTETNNPKDMRRVATCNNVVGVAGPLESPEIKPRLFGVTTEPQHRSTDALSLHENHRVSGNVAKTKRTTNEQTRKGNSSSSARPLEMQLQKGASSGALDIPAPNKMAGQPRPFLQPPESTRAQQMKKIDSSKSKIPIEMAPQQVECAKDADSSVHDTPSSNGQPKHFFQSQAAASSGVHDMHSSNGQSKHYQSQAAASSGMHAMSSSNGHPKHYFKSQAAPSSGVHDMSSSNGQPKHFFQSQAVASGVHDMASNGQSKPLFQSQEATVLQPKNEATWVYHGRPGDGKVGTSKKSRPSTSIGFITKNQSINAAKFAMNLNGQSIVSDHTKSAGATAMPAQANIPNRGLDAPRNIFSAFPANVRENQSIPSAPVAQSWISFGAATENKPTIVSPAFVDNNCGWKMPFANVQPCDDTKLSVVPQFFRHPVQVVRENSVQNKGLVIFPQLVQPDFARSQGQPQWQGLFPHMQQKPGKDVLRPDLNIGFPSPGSPPARQSSGINLEAQQPDLALQL

SEQ ID NO: 189277 - protein, 992 aa, Zea Mays
MQYNAPDTIYFRQAHSIQELARKKFQELRDEGIPTENPIKIGQKIRPNFCTGALVKKPVLRYPDDDIDLSHKEKVKRPNSNNVDDDMSFKNQVKKTMSKNSQDRSCLLQKERIKKPIPRNSEDNLSSSFHKERPKKLISRHSKDDPDSPSGKEQVRKVISKNLENDESSPFHKHQVKKSTPQSSKDDFLSQKKHIKPIGRNGEDPGFSSRKKPIEDPVRTNVEDAGFSSTKRLSEKPISVNGEEDRDHCHQESSKEPSCGVEQDGQGYSCDEEAVKKPVCMDSHDAQGSDISAATIASVGDGSNGLSMSQPNATEPTGCPLTNGVIDKDISSPLDEIRSEKTDDILAKPSYKPIVVDETRRKTYDASEEQPLMKSDPVFDVFSAEPKELVNVGLDAEHSYAYVRSLARFAGSLGTQGWRIASDRIRQALPADVNYGRGWVGEYEPPLPSILVVNDQPRYPKSSETNRRRNAPLPRDNERFRSTETNNPKDMRRVATCNNVVGVAGPLESPEIKPRLFGVTTEPQHRSTDALSLHENHRVSGNVAKTKRTTNEQTRKGNSSSSARPLEMQLQKGASSGALDIPAPNKMAGQPRPFLQPPESTRAQQMKKIDSSKSKIPIEMAPQQVECAKDADSSVHDTPSSNGQPKHFFQSQAAASSGVHDMHSSNGQSKHYQSQAAASSGMHAMSSSNGHPKHYFKSQAAPSSGVHDMSSSNGQPKHFFQSQAVASGVHDMASNGQSKPLFQSQEATVLQPKNEATWVYHGRPGDGKVGTSKKSRPSTSIGFITKNQSINAAKFAMNLNGQSIVSDHTKSAGATAMPAQANIPNRGLDAPRNIFSAFPANVRENQSIPSAPVAQSWISFGAATENKPTIVSPAFVDNNCGWKMPFANVQPCDDTKLSVVPQFFRHPVQVVRENSVQNKGLVIFPQLVQPDFARSQGQPQWQGLFPHMQQKPGKDVLRPDLNIGFPSPGSPPARQSSGINLEAQQPDLALQL

SEQ ID NO: 189278 - protein, 1022 aa, Zea Mays
MHLEPHFLVFPFTTISCTCKDDVFLICSNAMQYNAPDTIYFRQAHSIQELARKKFQELRDEGIPTENPIKIGQKIRPNFCTGALVKKPVLRYPDDDIDLSHKEKVKRPNSNNVDDDMSFKNQVKKTMSKNSQDRSCLLQKERIKKPIPRNSEDNLSSSFHKERPKKLISRHSKDDPDSPSGKEQVRKVISKNLENDESSPFHKHQVKKSTPQSSKDDFLSQKKHIKPIGRNGEDPGFSSRKKPIEDPVRTNVEDAGFSSTKRLSEKPISVNGEEDRDHCHQESSKEPSCGVEQDGQGYSCDEEAVKKPVCMDSHDAQGSDISAATIASVGDGSNGLSMSQPNATEPTGCPLTNGVIDKDISSPLDEIRSEKTDDILAKPSYKPIVVDETRRKTYDASEEQPLMKSDPVFDVFSAEPKELVNVGLDAEHSYAYVRSLARFAGSLGTQGWRIASDRIRQALPADVNYGRGWVGEYEPPLPSILVVNDQPRYPKSSETNRRRNAPLPRDNERFRSTETNNPKDMRRVATCNNVVGVAGPLESPEIKPRLFGVTTEPQHRSTDALSLHENHRVSGNVAKTKRTTNEQTRKGNSSSSARPLEMQLQKGASSGALDIPAPNKMAGQPRPFLQPPESTRAQQMKKIDSSKSKIPIEMAPQQVECAKDADSSVHDTPSSNGQPKHFFQSQAAASSGVHDMHSSNGQSKHYQSQAAASSGMHAMSSSNGHPKHYFKSQAAPSSGVHDMSSSNGQPKHFFQSQAVASGVHDMASNGQSKPLFQSQEATVLQPKNEATWVYHGRPGDGKVGTSKKSRPSTSIGFITKNQSINAAKFAMNLNGQSIVSDHTKSAGATAMPAQANIPNRGLDAPRNIFSAFPANVRENQSIPSAPVAQSWISFGAATENKPTIVSPAFVDNNCGWKMPFANVQPCDDTKLSVVPQFFRHPVQVVRENSVQNKGLVIFPQLVQPDFARSQGQPQWQGLFPHMQQKPGKDVLRPDLNIGFPSPGSPPARQSSGINLEAQQPDLALQL

SEQ ID NO: 189279 - protein, 151 aa, Zea Mays
MQRSSAFSSLTMLAVHAGCNPSGADSEGGHHFHQVRAPHGARGVLHPDVEPQPAGEPRAREHHGEARRPQEQLVPEVGLEELETEGREPVAGRGQCRPLHGAQRLRLGEQPWVQEPRQEVGQVQEGQEQGNLNKLIQSSGVFTPREPCMHA

SEQ ID NO: 189280 - protein, 284 aa, Zea Mays
MAVAGLPCFPLSAAAAAPAVRLAARPNRQRPPRRWTGAAPSADRGEMGNDDGGGEALPPGRSVVVTTTKPAAAELSVKGTSPSLIRSLDTKMCDVCVAYQGSPGTVIEAFVLKAFPECTTVPLQRSEAALEAVESSLADIAILPIENAYTGSFHKSYDILLSHDLQIVQEVQMDVELCLLALPGVHKDDLKTIFSHPQYLAQCEHSISGLSVSKKNVDHGVVGAEIISKQNLRDSGVICSARAAELYGLNILECNFQDESPNVTRYLVLAKTANLPKEHDQYKC

SEQ ID NO: 189281 - protein, 414 aa, Zea Mays
MGVTTGDTERRERGREKKISAASLRRFAINLVSITSQSQDSYTQTHAPHPLLFYIYNTHTSVVVWSTSIGVGRRRGEAKQAGFENKVLGVGNGDNHMRIIQEDIIETVNNHPSAGWTASRNPYFSNYTIAQFKHILGVKPAPQNALSNVPVKTYSRSLELPKEFDARSAWSRCSTIGNILEQGHCGSCWAFGAVECLQDRFCIHLNMSILLSVNDLLACCGFMCGDGCDGGYPIEAWRYFVQNGVVTDECDPYFDPVGCKHPGCEPAYPTPKCEKKCKEQNQVWQEKKHFSIDAYRINSDPHDIMAEVYKNGPVEVAFTVYEDFAHYKSGVYKHITGGIMGGHAVKLIGWGTSDAGEDYWLLANQWNRGWGDDGYFKIIRGKNECGIEEGVVAGMPSTKNMVPNFGGAVGRAIV

SEQ ID NO: 189282 - protein, 68 aa, Zea Mays
MQVALDATYAQVKKNKAPRRISRSSRTSMSSRIRLSTSPVSYLCWVYLSWVRFYYVHFDINDVNDSSL

SEQ ID NO: 189283 - protein, 86 aa, Zea Mays
MERFLRSSMALSVALLMALIRAASSLASDSFSRSTVSFPSLVVRRKSSSSVASTQTPLTSQISPLGDMGSSVWMMGSERTSDTNLE

SEQ ID NO: 189284 - protein, 483 aa, Zea Mays
MGQCCSRATAPDSGRGGANGYGYSNQAKPAQAPPSYNPPQQAAEVRYTPSATNSSAVPPVAVPPKPTADTILGKQYEDVRSVYSLGKELGRGQFGVTYLCTEIASGRQYACKSISKRKLVSKADREDIRREIQIMQHLSGQPNIVEFRGAYEDKSNVHVVMELCAGGELFDRIIAKGHYTERAAATICRAVVNVVNICHFMGVMHRDLKPENFLLATKEENAMLKATDFGLSVFIEEETEKGIFDAILHEEIDFESQPWPSISESAKDLVRKMLTRDPKKRLTSAQVLQHQWLREGGEASDKPIDSAVLSRMKQFRAMNKLKKMALKVIASNLNEEEIKGLKQMFMNMDTDNSGTITYEELKAGLAKLGSKLSEAEVKQLMEAADVDGNGSIDYVEFITATMHRHKLERDEHLFKAFQYFDKDNSGFITRDELESALIEHEMGDTSTIKEIISEVDTDNDGRINYEEFCAMMRGGMQQPMRLK

SEQ ID NO: 189285 - protein, 51 aa, Zea Mays
MPGLRLSASLLSNQIIQPLIKSSISTQEFVVEVPVPVQCLKTAGNKPLCPG

SEQ ID NO: 189286 - protein, 143 aa, Zea Mays
MQPPHQPPMNGQHSQPPPQGPVVPMPPQQQAPPLPYYQQQQAPQYYQQALPQPWGQQQQYAAPPPQYPPPPQTQHYATPPQQYAPLPQQQYAPPPQQQYAPSPYGTTPGSGEVRTLWIGDLQHWMDENYLHYNAFAAVAQLLL

SEQ ID NO: 189287 - protein, 127 aa, Zea Mays
MILTIQQSCAEEAIRMLNGSQVGGQKVRLSWGRSPQNRQASQHDANNQYNGNSYYGYQQPGYEGYGYGASSAQDPSMQNYYGYSGCGNYEQQQPTQEQQLQQPPPPQHVGHGQSPLLKSYYLSIVQI

SEQ ID NO: 189288 - protein, 188 aa, Zea Mays
MHPPDDIEDPVGDYSDDEDPWKPLNPHEPGNLKIRPYRRVKGSPRGVIGISKKKTLKSLFPIAKMVGVVIPEHAKSFEAQQSQEEHYGSQSPPRFEKFLRSFELGEENPNVFGDLKDDNASNTGINFDYDDPDMPNDIDIDLDVPTCPDEIIAITPKGTQDDIDTHENLDDLCRSHLSFCNEVSEGID

SEQ ID NO: 189289 - protein, 209 aa, Zea Mays
MHALKSWQQYERANWGRKEGRKRKGEPPSSVWHGGYLHLSLLTMPRAATEAVVHGEGGTIKVGTTGTIGSLMTRELDAVKVAPPPPAAAGNPRLRRHQGCPVSVPCGAATPRKTVLRKSSSDISGGSRADRVSAEDACCKPRRVSRRNTFDSPMLRSDGALVDVRTPSGGRAKKKGGVYGVELVDVKCGNPMTSRLRKLGFCKLSETFA

SEQ ID NO: 189290 - protein, 978 aa, Zea Mays
MGFAPAAGRFFSQFLAYFLTHQMAVALFRLLGAILKTMVVANTFGMFAMLLIFLFAGILLPRQDIKHWWIWAYWSSPMTYSNNAISVNEFLATRWAMPNNEANIVAPTIGKAILKYKGYFGGQWGYWLSIGAMIGYTILFNILFLCALTFLSPGGSSNTVVSVSDDGDKEKSTDQEMFDVANGTNEAANRRTQTGMVLPFQPLSLSFNHMNYYVDMPAAMKDQGFTESRLQLLSDISGAFRPGVLTALVGVSGAGKTTLMDVLAGRKTSGTIEGDIKLSGYPKKQETFARVSGYCEQTDIHSPNVTVYESLVYSAWLRLSSEVDDNTRKMFVEEVMSLVELDVLRDALVGLPGVSGLSTEQRKRLTIAVELVANPSIIFMDEPTSGLDARAAAIVMRTLLLLKRGGRVIYAGQLGVQSRVLVEYFEAIPGVPKITEGYNPATWMLEVSSPLAEARLDVDFAEIYANSALYRHNQELIKELSIPPPGYQDLSFPTKYAQNFLNQCMANTWKQFRSYWKNPPYNAMRYLMTILYGLVFGSVFWRMGKNVKSEQELQNLLGATYAAVFFLGSANLLSSVPVFSIERTVFYREKAAGMFSPLSYSFAVTVVELVYSIAQGILYTIPLYSMIGYEWKADKFFYFMFFLTCSFLYFSLFGAMLVTCTPSAMLASIVVSFSLTGWNIFAGFLVPRPALPIWWRWFYWCNPVSWTIYGVTASQFGDVGRNVTATGNAGTVVVKEFLEQNLGMKHDFLGYVVLAHFGYILLFVFLFAYGTKALNFQKRIGAIFTTLYVSSVGVHTALFCHRALASLPAPAVPASAPAVPPRPQSPLPSSPAAPPPPANPTTTQQQIHHRRARRAPRRGTLDPTQQEVANQSPSPPAPTPPAAASGVRYRTPSSPDLLLPADAAKMRRYSALPNGGRQETLADRAHRYRGIVLVILAPLALVSLVLLLMPRSPAGTMGSARDRQRDRALRPGTHSPAR

SEQ ID NO: 189291 - protein, 988 aa, Zea Mays
MDLWSCNHYLKNSFFIPGLIYVDNCYIFMLWVSRLLQEGILLPRQDIKHWWIWAYWSSPMTYSNNAISVNEFLATRWAMPNNEANIVAPTIGKAILKYKGYFGGQWGYWLSIGAMIGYTILFNILFLCALTFLSPGGSSNTVVSVSDDGDKEKSTDQEMFDVANGTNEAANRRTQTGMVLPFQPLSLSFNHMNYYVDMPAAMKDQGFTESRLQLLSDISGAFRPGVLTALVGVSGAGKTTLMDVLAGRKTSGTIEGDIKLSGYPKKQETFARVSGYCEQTDIHSPNVTVYESLVYSAWLRLSSEVDDNTRKMFVEEVMSLVELDVLRDALVGLPGVSGLSTEQRKRLTIAVELVANPSIIFMDEPTSGLDARAAAIVMRTVRNTVNTGRTVVCTIHQPSIDIFEAFDELLLLKRGGRVIYAGQLGVQSRVLVEYFEAIPGVPKITEGYNPATWMLEVSSPLAEARLDVDFAEIYANSALYRHNQELIKELSIPPPGYQDLSFPTKYAQNFLNQCMANTWKQFRSYWKNPPYNAMRYLMTILYGLVFGSVFWRMGKNVKSEQELQNLLGATYAAVFFLGSANLLSSVPVFSIERTVFYREKAAGMFSPLSYSFAVTVVELVYSIAQGILYTIPLYSMIGYEWKADKFFYFMFFLTCSFLYFSLFGAMLVTCTPSAMLASIVVSFSLTGWNIFAGFLVPRPALPIWWRWFYWCNPVSWTIYGVTASQFGDVGRNVTATGNAGTVVVKEFLEQNLGMKHDFLGYVVLAHFGYILLFVFLFAYGTKALNFQKRIGAIFTTLYVSSVGVHTALFCHRALASLPAPAVPASAPAVPPRPQSPLPSSPAAPPPPANPTTTQQQIHHRRARRAPRRGTLDPTQQEVANQSPSPPAPTPPAAASGVRYRTPSSPDLLLPADAAKMRRYSALPNGGRQETLADRAHRYRGIVLVILAPLALVSLVLLLMPRSPAGTMGSARDRQRDRALRPGTHSPAR

SEQ ID NO: 189292 - protein, 339 aa, Zea Mays
MDSHVGSGKVITAPLITEDGRPIKDPLVLLEATADKDTSEVAPSTSINGNEIDESAERITDKQIIEWKLTLHQIGLDVLRTDRTMVFYENKENLSKLWDILAVYAWIDKDVGYCQGMSDLCSPMIVLLKDEADAFWCFEKLMRRLRGNFKCTDQSVGVSNQLQHLASIIQVLDPKLHDHLETLGGGDYLFAFRMFMVLFRREVSFGDSLYLWEMMWALEYDPDIFFATCEEQGAVHKNKVSKSKLKGLRHFGKWDKDKDKEDDKNGAEDGEDGPVPISVFMVASVLKEKREKLLQEARGLDDLIRILNDVNGNLDAKKACAGALKLHKKYLKKVQAKKP

SEQ ID NO: 189293 - protein, 648 aa, Zea Mays
MASLEAAETSPPSTPTTSASPCPTPRPLATAPPTMGAALLRAARSGDERQLVKALLADPAAPDLETAATAGGNTLLHVAAAGGHVDLALLLLRRAPRLLTARNAALDTPLHLAARAGAHKVVALLAASSSSSSSSPACSLRALTRATNRRGETALHDAVRGGHEAAARALATADPGLVGMCGGAGESPFYMASAAGSLGMLRMLLKAYKDAEEEVPDLGSSIGPGGRTVMHAAVLTSNEMIQELLQWNPTLVKEVDDSGSTPFHYIASVGNISAMKLLLRRDSSPAYSSDSNGLFPVHIAAKMGYGQFIYELCRFCPDCDELLDSRGRNFLHTAIEHKKWKVVWRFSGTADLGRMANVMDSEGNTPLHLAIKNADQMIVSLLMATNSVLPNIVNNQGLTALDLAVLATDKGISYTLNPQVIILRCLAWTGAVLSPRRLDHFIDDFGIGKTSGNELKKFTNIAQNLIVGSVLVSTVTFAAVFTLPGGYISEGHPHAGAPILSHRYTFKAFVMANTLAFVGSTLSTIWLTYAGSEHVHPLLRAIYMFLSVISMEQATRSMVIGFALGAYVVLSPVSERIAIVVCMSTFMTLLLRNPSSWQLWFLFMPIKRRLGWKGAFKTHLPPETRSRLTIGVGSNFACQFLRRMLGFL

SEQ ID NO: 189294 - protein, 184 aa, Zea Mays
MNNLLSDSFERDEKPESERDIEMGNRNPKDNSDYGLKDFFEQVKEIEVLLDKMSNIVHKLQEANEESKSVTKASAMKVIKERMEKDIDGVLKIARNNLENRQKPGCGKGTSVDRSRMSMTIALKKKLKERMNDFQNLRQTIQEEYREVVERRIFTVTGTKPSEEVRWWFYFYHATQGTANAYLF

SEQ ID NO: 189295 - protein, 179 aa, Zea Mays
MTGRPWAGAPPPPLPLAVAVGVAALLSCCCCCCCQGASATAAASFGDNFEITGAEDHVKTSADGQTWYLYLDNKTGVGFQTKQRYLFGWFSMKLKLVGNDSAGVVTAYYMCSDLDAAPLRDELDFEFLGNRSGEPYIIQTNVYHSGVGGREMRHSLWFDPTADFHTYAILWNPKQIVKR

SEQ ID NO: 189296 - protein, 186 aa, Zea Mays
MTGRPWAGAPPPPLPLAVAVGVAALLSCCCCCCCQGASATAAASFGDNFEITGAEDHVKTSADGQTWYLYLDNKTGVGFQTKQRYLFGWFSMKLKLVGNDSAGVVTAYYMCSDLDAAPLRDELDFEFLGNRSGEPYIIQTNVYHSGVGGREMRHSLWFDPTADFHTYAILWNPKQIVHELKISVID

SEQ ID NO: 189297 - protein, 643 aa, Zea Mays
MMNSRNAINYSDWSVLSFNVRGINAVAKGNGIHCVIRESNSDIICLQETKRESFVRADLRRFCPSYFDEFAFVPSIGNSGGFITVWNSSKLVGNVVFQNEYALSVEFFATSSEESWIITNVYAPCSPAGKIDFLHWFSNINMPSDKRWLIVGDFNLTRRPENRNSAGGDINLMLCFNEAISQLDLVEIPLHGLSFTWSNKQREPLLQRLDWFFMSQEWAVSYPNTLATTLPRDISDHVPCLISFKSKIPKPKIFRFENFWLQFDEFMTIFQNSWTGMPSILDKAKNLTAKFKSTRKILKEWQRSLPKIDKTVSQIKLIIEFIDLIEEHRDLLIEEWNFRELLQLKAAELLRLQKIYWKQRASIKWVTDGDICSRFFHTHATVRHGRNTIALLADDSGAAFSEHDLKANLLWNAFKQRLGSSDFVDNVFDLPSLILCNSDLQWLDEPFSKQEIDSIVAGLPSDKSPGPDGFNTNFIKKCWPIISQDFYDLCDQFYHGDVCLRSINGSYIVLIPKKDNARVVGDFRPISLLNNSMKIITKLLANRLQTVMTSLVHKNQYGFIKGRTIQDCLAWAFEYIHLCHISKKEIIVLKLDFEKAFDSLEHEFILQVLLHNGFGPRWINWIRDILRSGTSSVLLNGVPGKTF

SEQ ID NO: 189298 - protein, 408 aa, Zea Mays
MAPPASTDETARHKKARKSKIDIEEKKHKKTNKARAAAEDAPIPDAAERKKRKHKDGREEKRDGQKSKKERKSEGKGEEAEAAVGRDEKMRRAMEDERFAAARTDPRFRPMRRKESKVALDSRFSSMMTDPRFASSAAPVDKRGRRRKKRENPMLHYYLNQEDLEDDGKGKEKGKKEKPVLVQEEEEDEEELEEQEEEESSSSDDDEDEDLDDDDEECSVGSDIAHYLMGRHDDTPMIDKETHRLAVVNMDWDHIKAVDLYMVMTSCLPKGGRVLSVSIYPSEFGLKCMEIESTQGPAALVNANVDKKDSDEDEDDTDDDEESTDDDVDEEEEEVDSDKENNKLRAYELNRLRYYYAVVVCDSSATANHLYMTLDGTEFLKTANVFDLQFIPDSREFKHPARDAATES

SEQ ID NO: 189299 - protein, 456 aa, Zea Mays
MAPPASTDETARHKKARKSKIDIEEKKHKKTNKARAAAEDAPIPDAAERKKRKHKDGREEKRDGQKSKKERKSEGKGEEAEAAVGRDEKMRRAMEDERFAAARTDPRFRPMRRKESKVALDSRFSSMMTDPRFASSAAPVDKRGRRRKKRENPMLHYYLNQEDLEDDGKGKEKGKKEKPVLVQEEEEDEEELEEQEEEESSSSDDDEDEDLDDDDEECSVGSDIAHYLMGRHDDTPMIDKETHRLAVVNMDWDHIKAVDLYMVMTSCLPKGGRVLSVSIYPSEFGLKCMEIESTQGPAALVNANVDKKDSDEDEDDTDDDEESTDDDVDEEEEEVDSDKENNKLRAYELNRLRYYYAVVVCDSSATANHLYMTLDGTEFLKTANVFDLQFIPDSREFKHPARDAATEAPPSYKEPDFETRALQHSRVKLTWDDDEPERKKVLRRKFNDDQMSLTCI

SEQ ID NO: 189300 - protein, 402 aa, Zea Mays
MTLDGTEFLKTANVFDLQFIPDSREFKHPARDAATEAPPSYKEPDFETRALQHSRVKLTWDDDEPERKKVLRRKFNDDQLDELNMYLASDDSASDNEGVDDSEDESLPNGGSKRKLTKEERLALLLQGDKSDEEQTDDQDMEITFNTELEDLSKRILERKNNEEKTIWEKHQEKMKEKRKGRKRGLKDEDDDNHYISDDEPENDDDFFADEQSDEEPKPSKSKKHKAKAKGEAKRKGNDGTTDEHLEQEATKDELELLVAGDQDTANGAKGYNLKRKKGKKGKEESADDKLPDIDLSKDERFSAMFTSHLFALDPTDPQYKRSAAFMRKQAGKPGVHGGKSSREPPLEGSSLGGTVPPDDAVTNNDGQKPDGSATEKLQILSAVKSLKRNLGAFKNSKTGDR

SEQ ID NO: 189301 - protein, 190 aa, Zea Mays
MEGGNLGFSQYDYSHIKEATNNFSVDNKLGEGGFGPVYKGQLRSGIKIAAKKLEACSLQGLLEFQNEIQLIAKLQHKNLVKLLGCCTKGDQEKMLIYEYMENKSLDYFIFDNVKGADLNWSKRLHIINGIAQGLLYLHNYSRLCVVHRDLKASNILLDSEMNPKISDFGMARIFCSNAKESNTTRIVGTQ

SEQ ID NO: 189302 - protein, 334 aa, Zea Mays
MEGGNLGFSQYDYSHIKEATNNFSVDNKLGEGGFGPVYKGQLRSGIKIAAKKLEACSLQGLLEFQNEIQLIAKLQHKNLVKLLGCCTKGDQEKMLIYEYMENKSLDYFIFDNVKGADLNWSKRLHIINGIAQGLLYLHNYSRLCVVHRDLKASNILLDSEMNPKISDFGMARIFCSNAKESNTTRIVGTHGYIPPEYAFHGVCSIKSDVFSYGVLTLEILSSKRTVQFYEYNQKLYNLISYAWQLWTDGKSDELIYSPPGNVREEIERHIQVALLCVQENAEHRPDMERVVTMLNSKDVDLPKPMQPAYFHVNPSEEEVSSRSINMTMSITLER

SEQ ID NO: 189303 - protein, 173 aa, Zea Mays
MNSQKNKLLKTVTCLFYFDQSQGQLRSGIKIAAKKLEACSLQGLLEFQNEIQLIAKLQHKNLVKLLGCCTKGDQEKMLIYEYMENKSLDYFIFDNVKGADLNWSKRLHIINGIAQGLLYLHNYSRLCVVHRDLKASNILLDSEMNPKISDFGMARIFCSNAKESNTTRIVGTQ

SEQ ID NO: 189304 - protein, 227 aa, Zea Mays
MVPDNVKGADLNWSKRLHIINGIAQGLLYLHNYSRLCVVHRDLKASNILLDSEMNPKISDFGMARIFCSNAKESNTTRIVGTHGYIPPEYAFHGVCSIKSDVFSYGVLTLEILSSKRTVQFYEYNQKLYNLISYAWQLWTDGKSDELIYSPPGNVREEIERHIQVALLCVQENAEHRPDMERVVTMLNSKDVDLPKPMQPAYFHVNPSEEEVSSRSINMTMSITLER

SEQ ID NO: 189305 - protein, 701 aa, Zea Mays
MAVLLLPPCLVFLLLQLFSAPSDGATAEYAEYTCNGTTGNFTSGSAFAANLDRLVAELPGNASASPLLFASASAPGSADADTAYGLALCRGDVTDARACSACLADAFSRLRRLCGGDRDATFYADLCTARYSGADFMARPDDNSPVVNGMDANASTYPGWDAANATSRSFFLSLVGTLFGEMSMYGAYNSSRRLATAVMFINAGLPTVYGLAQCTPDLAPAQCWHCFQGLGDLNRQWYDGREGGRVSGVRCSFRYEGYQFYQGTPDVRIGLQGGPSSSPDDDGTSASNHKKVLIIALVVPIALVCGVLVAGLLLTRAQRKRAGKTRLPTQMHSRNSSKTEEALKLWRIEERSSEFTLYDFAELAAATADFSDDNLLGKGGFGPVYKGKLADGAEVAVKRLAAHSGQGLEEFKNEIQLIAKLQHTNLVRLLGCCVQEEEKMLVYEYMPNRSLDCFIFDQQRGPLLDWEKRRRIIEGIAQGLLYLHRHSRVRIIHRDMKASNILLDKDINPKISDFGMARIFGSNMTEANTNRVVGTYGYMAPEYASEGIFSVKSDVYSFGVLLLEIVSGKRNSGHHQHQYGDFINLLGYAWQLWREGRAFELIDPTLGECTEVADIVRCVKVALLCVQDSATDRPTMTDVTAMLASRDGGAAASLPDPRRPPHFSLRVSSSDDGSSEVRTRSHGTASFSTNDLTITTVQDGR

SEQ ID NO: 189306 - protein, 396 aa, Zea Mays
MMAAGLVIIRARRRKGAEKKRKLQLEAQSRNSSTTEDALKLWRIEESSSEFTLYDFAELAAATGGFSDENLLGRGGFGPVYKGKLPDGAEIAVKRLAAHSGQGLEEFKNEIQLIAKLQHTNLVRLVGCCVQEEEKLLVYEYMPNRSLNCFIFDQQRGPLLDWEKRRRIIEGVAQGLLYLHKHSRVRIIHRDLKASNILLDKDLNPKISDFGMARIFGSNMTEANTNRVVGTYGYMAPEYASEGIFSVKSDVYSFGVLLLEIVSGKRNTGHHNYGDFVNLLGYAWQLWRDGRVFELIDPTLGERGDVATIVRCVKVALLCVQESATDRPTMADVTAMLATAGDAASAGPLPDPKRPPHFSLRVATTSGSDDDCGSRTRFTTSCSTNDLTITSIHEGR

SEQ ID NO: 189307 - protein, 688 aa, Zea Mays
MASLFLFHLTTALKNGGLRHDIHYWIGKDTSQDEVGTAAILTVELDAALGGRAVQYREIHGNETERFLSYFRPCIMPQPGGVASGFNHVEVNEQDYKTRLYVCHGKHVVHVKEASYLRDCLFIQIWVPFARSSLNHDDIFILDTKSKIFQFSGSNSSIQERAKALEVVQYIKDTFHEGKCEIASVEDGRMMSDAEAGEFWGFFGGFAPLPRRAPAEGNEKQEETAFKLLCFDQGKLEPVNCKSLAHELLETNKCYFLDYGAELYVWMGRITSLQERKGASEAAEKLLSDSSRTRTPMIKVIEGFETVAFKSKFKEWPQTPGLKMSSEDGRGQVAALLKRQGLNVKGLMKAAPAKEEPQSYIDCTGNLQVWRVNDKDKVPLSSSDQSKFYTGDCYIFQYTYPGDDKEECLVGTWFGKKSIEDDKVIAVSLASKMVESAKFQAVQARFYEGKEPIQFFVIFQSLQVFKGGISSGYKRFIAEIGIDDESYSEDGLALFRIQGSGPENMQTIQVEPVASSLNSSYCYILHDGNTVFTWAGNLTTALDQELMERLLDVIKPNTQSRSQKEGSETDQFWSLLGGKSEYSGQKMVQELESDPHLFSCILSKGNLKVKEMHHFTQDDLMTEDVFVLDCHTSIFVWVGQQVDVKLRNLLCLISLWKTLPVKHQFSPLWREASLSSSLDSSPGTWQNH

SEQ ID NO: 189308 - protein, 632 aa, Zea Mays
MIKVIEGFETVAFKSKFKEWPQTPGLKMSSEDGRGQVAALLKRQGLNVKGLMKAAPAKEEPQSYIDCTGNLQVWRVNDKDKVPLSSSDQSKFYTGDCYIFQYTYPGDDKEECLVGTWFGKKSIEDDKVIAVSLASKMVESAKFQAVQARFYEGKEPIQFFVIFQSLQVFKGGISSGYKRFIAEIGIDDESYSEDGLALFRIQGSGPENMQTIQVEPVASSLNSSYCYILHDGNTVFTWAGNLTTALDQELMERLLDVIKPNTQSRSQKEGSETDQFWSLLGGKSEYSGQKMVQELESDPHLFSCILSKGNLKVKEMHHFTQDDLMTEDVFVLDCHTSIFVWVGQQVDVKLRLQALDVGEKFIVLDFLMENLARETPIFTIMEGSEPLFFTRFFTWDLAKSLMHGNSYQRKLAIVKGGGAPALDKPKRRTSIYSGRSTAQDKSQRPRSMSFSPERVRVRGRSPAFTALAATFESSSNRNLSTPPVVKKLYPRSVTPDSSNTSKSSVIAALAGSLDRPSQTPAPAFMKDGSESEKPKQEGDGKGVHTVATSVESLTINEDVKENEPEDEDGLPIYLYERLKTTAVDPVTEIDVTRRETYLSSTEFREKFGMTKEAFSKLPKWKRNKLKIALQLF

SEQ ID NO: 189309 - protein, 240 aa, Zea Mays
MVQELESDPHLFSCILSKGNLKVKEMHHFTQDDLMTEDVFVLDCHTSIFVWVGQQVDVKLRLQALDVGEKFIVLDFLMENLARETPIFTIMEGSEPLFFTRFFTWDLAKSLMHGNSYQRKLAIVKGGGAPALDKPKRRTSIYSGRSTAQDKSQRPRSMSFSPERVRVRGRSPAFTALAATFESSSNRNLSTPPVVKKLYPRSVTPDSSNTSKSSVIAALAGSLDRPSQTPAPAFMKGGRW

SEQ ID NO: 189310 - protein, 342 aa, Zea Mays
MVQELESDPHLFSCILSKGNLKVKEMHHFTQDDLMTEDVFVLDCHTSIFVWVGQQVDVKLRLQALDVGEKFIVLDFLMENLARETPIFTIMEGSEPLFFTRFFTWDLAKSLMHGNSYQRKLAIVKGGGAPALDKPKRRTSIYSGRSTAQDKSQRPRSMSFSPERVRVRGRSPAFTALAATFESSSNRNLSTPPVVKKLYPRSVTPDSSNTSKSSVIAALAGSLDRPSQTPAPAFMKDGSESEKPKQEGDGKGVHTVATSVESLTINEDVKENEPEDEDGLPIYLYERLKTTAVDPVTEIDVTRRETYLSSTEFREKFGMTKEAFSKLPKWKRNKLKIALQLF

SEQ ID NO: 189311 - protein, 265 aa, Zea Mays
MENLARETPIFTIMEGSEPLFFTRFFTWDLAKSLMHGNSYQRKLAIVKGGGAPALDKPKRRTSIYSGRSTAQDKSQRPRSMSFSPERVRVRGRSPAFTALAATFESSSNRNLSTPPVVKKLYPRSVTPDSSNTSKSSVIAALAGSLDRPSQTPAPAFMKDGSESEKPKQEGDGKGVHTVATSVESLTINEDVKENEPEDEDGLPIYLYERLKTTAVDPVTEIDVTRRETYLSSTEFREKFGMTKEAFSKLPKWKRNKLKIALQLF

SEQ ID NO: 189312 - protein, 580 aa, Zea Mays
MAPHLLAVAVAVAAIIATVSLLAPGAAAYPWPVCGTSNDFEPNSTYQANLNLLAAMLPNNVSASPVLYATAVVGAVPEQVWGMGLCRGDANASSCLACLTQAFQDLPNDCSYNKDAAIYYDPCTLHYSDVHTLADDDTGPTTMSYNINNNANVTSDPARFERLLAALVNATAEHAASNSTRRFATGEADADFDRQFPKVYALAQCTPDQTPAQCRKCLAGLISQSLDGFQNNIGGRVLWVNCTWRYETSPFFNGPAMVRLASSSSPPAAAAAGGGERKYSVFIVVLAVVLPTLAALNLVFCFCFWRRPAPQAKQSQPMYSTEAEDVETVDSMMIDVSALRAATGNFDESNKLGEGGFGAVYKGVLPDGDEIAVKRLSKSSTQGVEELKNELALVARLRHRNLVRLVGVCLEQQERLLVYEFVPNRSLDLVLFGTDTREPLSWEQRYRIINGIARGLQYLHEDSQLKVVHRDLKASNILLDVEMNPKISDFGLARIFGRDQTQAVTSRVVGTYGYLAPEYLMRGNYSVKSDAFSFGVMVLEIVTGRKNNGSSHKYGSTGRPGRWRSWWTRPWAEASRRATC

SEQ ID NO: 189313 - protein, 361 aa, Zea Mays
MAHHLMTLAAIVAAVVLLLPCATGYPWAFCGENNNFKANSSYQSHLSLVAATLPKNASTSPDLFATAVVGTIPRQLWAMGLCRGDVDGTACFNCLTQAFRDLPNHCSYNKDATMYYDPCMLHYSNNQLIPDDDSGDFYTINSTAAVNSDPVGFNRLVAALVNATADYAAHKSTRRFATGETTAGSVSEEFPKLYSLAQCTPDMKAARCRECLAALISQSLDAFQNLTLGRVLWINCTYRYEAAPFFNGPAMVQIAVPSSSVPVPAPAPTLAPAIQPSYGTPAAVAGVAGGRKYNLPGVVVAVVLTTVTALNLVVCLCFWRRRRRRRGPTAQAKQPSLNLEELTAQIPRTPSKQRTQKWWTP

SEQ ID NO: 189314 - protein, 254 aa, Zea Mays
MAGNALANYVQVYVMLPLDVITVDNTFEKEDETRAQLKKLTEAGADGVMIDVWWGLVEGKEPGVYDWSAYRQVFKLVQEAGLKLQAIMSCHQCGGNVGDVVNIPIPQWVRDVGKSNPDIFYTNRSGLTNIEYLTLGVDDQPLFHGRTAIQLYADYMKSFRENMADFLDAGVVVDIEVGLGPAGEMRYPSYPQSQGWVFPGVGEFIVSSLSKNKYFSVFFFGYYKTKGDSSPCVGQRQTSLGPCVGFCWKQSQKK

SEQ ID NO: 189315 - protein, 59 aa, Zea Mays
MATTCCATYASSGWYRYPKSSAHPAHAHSWATIRKDRFLHRWRSAAKSHSRSPLPPLYK

SEQ ID NO: 189316 - protein, 77 aa, Zea Mays
MFSSWASPLSCLAKQGSLFGYQARDSLCLAISPSWTWKSLLVQKSQIRSTARSRSHMKHDMLPQRDVAAMELCLSSK

SEQ ID NO: 189317 - protein, 184 aa, Zea Mays
MARVEAVVICLLVLAMDVAAGVLGVYAEKAQNQGRHLRILFVECRQPVRRAYELGMAAAAVLAAAHAIANAAGGCACACSGDKLRRASPNRQMASFALVLTCDKRFLSSGDCGWSRMVLVVALSLLVLGALPNAKRKLAECGVARHRFLSIGGVLCFVHAPFCAVYYASASAAAREARRDATHV

SEQ ID NO: 189318 - protein, 201 aa, Zea Mays
MAGAFAFRLVPRLAAEPAARGKGGGGGANRDAGSRALVSKKPNKQQHLWIRKETAGSGKKALRLIDAVTKWLMSKGQVLTWTTYDTLLLALLMDKRVDEAESVWNTVIQTHTRSVPKRLFSRMILIYDIHQRPDKVLEIFADMEELGVRPDEDTARRIGKAFVASGQEEKEKHVLEKYLKKWKYIHFNGERVRVRRDGPLA

SEQ ID NO: 189319 - protein, 97 aa, Zea Mays
MSKGQTHTRSVPKRLFSRMILIYDIHQRPDKVLEIFADMEELGVRPDEDTARRIGKAFVASGQEEKEKHVLEKYLKKWKYIHFNGERVRVRRDGPLA

SEQ ID NO: 189320 - protein, 130 aa, Zea Mays
MAGAFAFRLVPRLAAEPAARGKGGGGGANRDAGSRALVSKKPNKQQHLWIRKETAGSGKKALRLIDAIFADMEELGVRPDEDTARRIGKAFVASGQEEKEKHVLEKYLKKWKYIHFNGERVRVRRDGPLA

SEQ ID NO: 189321 - protein, 137 aa, Zea Mays
MFWPVILSGFHQLAGLKVNLQRSSRRLKLCPLTLLLKELMVFQLVIEAQGVLIRRITGGILRRLMHIGLLVGRITGGSLEIWRSHRSNHAQSLRHGVSQWSLQSQRLQHLVLGKQQPRWSLRRPSQRPCLILHHRTG

SEQ ID NO: 189322 - protein, 172 aa, Zea Mays
MPQGGAVHRQLHQIIRHPSLVVLAPVNKFSKNVEWMFWPVILSGFHQLAGLKVNLQRSSRRLKLCPLTLLLKELMVFQLVIEAQGVLIRRITGGILRRLMHIGLLVGRITGGSLEIWRSHRSNHAQSLRHGVSQWSLQSQRLQHLVLGKQQPRWSLRRPSQRPCLILHHRTG

SEQ ID NO: 189323 - protein, 98 aa, Zea Mays
MEKPQEQPRPEPETWRKPVEPPKPEVATPRFGKAATALELAQAFSTSMSDTAPQNRLTSVPSPRVPLSPGARDQSGFSRLTDSRTLRSSPSQRKINGY

SEQ ID NO: 189324 - protein, 182 aa, Zea Mays
MCPRMLAVQPYQIFLVLWSKGEFAKVEQKVEALSINPSLERADGFSAGHRGPRSVDKKDYRRDTEKADAYRPSRREDNRRVARDMEKPQEQPRPEPETWRKPVEPPKPEVATPRFGKAATALELAQAFSTSMSDTAPQNRLTSVPSPRVPLSPGARDQSGFSRLTDSRTLRSSPSQRKINGY

SEQ ID NO: 189325 - protein, 51 aa, Zea Mays
MWVPFCSSFFSLLFFSFSPSSSLVHALCELSLSGKKEKRISPCSYGRGGEN

SEQ ID NO: 189326 - protein, 111 aa, Zea Mays
MDRAELTTEQVLKRDIPWEHYMSTKLISGTCLQLLRRYDHKPESQRAPLLEEDGPAYIRVFLNILRSISKEETVEYVLALIDEMLATNPKRAALFYDQSLSGEDIYEPFLS

SEQ ID NO: 189327 - protein, 169 aa, Zea Mays
MPRLVEVVKGSTKEKVVRVVVLSFRNLLAKGAFAAQMIDLGLPQMVQNLKAQAWTDEDLLDALNQLEVGLKENLKKLSSFDKYKQQVLLGHLDWSPMHKDPSFWRENINNFEENDFQYHPSGRIVVADLKAKDRVMKLMNHENTEVRKNALICVQRLFLGAKYASFLQA

SEQ ID NO: 189328 - protein, 230 aa, Zea Mays
MVLAFFLRHGVQHILSTNRGGQTSGLPTLGRAVIREAHHHNGADTVVHAVVADAAEPALAGPPRGAEALAPHDDGAEREALDLEAEALLHVVVPDDVDLVGDAGVLERAGEVVGLGGREGVVVVLHPARGSGGLAVAVAVLGGGGGARVGEGDVDGAPVGAVEHGGGAHVEQDDGVPGAEVVGDGPAHGVGGLVGEVDGGGRRRGLHRGIFCGDRSWSLLSGVEVLWTGE

SEQ ID NO: 189329 - protein, 195 aa, Zea Mays
MVLAFFLRHGVQHILSTNRGGQTSGLPTLGRAVIREAHHHNGADTVVHAVVADAAEPALAGPPRGAEALAPHDDGAEREALDLEAEALLHVVVPDDVDLVGDAGVLERAGEVVGLGGREGVVVVLHPARGSGGLAVAVAVLGGGGGARVGEGDVDGAPVGAVDGGGRRRGLHRGIFCGDRSWSLLSGVEVLWTGE

SEQ ID NO: 189330 - protein, 180 aa, Zea Mays
MLKRRRQWLRIIQVTKWLMSKGQVLTWTTYDTLLLALLMDKRVDEAESVWNTVIQTHTRSVPKRLFSRMILIYDIHQRPDKVLESCAVQCSRLSSIHVVTVTVTHLVLFMEPNHKRQIFADMEELGVRPDKDTVRRIGKAFVASGQEEKEKHVLEKYLKKWKYIHFNGERVRVRRDGPLA

SEQ ID NO: 189331 - protein, 183 aa, Zea Mays
MKLFMCFGGAAAAVVIGDDEAAAPRHRGLRRGRRSLSFRGKLKFLPGTHNKGGCSEKKPSAAPPLGQPTKRGADADNDDGVYGVSRASSVASSALLSSASSWPLDSSDTSSSSSSLSRSSSASSSPSVSGMLSPPSVKLRPNNKRPASSPSPAAGAAAVVLCLLMVVMERCDAVPGLEWNRNK

SEQ ID NO: 189332 - protein, 942 aa, Zea Mays
MMNNFSKNSETSHFLDSNAVEVRTGTSEPTVQSSNDEGDSDISPETDLAVCNVPLVSSEGQLKSESRADDQQAAEPTVSVRSVSREKPSVEIARSKSAAGKRKKKKEMLAKADAAGSSDLYNAYKGPEEKSEMVGTADGADSSSIVDTTHVLLDEAERDVSTFADDCKKKVELDDWEDAADMSTPKLAPDSGNQAGTTQVLDSDTSEANSRKKYSRDFLLTLQHHCTGLPVGFQMNEAVNAIMNNLVGKSYVVDREPYPSPGRGLDRPTSRGDRRGAAMTDDRWTKTGVPLSPGRDVHMDLPNGTSVVNYRSSGGNHGVLRNPRGQPSNQYGGGLLAGPVHSVGPQVPRSGSDSDRWQQKGLMPSPVTPMQTMHKAERKYVVGKVSDEEEAKQRQLKGILNKLTPQNFEKLFEQVKEVNIDSVATLTGVISQIFDKALMEPTFCEMYANFCFHLAGALPDFSEDNEKITFKRLLLNKCQEEFERGEREEAEADKTEEEGEIKQTKEEREEKRIRARRRMLGNIRLIGELFKKKMLTERIMHECIKKLFGNCDDPDEENIEALCKLMSTIGEMIDRAKAKEHMDAYFGMMHKMSTSQKLSSRVRFMLRDSIDLRRNKWQQRRKVEGPKKIEEVHRDAAQERHAQSSRLGRGPAVSSVSRRGAPSMDYGSRGSSALASSSSQQGSIRGMPPHSRGSQDIRYEERNQFDNRTVLPQRVVKDEAITLGPQGGLARGMSIRGLSPASNTELPSVIDHRRILSGSNGYNSVTDWTSSSGREDSSSIIPDRTSGRTSASSQSAGPSQRPASQEGRPGSKSYSEDELREKSVLAIREYYSAKDEKEVALCIEELNAPSFYPSVVSLWVNDSFERKDMERELLAKLLVSLCSGRHNLLSKQQLSDGLSSVLTLLEDTLSDAPRATEYLGRLFARFVEESILLLEETKGIHS

SEQ ID NO: 189333 - protein, 359 aa, Zea Mays
MYGSPVSKDLNLPVQPPMASSGLLRYRSAPSTVLGDLCEDFLSSAPRAASPDAGADNVFSRFLADHHIRDDKPSPLASAAVHFPTETDTASQQQQQQMMFHSQQQQEMVSAKSGLYRTVNSGVETAAAAGAGGASSSDNASNLIRQSSSPAGFLDHLNMENGYGAMLRAGMATADSLAGGGSRLKGQLSFSSRQGSLMSQISEMDSEEVGGSSPEASGGGGRGYIPGYPMGSGWEDSSALLSDNLSGVKRPRDSSEPGQSGLTHQFSVPKTSSEMATIEKFLQFQDAVPCKIRAKRGCATHPRSIAERVRRTKISERIRKLQELVPNMDKVLHILKPTHLTCWIWLSTTSRISRSRLRY

SEQ ID NO: 189334 - protein, 209 aa, Zea Mays
MLRAGMATADSLAGGGSRLKGQLSFSSRQGSLMSQISEMDSEEVGGSSPEASGGGGRGYIPGYPMGSGWEDSSALLSDNLSGVKRPRDSSEPGQSGLTHQFSVPKTSSEMATIEKFLQFQDAVPCKIRAKRGCATHPRSIAERVRRTKISERIRKLQELVPNMDKQTNTSDMLDLAVDYIKDLQKQVKVLKESQDNCTCSASKNQQHSC

SEQ ID NO: 189335 - protein, 310 aa, Zea Mays
MYGSPVSKDLNLPVQPPMASSGLLRYRSAPSTVLGDLCEDFLSSAPRAASPDAGADNVFSRFLADHHIRDDKPSPLASAAVHFPTETDTASQQQQQQMMFHSQQQQEMVSAKSGLYRTVNSGVETAAAAGAGGASSSDNASNLIRQSSSPAGFLDHLNMENGYGAMLRAGMATADSLAGGGSRLKGQLSFSSRQGSLMSQISEMDSEEVGGSSPEASGGGGRGYIPGYPMGSGWEDSSALLSDNLSGVKRPRDSSEPGQCRAALRTSSACPRRRPRWQLLRNSSSSRTPCLVRSVPSGGAPLIHAASLRG

SEQ ID NO: 189336 - protein, 431 aa, Zea Mays
MAGSSSYSVLPDQTMDNDDAQIGVAKTQGKYWGIFICWLLGNGCLFGFNGMLTIEDYYVYLFPKYHPTRIITLTYQPFVLATTAIFTYHEAKVNTRVRNLAGYTLFFLSSFGVIILDVLSSGSGGIAPFVGICTIAAAFGIADGHVQGGMTGDLSLMCPEFVQSFFGGVAASGAITAALRFFTKAVFENSRDGLRKGAMLFSSISCFFELLCVLLYALVFPKLPIVKFYRSKAASEGSQTVTADLAAGGIKSLPNPLAEEDGVVERLNNKQLLHENMDYALDMFLVYVLTLSIFPGFLAEDTGSHSLGSWYVLVLIASFNVSDLIGRYLPLVEQMKLTSRTGLLTAAISRFLLVPAFYFTAKYGDQGWMIMLTSLLGLSNGHLTVSVLTEAPKGYKGPEQNALGNLLVLFLLAGIFVGAVSDWLWLIGKGW

SEQ ID NO: 189337 - protein, 358 aa, Zea Mays
MSMEVAGAEAPVKGKFLGILVCWLLGNGSLFAWNSILTIEDYYSHLFPDYHPTRVLTLVYQPFAFGITLIMTYYEAKMNTRLRNLAGFSLFFLGSFALIILDVATKGHGGLGVFVGVCIISAIFGTADANCQGALVGDLSLMCPEFIQSFMAGLAASGVLTSALRLVTKAAFESSKDGLRIGAILFFSITCLFELVCLLLYTFVFGKLPIVKYYRAKAAAEGSKTVASDLAAAGIISEQQGQMEEDPEKYKRLTTKELLMQNIDYALDIYLIYVLTLSIFPGFLSEDTGAHNLGTWYALVLIAMYNVWDLIGRYVPLIPCLKLTSRKGTLAAVLARFLFIPAFYFTAKYGDQGTCLRK

SEQ ID NO: 189338 - protein, 403 aa, Zea Mays
MSMEVAGAEAPVKGKFLGILVCWLLGNGSLFAWNSILTIEDYYSHLFPDYHPTRVLTLVYQPFAFGITLIMTYYEAKMNTRLRNLAGFSLFFLGSFALIILDVATKGHGGLGVFVGVCIISAIFGTADANCQGALVGDLSLMCPEFIQSFMAGLAASGVLTSALRLVTKAAFESSKDGLRIGAILFFSITCLFELVCLLLYTFVFGKLPIVKYYRAKAAAEGSKTVASDLAAAGIISEQQGQMEEDPEKYKRLTTKELLMQNIDYALDIYLIYVLTLSIFPGFLSEDTGAHNLGTWYALVLIAMYNVWDLIGRYVPLIPCLKLTSRKGTLAAVLARFLFIPAFYFTAKYGDQGPSGKADPVAFQILRVHSTSSMDFPFYLLTDKKNGSPKIMVGSTSTSPRPS

SEQ ID NO: 189339 - protein, 489 aa, Zea Mays
MPPRRGRRKGKGRAKPRAKATEPEPELEEAADSEIEAGDAKAEESGEAKEDESASDAESMDADANEEAVENGADEMDAEPEAKAEPEAVATEAEAKPDVSDAEDEEAGETCSDREADAKDVDSKAKAEESDGEDEEGATAETDGEDEEGATAETDGESEEEAAETGGENEEDGGDSDTEGDAEESPPPPPSRSRRRKRAATPDDEAEETPTPSRRRRRRKSRQRGDSPPPLPDHLRCRRSDGKKWRCSGRALPTVSFCEYHYARANKGKKLPADGELLAVALQRQKNKRKGRRRINPSTSPQAATSDRQTRDLPNGLMTILPGSSGPAALSTPVTTKVGVEISAPMQRCYRSKNAEPLPVGPVKVVPRAMSMTKAAPRMCHCCGVKKAARVANCKNCDTNFCNSCINKWYSKLSRKDIKARCPACRGLCNCKLCSLGHTKGATHKEPPSGERKILSIKISNHQFYKLLPVKLDREQLDELELEAKIQGC

SEQ ID NO: 189340 - protein, 510 aa, Zea Mays
MPPRRGRRKGKGRAKPRAKATEPEPELEEAADSEIEAGDAKAEESGEAKEDESASDAESMDADANEEAVENGADEMDAEPEAKAEPEAVATEAEAKPDVSDAEDEEAGETCSDREADAKDVDSKAKAEESDGEDEEGATAETDGEDEEGATAETDGESEEEAAETGGENEEDGGDSDTEGDAEESPPPPPSRSRRRKRAATPDDEAEETPTPSRRRRRRKSRQRGDSPPPLPDHLRCRRSDGKKWRCSGRALPTVSFCEYHYARANKGKKLPADGELLAVALQRQKNKRKGRRRINPSTSPQAATSDRQTRDLPNGLMTILPGSSGPAALSTPVTTKVGVEISAPMQRCYRSKNAEPLPVGPVKVVPRAMSMTKAAPRMCHCCGVKKAARVANCKNCDTNFCNSCINKWYSKLSRKDIKARCPACRGLCNCKLCSLGHTKGATHKEPPSGERKILSIKISNHQFYKLLPVKLDREQLDELELEAKIQGTKTSNVRVQVAENGQIITVSSL

SEQ ID NO: 189341 - protein, 355 aa, Zea Mays
MPPRRGRRKGKGRAKPRAKATEPEPELEEAADSEIEAGDAKAEESGEAKEDESASDAESMDADANEEAVENGADEMDAEPEAKAEPEAVATEAEAKPDVSDAEDEEAGETCSDREADAKDVDSKAKAEESDGEDEEGATAETDGEDEEGATAETDGESEEEAAETGGENEEDGGDSDTEGDAEESPPPPPSRSRRRKRAATPDDEAEETPTPSRRRRRRKSRQRGDSPPPLPDHLRCRRSDGKKWRCSGRALPTVSFCEYHYARANKGKKLPADGELLAVALQRQKNKRKGRRRINPSTSPQAATSDRQTRDLPNGLMTILPGCSSCYEYDESSTKNVSLLRGKEGSACCQLQEL

SEQ ID NO: 189342 - protein, 185 aa, Zea Mays
MGWSCGDKNDGRDARPGSSKFDDKVRYIFFGVSSQQVWHIRGHVRLGCSRPGTATKPRGSLPMEINPAHRKTSVRLSPMWAVSRSFLVVPARETRPVDRGWKISQPGLHANAKGTRLLVGVDLLRRPLVIDYPYIGLTWRRRASTILGPYTLSFRELHLKKPMNIRCATCFCLCGSINYVQTVAS

SEQ ID NO: 189343 - protein, 72 aa, Zea Mays
MEINPAHRKTSVRLSPMWAVSRSFLVVPARETRPVDRGWKISQPGLHANAKGTRLLVGVDLLRRPLVIESCT

SEQ ID NO: 189344 - protein, 117 aa, Zea Mays
MEINPAHRKTSVRLSPMWAVSRSFLVVPARETRPVDRGWKISQPGLHANAKGTRLLVGVDLLRRPLVIDYPYIGLTWRRRASTILGPYTLSFSNGCGTKPLRKRMMMRMMMNSMTCS

SEQ ID NO: 189345 - protein, 116 aa, Zea Mays
MEINPAHRKTSVRLSPMWAVSRSFLVVPARETRPVDRGWKISQPGLHANAKGTRLLVGVDLLRRPLVIDYPYIGLTWRRRASTILGPYTLSFRLFLHRFELEKTNFHRLGIQYPLL

SEQ ID NO: 189346 - protein, 109 aa, Zea Mays
MRTDVLESPGRVVVSSERREKKEDEVCGGEQGVHCGDAGRRHRAQGAGGQALLLGREAGRVAVVGGRQDRRRRRRRGVAKDDHVPQLLGTELSSEAAAEVASAAGQVYN

SEQ ID NO: 189347 - protein, 393 aa, Zea Mays
MLSASDAGRIGRLVLPKKCAETYFPPISQPEGLPLKVQDASGKEWIFQFRFWPNNNSRMYVLEGVTPCIQSMQLQAGDTVTFSRIDPEGKLIMGFRKATNNSFEQEQATKPANGALATSEANGKVSAPDSSPNAAVSRQNKLNTETKSSSPVEQATALKMDKDGLTQKEGPGTGSSSPGSVKRKTTILGQKNKRLRMDNEESMELKITWEEAQELLRPPPKAPSIVIVDGHEFEEYEEPPVLGRKTYFVADKSGSNHQWAQCEDCSKWRKLPIDALLPSKWTCSDNKWDPERCSCESAQEISIEELAEFIPIKPDGLDTLANLAILGEGHSCFDARRRRQRICLARKRRANPVRRPHNKLCPDLQEPMPLQPDLPRKQMETPMDLKTWPSITR

SEQ ID NO: 189348 - protein, 245 aa, Zea Mays
MLSASDAGRIGRLVLPKKCAETYFPPISQPEGLPLKVQDASGKEWIFQFRFWPNNNSRMYVLEGVTPCIQSMQLQAGDTVTFSRIDPEGKLIMGFRKATNNSFEQEQATKPANGALATSEANGKVSAPDSSPNAAVSRQNKLNTETKSSSPVEQATALKMDKDGLTQKEGPGTGSSSPGSVKRKTTILGQKNKRLRMDNEESMELKITWEEAQELLRPPPKAPSIVIVDGHEFEEYEFEPSMGPM

SEQ ID NO: 189349 - protein, 391 aa, Zea Mays
MGFRKATNNSFEQEQATKPANGALATSEANGKVSAPDSSPNAAVSRQNKLNTETKSSSPVEQATALKMDKDGLTQKEGPGTGSSSPGSVKRKTTILGQKNKRLRMDNEESMELKITWEEAQELLRPPPKAPSIVIVDGHEFEEYEEPPVLGRKTYFVADKSGSNHQWAQCEDCSKWRKLPIDALLPSKWTCSDNKWDPERCSCESAQEISIEELAEFIPIKPDGLDTLANLAILGEGEALPSQPTTKHPRHRPGCSCIVCIQPPSGKGPKHKQTCTCNVCMTVRRRFRTLMLRREKKATKDLSRKKETGQSSEKATQQAVSGPPGANATATRSAQKADGNTDGPEDMAVDHKVTTSSPVKNHIDLNIQPERDDEQSPKSGAAGLLSRDNAT

SEQ ID NO: 189350 - protein, 317 aa, Zea Mays
MGFRKATNNSFEQEQATKPANGALATSEANGKVSAPDSSPNAAVSRQNKLNTETKSSSPVEQATALKMDKDGLTQKEGPGTGSSSPGSVKRKTTILGQKNKRLRMDNEESMELKITWEEAQELLRPPPKAPSIVIVDGHEFEEYEEPPVLGRKTYFVADKSGSNHQWAQCEDCSKWRKLPIDALLPSKWTCSDNKWDPERCSCESAQEISIEELAEFIPIKPAKKPKLKIESDAIDASDGLDTLANLAILGEGHSCFDARRRRQRICLARKRRANPVRRPHNKLCPDLQEPMPLQPDLPRKQMETPMDLKTWPSITR

SEQ ID NO: 189351 - protein, 478 aa, Zea Mays
MAGWLALDVAAEAEANENEATTEDANAQRIGLELSIVPRGLGFRVEGVQITTKKLGVQDTLMPSAPGEKDPQVIPRPATGPPLVQTLTPVNATGSPAIDPRLAQPSWPGHVVLLRPCAAWPPHLPVPLLLPHQNVDALEDVAAADVNPAIDSCDEKMLPKVNMLFDGESDAYEFYNAYAEKVGFFVRRSTLWTTSKNIITRRTFVCSREGFREKKKGAKEAKCPRPETRIGCPASLTIRLTANGKYRLTEFVPNHNHQLATASTVHMLKTKKIRRKARAARENLADDTVSTPEFENEDEAYEFYSMYAGKIGFSVRRASMTVNNENVITRRMFVCSKEGFREKKRGAKRVKKPRPETRTGCPACMVIRLGTNEKYQVTEFVTCHNHQLGAAAASDLVMASGSTENDQDDGFDQADRSPDDSVHKQNLIYGSTTLSSLEGRSCKRYKYTKTPRSGDVGATLEYLQKIQNLLWTFSILVT

SEQ ID NO: 189352 - protein, 884 aa, Zea Mays
MAGWLALDVAAEAEANENEATTEDANAQRIGLELSIVPRGLGFRVEGVQITTKKLGVQDTLMPSAPGEKDPQVIPRPATGPPLVQTLTPVNATGSPAIDPRLAQPSWPGHVVLLRPCAAWPPHLPVPLLLPHQNVDVAAADVNPAIDSCDEKMLPKVNMLFDGESDAYEFYNAYAEKVGFFVRRSTLWTTSKNIITRRTFVCSREGFREKKKGAKEAKCPRPETRIGCPASLTIRLTANGKYRLTEFVPNHNHQLATASTVHMLKTKKIRRKARAARENLADDTVSTPEFENEDEAYEFYSMYAGKIGFSVRRASMTVNNENVITRRMFVCSKEGFREKKRGAKRVKKPRPETRTGCPACMVIRLGTNEKYQVTEFVTCHNHQLGAAAASDLVMASGSTENDQDDGFDQADRSPDDSVHKQNLIYGSTTLSSLEGRSCKRYKYTKTPRSGVNHHKQTVIFGAAIIYDESKEAFQWLLDTFKMAMNGTHPKTLLTDRSVALSEAVAATLPATAHRYCVWQIYQNALQQLSQAFHGSKTLECNFKRCLFDCEDEDEFVTAWKEMLEKYDLEDNQWLADLFSIKEKWALAYGRDAFYADMKSVQQKESLTSELKKHLSLECDLLNFFEQFERLLCDRRSAEMEADVNANQSTKKPPSMRMLRQAANAYTPSAFKMFEREFELYMDCMLYICGEMSTIFEYRISVEDKSRDHFVKFDSLNSMMNCTCKTFEFIGIPCRHMLKVLDMRNIKDLPAQYIMKRWRKDAKSGSSNGGCAFLFDGDPDFSHIKRYNFLCRMFSVAAARAATSDESFAYMENQSNILMDQIEQVIQTRPPDIADLIGANCDRTQNPVDNIVAEGIQSHTNFLSGSTDGSLTFPFTLGAGTLDYR

SEQ ID NO: 189353 - protein, 960 aa, Zea Mays
MAGWLALDVAAEAEANENEATTEDANAQRIGLELSIVPRGLGFRVEGVQITTKKLGVQDTLMPSAPGEKDPQVIPRPATGPPLVQTLTPVNATGSPAIDPRLAQPSWPGHVVLLRPCAAWPPHLPVPLLLPHQNVDALEDVAAADVNPAIDSCDEKMLPKVNMLFDGESDAYEFYNAYAEKVGFFVRRSTLWTTSKNIITRRTFVCSREGFREKKKGAKEAKCPRPETRIGCPASLTIRLTANGKYRLTEFVPNHNHQLATASTVHMLKTKKIRRKARAARENLADDTVSTPEFENEDEAYEFYSMYAGKIGFSVRRASMTVNNENVITRRMFVCSKEGFREKKRGAKRVKKPRPETRTGCPACMVIRLGTNEKYQVTEFVTCHNHQLGAAAASDLVMASGSTENDQDDGFDQADRSPDDSVHKQNLIYGSTTLSSLEGRSCKRYKYTKTPRSGDVGATLEYLQKVQHDNPSFFYAVKSDDDGNFTNFFWADSKSIVDFFHFGDVVCFDSGYALQGYDRPLALFTGVNHHKQTVIFGAAIIYDESKEAFQWLLDTFKMAMNGTHPKTLLTDRSVALSEAVAATLPATAHRYCVWQIYQNALQQLSQAFHGSKTLECNFKRCLFDCEDEDEFVTAWKEMLEKYDLEDNQWLADLFSIKEKWALAYGRDAFYADMKSVQQKESLTSELKKHLSLECDLLNFFEQFERLLCDRRSAEMEADVNANQSTKKPPSMRMLRQAANAYTPSAFKMFEREFELYMDCMLYICGEMSTIFEYRISVEDKSRDHFVKFDSLNSMMNCTCKTFEFIGIPCRHMLKVLDMRNIKDLPAQYIMKRWRKDAKSGSSNGGCAFLFDGDPDFSHIKRYNFLCRMFSVAAARAATSDESFAYMENQSNILMDQIEQVIQTRPPDIADLIGANCDRTQNPVDNIVAEGIQSHTNFLSGSTDGSLTFPFTLGAGTLDYR

SEQ ID NO: 189354 - protein, 462 aa, Zea Mays
MAGWLALDVAAEAEANENEATTEDANAQRIGLELSIVPRGLGFRVEGVQITTKKLGVQDTLMPSAPGEKDPQVIPRPATGPPLVQTLTPVNATGSPAIDPRLAQPSWPGHVVLLRPCAAWPPHLPVPLLLPHQNVDVAAADVNPAIDSCDEKMLPKVNMLFDGESDAYEFYNAYAEKVGFFVRRSTLWTTSKNIITRRTFVCSREGFREKKKGAKEAKCPRPETRIGCPASLTIRLTANGKYRLTEFVPNHNHQLATASTVHMLKTKKIRRKARAARENLADDTVSTPEFENEDEAYEFYSMYAGKIGFSVRRASMTVNNENVITRRMFVCSKEGFREKKRGAKRVKKPRPETRTGCPACMVIRLGTNEKYQVTEFVTCHNHQLGAAAASDLVMASGSTENDQDDGFDQADRSPDDSVHKQNLIYGSTTLSSLEGRSCKRYKYTKTPRSGDVGATLEYLQKV

SEQ ID NO: 189355 - protein, 942 aa, Zea Mays
MAGWLALDVAAEAEANENEATTEDANAQRIGLELSIVPRGLGFRVEGVQITTKKLGVQDTLMPSAPGEKDPQVIPRPATGPPLVQTLTPVNATGSPAIDPRLAQPSWPGHVVLLRPCAAWPPHLPVPLLLPHQNVDVAAADVNPAIDSCDEKMLPKVNMLFDGESDAYEFYNAYAEKVGFFVRRSTLWTTSKNIITRRTFVCSREGFREKKKGAKEAKCPRPETRIGCPASLTIRLTANGKYRLTEFVPNHNHQLATASTVHMLKTKKIRRKARAARENLADDTVSTPEFENEDEAYEFYSMYAGKIGFSVRRASMTVNNENVITRRMFVCSKEGFREKKRGAKRVKKPRPETRTGCPACMVIRLGTNEKYQVTEFVTCHNHQLGAAAASDLVMASGSTENDQDDGFDQADRSPDDSVHKQNLIYGSTTLSSLEGRSCKRYKYTKTPRSGDVGATLEYLQKVQHDNPSFFYAVKSDDDGNFTNFFWADSKSIVDFFHFGDVVCFDSGYALQGYDRPLALFTGVNHHKQTVIFGAAIIYDESKEAFQWLLDTFKMAMNGTHPKTLLTDRSVALSEAVAATLPATAHRYCVWQIYQNALQQLSQAFHGSKTLECNFKRCLFDCEDEDEFVTAWKEMLEKYDLEDNQWLADLFSIKEKWALAYGRDAFYADMKSVQQKESLTSELKKHLSLECDLLNFFEQFERLLCDRRSAEMEADVNANQSTKKPPSMRMLRQAANAYTPSAFKMFEREFELYMDCMLYICGEMSTIFEYRISVEDKSRDHFVKFDSLNSMMNCTCKTFEFIGIPCRHMLKVLDMRNIKDLPAQYIMKRWRKDAKSGSSNGGCAFLFDGDPDFSHIKRYNFLCRMFSVAAARAATSDESFAYMENQSNILMDQIEQVIQTRPPDIADLIGANCDRTQNPVDNIVAEGIQSHTNFLSGSTDGMC

SEQ ID NO: 189356 - protein, 842 aa, Zea Mays
MPSAPGEKDPQVIPRPATGPPLVQTLTPVNATGSPAIDPRLAQPSWPGHVVLLRPCAAWPPHLPVPLLLPHQNVDALEDVAAADVNPAIDSCDEKMLPKVNMLFDGESDAYEFYNAYAEKVGFFVRRSTLWTTSKNIITRRTFVCSREGFREKKKGAKEAKCPRPETRIGCPASLTIRLTANGKYRLTEFVPNHNHQLATASTVHMLKTKKIRRKARAARENLADDTVSTPEFENEDEAYEFYSMYAGKIGFSVRRASMTVNNENVITRRMFVCSKEGFREKKRGAKRVKKPRPETRTGCPACMVIRLGTNEKYQVTEFVTCHNHQLGAAAASDLVMASGSTENDQDDGFDQADRSPDDSVHKQNLIYGSTTLSSLEGRSCKRYKYTKTPRSGYALQGYDRPLALFTGVNHHKQTVIFGAAIIYDESKEAFQWLLDTFKMAMNGTHPKTLLTDRSVALSEAVAATLPATAHRYCVWQIYQNALQQLSQAFHGSKTLECNFKRCLFDCEDEDEFVTAWKEMLEKYDLEDNQWLADLFSIKEKWALAYGRDAFYADMKSVQQKESLTSELKKHLSLECDLLNFFEQFERLLCDRRSAEMEADVNANQSTKKPPSMRMLRQAANAYTPSAFKMFEREFELYMDCMLYICGEMSTIFEYRISVEDKSRDHFVKFDSLNSMMNCTCKTFEFIGIPCRHMLKVLDMRNIKDLPAQYIMKRWRKDAKSGSSNGGCAFLFDGDPDFSHIKRYNFLCRMFSVAAARAATSDESFAYMENQSNILMDQIEQVIQTRPPDIADLIGANCDRTQNPVDNIVAEGIQSHTNFLSGSTDGSLTFPFTLGAGTLDYR

SEQ ID NO: 189357 - protein, 417 aa, Zea Mays
MPSAPGEKDPQVIPRPATGPPLVQTLTPVNATGSPAIDPRLAQPSWPGHVVLLRPCAAWPPHLPVPLLLPHQNVDALEDVAAADVNPAIDSCDEKMLPKVNMLFDGESDAYEFYNAYAEKVGFFVRRSTLWTTSKNIITRRTFVCSREGFREKKKGAKEAKCPRPETRIGCPASLTIRLTANGKYRLTEFVPNHNHQLATASTVHMLKTKKIRRKARAARENLADDTVSTPEFENEDEAYEFYSMYAGKIGFSVRRASMTVNNENVITRRMFVCSKEGFREKKRGAKRVKKPRPETRTGCPACMVIRLGTNEKYQVTEFVTCHNHQLGAAAASDLVMASGSTENDQDDGFDQADRSPDDSVHKQNLIYGSTTLSSLEGRSCKRYKYTKTPRSGDVGATLEYLQKIQNLLWTFSILVT

SEQ ID NO: 189358 - protein, 895 aa, Zea Mays
MPSAPGEKDPQVIPRPATGPPLVQTLTPVNATGSPAIDPRLAQPSWPGHVVLLRPCAAWPPHLPVPLLLPHQNVDVAAADVNPAIDSCDEKMLPKVNMLFDGESDAYEFYNAYAEKVGFFVRRSTLWTTSKNIITRRTFVCSREGFREKKKGAKEAKCPRPETRIGCPASLTIRLTANGKYRLTEFVPNHNHQLATASTVHMLKTKKIRRKARAARENLADDTVSTPEFENEDEAYEFYSMYAGKIGFSVRRASMTVNNENVITRRMFVCSKEGFREKKRGAKRVKKPRPETRTGCPACMVIRLGTNEKYQVTEFVTCHNHQLGAAAASDLVMASGSTENDQDDGFDQADRSPDDSVHKQNLIYGSTTLSSLEGRSCKRYKYTKTPRSGDVGATLEYLQKVQHDNPSFFYAVKSDDDGNFTNFFWADSKSIVDFFHFGDVVCFDSGYALQGYDRPLALFTGVNHHKQTVIFGAAIIYDESKEAFQWLLDTFKMAMNGTHPKTLLTDRSVALSEAVAATLPATAHRYCVWQIYQNALQQLSQAFHGSKTLECNFKRCLFDCEDEDEFVTAWKEMLEKYDLEDNQWLADLFSIKEKWALAYGRDAFYADMKSVQQKESLTSELKKHLSLECDLLNFFEQFERLLCDRRSAEMEADVNANQSTKKPPSMRMLRQAANAYTPSAFKMFEREFELYMDCMLYICGEMSTIFEYRISVEDKSRDHFVKFDSLNSMMNCTCKTFEFIGIPCRHMLKVLDMRNIKDLPAQYIMKRWRKDAKSGSSNGGCAFLFDGDPDFSHIKRYNFLCRMFSVAAARAATSDESFAYMENQSNILMDQIEQVIQTRPPDIADLIGANCDRTQNPVDNIVAEGIQSHTNFLSGSTDGSLTFPFTLGAGTLDYR

SEQ ID NO: 189359 - protein, 64 aa, Zea Mays
MPASSTVTLIFLFPLPHPGLLRPLILFIVISGPLMSSSLLVKNTTWSFLMTSLTFVGHFLCAEV

SEQ ID NO: 189360 - protein, 411 aa, Zea Mays
MARRGLMEQDLSKLDVTKLHPLSPEVISRQATINMGTIGHVAHGKSTVVKAISGVQTVRFKNELERNITIKLGYANAKIYKCEDDRCPRPMCYKAYGSGKEDSPLCDVPGFENTRMKLLRHVSFVDCPGHDILMATMLNGAAIMDGALLLIAANESCPQPQTSEHLAAVEIMRLQHIIILQNKIDLIQESAAMNQHEAIQKFIQGTIAEGAPVVPISAQLKYNIDVICEYLVKKIPIPERNFTSPPNMIVIRSFDVNKPGSEVDEIRGGVAGGSILRGVLRVNQKIEVRPGIVMKDETGNIKCTPIYSRIVSLYAEQNELQFAVPGGLIGVGTTMDPTLTRADRLVGQVLGEVGSLPDVYVELEINFFLLRRLLGVRTKGTEKAGKVSKLTKAHRACLHEPRREGCSEPSR

SEQ ID NO: 189361 - protein, 392 aa, Zea Mays
MYPGLRRALAGDENPSGTIGHVAHGKSTVVKAISGVQTVRFKNELERNITIKLGYANAKIYKCEDDRCPRPMCYKAYGSGKEDSPLCDVPGFENTRMKLLRHVSFVDCPGHDILMATMLNGAAIMDGALLLIAANESCPQPQTSEHLAAVEIMRLQHIIILQNKIDLIQESAAMNQHEAIQKFIQGTIAEGAPVVPISAQLKYNIDVICEYLVKKIPIPERNFTSPPNMIVIRSFDVNKPGSEVDEIRGGVAGGSILRGVLRVNQKIEVRPGIVMKDETGNIKCTPIYSRIVSLYAEQNELQFAVPGGLIGVGTTMDPTLTRADRLVGQVLGEVGSLPDVYVELEINFFLLRRLLGVRTKGTEKAGKVSKLTKAHRACLHEPRREGCSEPSR

SEQ ID NO: 189362 - protein, 344 aa, Zea Mays
MSATNVLQGHDILMATMLNGAAIMDGALLLIAANESCPQPQTSEHLAAVEIMRLQHIIILQNKIDLIQESAAMNQHEAIQKFIQGTIAEGAPVVPISAQLKYNIDVICEYLVKKIPIPERNFTSPPNMIVIRSFDVNKPGSEVDEIRGGVAGGSILRGVLRVNQKIEVRPGIVMKDETGNIKCTPIYSRIVSLYAEQNELQFAVPGGLIGVGTTMDPTLTRADRLVGQVLGEVGSLPDVYVELEINFFLLRRLLGVRTKGTEKAGKVSKLTKGEILMLNIGSMSTGARVLAVKNDLAKLQLTAPVCTSRGEKVALSRRVEKHWRLIGWGQIQAGTTLEVPACPV

SEQ ID NO: 189363 - protein, 321 aa, Zea Mays
MCYKAYGSGKEDSPLCDVPGFENTRMKLLRHVSFVDCPGHDILMATMLNGAAIMDGALLLIAANESCPQPQTSEHLAAVEIMRLQHIIILQNKIDLIQESAAMNQHEAIQKFIQGTIAEGAPVVPISAQLKYNIDVICEYLVKKIPIPERNFTSPPNMIVIRSFDVNKPGSEVDEIRGGVAGGSILRGVLRVNQKIEVRPGIVMKDETGNIKCTPIYSRIVSLYAEQNELQFAVPGGLIGVGTTMDPTLTRADRLVGQVLGEVGSLPDVYVELEINFFLLRRLLGVRTKGTEKAGKVSKLTKAHRACLHEPRREGCSEPSR

SEQ ID NO: 189364 - protein, 318 aa, Zea Mays
MAYGSGKEDSPLCDVPGFENTRMKLLRHVSFVDCPGHDILMATMLNGAAIMDGALLLIAANESCPQPQTSEHLAAVEIMRLQHIIILQNKIDLIQESAAMNQHEAIQKFIQGTIAEGAPVVPISAQLKYNIDVICEYLVKKIPIPERNFTSPPNMIVIRSFDVNKPGSEVDEIRGGVAGGSILRGVLRVNQKIEVRPGIVMKDETGNIKCTPIYSRIVSLYAEQNELQFAVPGGLIGVGTTMDPTLTRADRLVGQVLGEVGSLPDVYVELEINFFLLRRLLGVRTKGTEKAGKVSKLTKAHRACLHEPRREGCSEPSR

SEQ ID NO: 189365 - protein, 278 aa, Zea Mays
MATMLNGAAIMDGALLLIAANESCPQPQTSEHLAAVEIMRLQHIIILQNKIDLIQESAAMNQHEAIQKFIQGTIAEGAPVVPISAQLKYNIDVICEYLVKKIPIPERNFTSPPNMIVIRSFDVNKPGSEVDEIRGGVAGGSILRGVLRVNQKIEVRPGIVMKDETGNIKCTPIYSRIVSLYAEQNELQFAVPGGLIGVGTTMDPTLTRADRLVGQVLGEVGSLPDVYVELEINFFLLRRLLGVRTKGTEKAGKVSKLTKAHRACLHEPRREGCSEPSR

SEQ ID NO: 189366 - protein, 237 aa, Zea Mays
MWERGRPPRKPRPSPILVPPPPSSPPPRLNLLLPRSLLALAARAMPSRRPSPGGKVRDALFQILENEDDVTIKHGTQSRESRREATQGMHSSKFCLHPAGDTPSACRLFDALVSLCVPVIASDYIELPFEDIIDYNKISIFVGTSKAVQPGYLTSTLRRISSERILEYQREIKKVRHYFEYEDPNGPVNEIWRQVSLKAPLIKLLTNRDKRLLERGTNGTDCSCICSTTPTDITAAS

SEQ ID NO: 189367 - protein, 328 aa, Zea Mays
MWERGRPPRKPRPSPILVPPPPSSPPPRLNLLLPRSLLALAARAMPSRRPSPVLLLLLALSLALLFLLLSPSFPSTSRFSRSLSSGSAFASSSPASTSAPPAPVKIYLYDLPAKFTYGVVRSYKAARATSGSADAAATLPDEQLRYPGHQHSAEWWLFKDLLRRRPQDRPVARVDDPSDADLFYVPFFSSLSLVVNPIRSPLAANASGAGTAYSDEALQEELLEWLERQLYWQRHRGRDHVFICQDPNALYRVVDRISNAVLLVSDFGRLRSDQASLVKDVILPYSHRINSFKGEVGVDGRPSLLFFMGNREGRFVMHFFRFLKTRMM

SEQ ID NO: 189368 - protein, 349 aa, Zea Mays
MWERGRPPRKPRPSPILVPPPPSSPPPRLNLLLPRSLLALAARAMPSRRPSPVLLLLLALSLALLFLLLSPSFPSTSRFSRSLSSGSAFASSSPASTSAPPAPVKIYLYDLPAKFTYGVVRSYKAARATSGSADAAATLPDEQLRYPGHQHSAEWWLFKDLLRRRPQDRPVARVDDPSDADLFYVPFFSSLSLVVNPIRSPLAANASGAGTAYSDEALQEELLEWLERQLYWQRHRGRDHVFICQDPNALYRVVDRISNAVLLVSDFGRLRSDQASLVKDVILPYSHRINSFKGEVGVDGRPSLLFFMGNRYRKEVTPEFWKKHDESNLTGALVNCVYKGSIYAVECRL

SEQ ID NO: 189369 - protein, 90 aa, Zea Mays
MLPKDKEIKSWEASAGMQADTLLSIWRHRSYQVGPSFSERSCDRWLWRVRDSWCERPRSFFPGCMGGDLVFGLTVARLGKLLRLCLFVFF

SEQ ID NO: 189370 - protein, 145 aa, Zea Mays
MASAHPFWTHKSVSSGGNEIISGVNAGGLSSPEESRAILPRTTCTSSSSCGWDSKVGRGPQVNSSDSVLADLIKRAKAFGKPRSCLFRLHQGKVPRPVAVDLKGAILSSHSPSYAEMAARPPAPASRSSEAAHRPFAPNSRLPGM

SEQ ID NO: 189371 - protein, 296 aa, Zea Mays
MAARSLLLYALLLLALATAAPSHGLTQADVAKRLKEVLSERNRGHEMLDSWNGDGDPCSPSTWEGFSCEPKDGAQVVVKLNFSSKKLQGPIPAEIANLTELNEIHLQYNNFTGFIPASFSAFRHLLKLSVICNPLLNNKQPDGFSSGVNFSYGGCATQEYYSSPAEEYQSPPAVASQKVYVIGGVAGGSLACTVALGSFFVCFNKRERRSPKKDCSSTTNPVFQECSIHNTTNPAVQQLSLKAIQTATSNYKTMIGEGGFGAVYRGALANGQEVAVKVRSSSSTQGTLKTSFCCVA

SEQ ID NO: 189372 - protein, 326 aa, Zea Mays
MIGEGGFGAVYRGALANGQEVAVKVRSSSSTQGTREFNNELRLLSAVWHENLVPLIGYCCEKDQQILVYPFMSNGSLQDRLYGEASKRKVLDWPTRLSVCIGAARGLVYLHNFAGRCIIHRDIKSSNILLDHSMCGKVADFGFSKYAPQEGDSNPSMEVRGTAGYLDPEYYSTQVLSTRSDVFSFGVVLLEIVTGREPLDVKRPRHEWSLVEWAKPYIREYKIEEMVDPGIKGQYCSEAMWRVLEVASVCTEPFSTFRPTMEDVLRELEDALIIENNASEYMRSIESTGTLGSNRYLSIDRKMFASGSARIESMKGNLQAMPSLPR

SEQ ID NO: 189373 - protein, 353 aa, Zea Mays
MGLGAAMALGDPPADYASIAAVGLFVALMCVGIIVGHLLEENRWMNESITTLFIVLSQDETPFLYSLVFGEGVVNDTTSVVLFNAIQNFDPGNISGAKLLNFISSFLYLFGSSTILGVASGLLSAYTIKKLYFGSPVKSIALSNTILALVLVSRAAFVFPLSFLSNLTKKTPNGKISFRQQVIVWWAGLMRGVVSIALAYNKAFDLMFPRFCGSARHFGRCARHFGRDIIMPNLKSSVTTTASAVEYMDEVLKALPLGEARNEDSRTLQFNYGSFKHKALDKSLTKKVPKNRLTSNTKLTQCCSIVGIFEALTAFPFSPSPFLLCEAVPQTLYHLISVPTLYHLPGKNTSNLT

SEQ ID NO: 189374 - protein, 73 aa, Zea Mays
MRSLRVVLPSRIADVRVIFFKKCFLLVGVWFRTTSNMPMKCFWSYNFPSLPILPCFMSLMTCQASPDYVQVPY

SEQ ID NO: 189375 - protein, 91 aa, Zea Mays
MQRSGHRANIYIYFMCVMPISTSLVGPCSSGPLATARPVAVGMGWEYCSWRERERRARAQPRKRKAPFGFRLTFIALSLPTAVFSLLVFGN

SEQ ID NO: 189376 - protein, 179 aa, Zea Mays
MKSKNSRSNNRDDFRGEKPKSDLRNHSSGSRFEQEGTTYSNSYSEREDGLSDDEIERFLHSRAKRGRGAVGSRMDEPGPYLDSLSRHQDNGPSPDIRVEEKWERQVQGPEKPSFLRSKSPDSHWHKDTSDGRASSSEPLSKKEKKKKSEKKDKRDKRKEKDRKKHKHRHHRNHKSRRRE

SEQ ID NO: 189377 - protein, 332 aa, Zea Mays
MEVAWNQVKLHDFLQSPEDLERLYCEIHLLKTLKHRNIMKFYTSWVDVSRRNINFITEMFTSGTLRQYRQKHRRVNMWAVKHWCRQILSGLLYLHSHNPPIIHRDLKCDNIFVNGNQGEVKIGDLGLAAILRKSHAVHCVGTPEFMAPEVYEEEYNELVDIYSFGMCVLEMVTFEYPYSECTHPVQIYKKVISGTKPEALYKVKDPMLRRFVEKCLVSSSQRLSARELLEDPFLQGDDVAVSLDGGDYHVPTKYVRQPSYLGHTYSNGSMVSNGFSESMDEDALSEDCEDDDMKGQDGIDLFNENEDEPLGNVDITIKGRKSEDGGIRISRF

SEQ ID NO: 189378 - protein, 208 aa, Zea Mays
MSSTVPKSSNIFWHDCPVGKTDRQKLLKQKGCVVWITGLSGSGKSTLACTLGRELHTRGKLAYVLDGDNLRHGLNKDLGFKAEDRAENIRRVGEVAKLFADAGLVCIASLISPYRRDRESCRALLSDSSFIEVFLNMSLELCEARDPKGLYKLARAGKIKGFTGIDDPYEAPLNCEIEIKEVDGVCPPPAEMAGQVVTYLEEKGFLHE

SEQ ID NO: 189379 - protein, 488 aa, Zea Mays
MQHGSGDYASSAPSGHYYQHQYAAPGSNPYPIATDATAPGAVSGGYAPAPSYSLGGGYPDQPPSAPVYSQAPSAPAYSQAPSAPAYTQPPPQPQHAPGYSPYNTNLNTYPTEAYYTYTPPSTQTAAPPPAEANSPALPYDAPYYGGGYQPPAAGYDNDDYLNEGAYAYSAGGGSEPYGARGTAPARSGSALFDDYGRSISAPSDDYGRSISAPSGWEEQQPWGSGGGGGGSGSYGVIAKALPKAETREDASGGAQKFRVKLLPEGAGNSTDVLCQIGLDGIRMLDPSTSRTLRIYPLDSLTRWEVLDATIFAFWAKTSVDIEPKRIRLKSSSYTSNTMLDTVTAATVQFKEIGADARSRGAIETGKPLVQSNEKKKGFDWMFTKPVDEVKDHWVPDEVAKKCHSCAVDFSPFNRRHHCRNCGEIFCDKCSQGRIALTAEDNAPLVRVCDRCMAEVTQRLSIAKDVANRSATVQSHEDLARKLKGKSRL

SEQ ID NO: 189380 - protein, 395 aa, Zea Mays
MQHGSGDYASSAPSGHYYQHQYAAPGSNPYPIATDATAPGAVSGGYAPAPSYSLGGGYPDQPPSAPVYSQAPSAPAYSQAPSAPAYTQPPPQPQHAPGYSPYNTNLNTYPTEAYYTYTPPSTQTAAPPPAEANSPALPYDAPYYGGGYQPPAAGYDNDDYLNEGAYAYSAGGGSEPYGARGTAPARSGSALFDDYGRSISAPSDDYGRSISAPSGWEEQQPWGSGGGGGGSGSYGVIAKALPKAETREDASGGAQKFRVKLLPEGAGNSTDVLCQIGLDGIRMLDPSTSRTLRIYPLDSLTRWEVLDATIFAFWAKTSVDIEPKRIRLKSSSYTSNTMLDTVTAATVQFKEIGADARSRGAIETGKPLVQSNEKKKGFDWMFTKPVDEVKDHWVC

SEQ ID NO: 189381 - protein, 302 aa, Zea Mays
MAAARACIVALALVAALFVAGSAAAAAGNAGGRPQLSLRQRRRQLLRQRQVRSHLKRLNKAPLATIESPDGDIIDCVHISNQPALDHPFLKNHTVQMRPAYHPEGLYDDESKVASQRNAQTITQMWHQNGRCPEGTIPIRRTKEEDVLRASSVRRYGKKKRRSAPNPMSVDPDMLNESGHQHAIAYVEGDKYYGAKATINVWQPKIEQANEFSLSQLWILGGSFGQDLNSIEAGWQVRKEGGEGYSSIQCKLPFLFIFFHACSNNFSSACASIIPLLSPVLCACCNNDTRAADGGRAISKRS

SEQ ID NO: 189382 - protein, 465 aa, Zea Mays
MAAARACIVALALVAALFVAGSAAAAAGNAGGRPQLSLRQRRRQLLRQRQVRSHLKRLNKAPLATIESPDGDIIDCVHISNQPALDHPFLKNHTVQMRPAYHPEGLYDDESKVASQRNAQTITQMWHQNGRCPEGTIPIRRTKEEDVLRASSVRRYGKKKRRSAPNPMSVDPDMLNESGHQHAIAYVEGDKYYGAKATINVWQPKIEQANEFSLSQLWILGGSFGQDLNSIEAGWQVSPDLYGDNNTRLFTYWTSDAYQATGCYNLLCSGFIQINNQIAMGASIFPISNYGGSQYDINILVWKSVCGRTRGRGVTVGPPPMHGQDLSADATTTDDNGPQGGQLVAAVRQRLRPGVLAVVPLLVPGGQRLHDRVGRRGGELGARRQPHQHADGQRPLPRGRVRQGQLLQERPGGGLHQQPQAAQGRRHLHRAVQLLRRAGRQQRRLGHLLLLRRAREELKLSIAQD

SEQ ID NO: 189383 - protein, 435 aa, Zea Mays
MDKGIFTNDGSFMERFKQMQQEAQEKKAAAASASSAPKHANPKQGFAVAANKRPFELKNAAPVASAGKLAFSLKKAKVAVAPVFAADEEDEDAVDVEREEPAKRQKSVQADAPAAAAASGAVAPPPPNDMTVRQVADKLASFVAKNGRQFENITRQRNPGDTPFKFLFDKNCPDYKYYEFQLAEEERALAQSKEAEASKANSGTASFKAPGGTYRSSFEQKSNYQTPASALYGAYEGDHTAPPSDPVALMEFYAKKAALEERKRPPRQSKDEMPPPPSLQGTYTTLFSLLKECRSFNVYSSTTNSCAGPPKKGHHMGDFIPQEELEKFMARCNDAAAQKATKEAAEKAKIQADNIGHKLLSKMGWREGEGLGSERRGRADPVMAGDVKKDHLGVGAVQPGEVTSEDDIYEQYKKRMMLGYRYRPNPLNNPRKSYY

SEQ ID NO: 189384 - protein, 286 aa, Zea Mays
MTVRQVADKLASFVAKNGRQFENITRQRNPGDTPFKFLFDKNCPDYKYYEFQLAEEERALAQSKEAEASKANSGTASFKAPGGTYRSSFEQKSNYQTPASALYGAYEGSSSQGSSSSYAPPSDPVALMEFYAKKAALEERKRPPRQSKDEMPPPPSLQGPPKKGHHMGDFIPQEELEKFMARCNDAAAQKATKEAAEKAKIQADNIGHKLLSKMGWREGEGLGSERRGRADPVMAGDVKKDHLGVGAVQPGEVTSEDDIYEQYKKRMMLGYRYRPNPLNNPRKSYY

SEQ ID NO: 189385 - protein, 236 aa, Zea Mays
MREIISIHIGQAGIQVGNACWELYCLEHGIEPDGTMPSDTSVGVAHDAFNTFFSETGSGKHVPRAIFVDLEPTVIDEVRTGSYRQLFHPEQLISGKEDAANNFARGHYTVGKEIVDLCLDRVRKLADNCTGLQGFLVFNAVGGGTGSGLGSLLLERLSVDYGKKSKLGFTIYPSPQVSTAVVEPYNSVLSTHSLLEHTDVAVLLDNEAIYDICRRSLDIESSLFLKSPMPSLSPQA

SEQ ID NO: 189386 - protein, 557 aa, Zea Mays
MRRSRSCLSCVPMGTAALPIENHFVAPAALPSVPASEDGGFGKGSIDLGGLEVRQVTTFAKVWSTTQGGQDGLGATFFKPSPVPAGFSVLGHYAQPNNRPLFGHVLVGRDTSGAGGALLAAPVDYALVWSSPDGAGHFWLPTAPEGYKAVGVVVTAAADKPSPDEVRCVRADFTDACEAEDSVWSSDKDGFSASTLRPAVRGIEARGVHAGTFLAQSSATPAAAAGVSTTLACLKNNSASYTSSMPDLAQLNSLLAAYAPHVYLHPNEPYFPSSVAWFFENGALMYQKGSSQTPTPVAADGSNLPQGGGNDGGYWLDLPADGNQREKAKRGDLAGAKVYVQAKPMLGGTVADLAVWIFYPFNGPARAKVGLIPSIPLGEIGEHVGDWEHVTLRVSNFSGELLRMYFSQHSAGTWVDASRLEYLDGGDGGGSRPVAYASLHGHAFYPNAGTVLQGNSGLGIGIRNDCARGSRLDTGAGRCEVVSAEYLGVKEPAWLGFEREWGPRDEYDIGREINRAARLLPRSVRERLAKLVEKVLVGEGPTGPKMHGNWRNDEREA

SEQ ID NO: 189387 - protein, 453 aa, Zea Mays
MSSKRLHGVFTLLMLMVFNVSGAFVGITIGNDMSNIPPATDIVSILKAKKIQHVRLLDSDHQMLNALANTGIEVMVGVPNDQLLRVGQSRSTAADWINKNVGAYIPATNITYIAVGNEVLTTIPNAALVLVPALQFLQSALLAANLNTQVKISSPHSMDVISKAFPPSAATFNLTWSSIMSQYLQFLKNTGSSFMLNAQPYYGYVGGQGVFPLEYALFRSLNPNSQISDPNTNLFYTNMFDAIIDATYNSIQAMNFTGIPVLVTASGWPWRGGPSEKAATVDNALAYNTNLIHHVLNNSGTPSQPNNQPSTYIFELFNEDNRSGPVSEQNWGIMFPNATTIYSLSFEDVATAIPESPALRGVFCVANSSASHSALKHSLDWACGPGSANCSAVQPGQPCYASDDIVAVASYAFNDYYHRTQSSGGTCNFNGTAMITSTDPIALNVNARWHFKR

SEQ ID NO: 189388 - protein, 249 aa, Zea Mays
MPNHTMAMSEGKAYFPWITASGWPWRGGPSEKAATVDNALAYNTNLIHHVLNNSGTPSQPNNQPSTYIFELFNEDNRSGPVSEQNWGIMFPNATTIYSLSFEDVATAIPESPALRGVFCVANSSASHSALKHSLDWACGPGSANCSAVQPGQPCYASDDIVAVASYAFNDYYHRTQSSGGTCNFNGTAMITSTDPSHGSCIFSGSAGANGSNGGTASGPVSPDSFASKSQSCWLTHLVATLLPILFVVM

SEQ ID NO: 189389 - protein, 142 aa, Zea Mays
MSSSSSFPNSRFPFAAGAGASGGSGSSVRPWGSSGGTSVSSSGKRIQKELLDLNASDCSAGPKGDNLYHWLSTIIGPQGSPYEGGIFFLDIVFPPDYPFKPPMVTFKTRIYHCNIDSTGKVHLDILKDGWSPAFTISKTPRL

SEQ ID NO: 189390 - protein, 253 aa, Zea Mays
MALVSASSSSTTAVAALPRNGQQRASSSLFSSSSSSSFLVGKTLLRQAEAARPSFAVRAAADSDRPIWFPGSTPPPWLDGSLPGDFGFDPWGLGSDPESLRWNVQAELVHCRWAMLGAAGIFIPEFLTKIGVLNTPFWYTAGEQQYFTDTTTLFIIKPGSVNTDPIFPSNKLTGTDVGYPGGLWFDPLGWGSGSPEKIKELRTKEIKNGRLAMLAVMGAWFQAEYTGTGPIDNLFAHLADPGHATIFQAFTPK

SEQ ID NO: 189391 - protein, 96 aa, Zea Mays
MRWSLRPPSSVSPIARGGPPPAPTMTASDPTPNMEIRLTACSRAPLFHAAKVYLAMVQIMPIHEILASTPIEKMTLQIFQTCRALEHLHLLFSCLY

SEQ ID NO: 189392 - protein, 314 aa, Zea Mays
MVNMRDIETSNDGQLDEPLGRVSIISYGSGHMLNDITSSCWFTYLLVFLTDVGLSPGDAAIVMLSGQLADGFTTIFVGELMDRFGHFKLWHAGGSILVAISFSSVFGSCVPCKLMGTNSSTLETVGYSTFATIFNVGWAVTQVAHMSMVNCMSSNPTSRVSLVSCRNAFTMVANLSLYGIALLIFTILQSVNVMFQYRWIAYVSISIGSCFVVIFLVGTKEPGSIRHCVDKSLSRISWTYWFKKVLYYQVALVYTLTRLVTNVSQAFLAFYVINDLEMSQSSKALLEQCFGYCQVLELFFYRAECTTSCMLFQS

SEQ ID NO: 189393 - protein, 388 aa, Zea Mays
MVNMRDIETSNDGQLDEPLGRVSIISYGSGHMLNDITSSCWFTYLLVFLTDVGLSPGDAAIVMLSGQLADGFTTIFVGELMDRFGHFKLWHAGGSILVAISFSSVFGSCVPCKLMGTNSSTLETVGYSTFATIFNVGWAVTQVAHMSMVNCMSSNPTSRVSLVSCRNAFTMVANLSLYGIALLIFTILQSVNVMFQAFLAFYVINDLEMSQSSKALVPAIIYICSLIVSVILQETRWSSWRLKLYFSAGAVLWILSGLGIVFLPSRMHNLMYAISIIIGAANALMTVTSISMEGVLVGEDLNGCAFVYGSLSFVDKVSCGVVLYILESYQGSTEIRSNLGTAFGYSITRLGLGLVPAVCSLLSSIVAYTMDLPDPDTRRRPLVEPLLV

SEQ ID NO: 189394 - protein, 229 aa, Zea Mays
MVNMRDIETSNDGQLDEPLGRVSIISYGSGHMLNDITSSCWFTYLLVFLTDVGLSPGDAAIVMLSGQLADGFTTIFVGELMDRFGHFKLWHAGGSILVAISFSSVFGSCVPCKLMGTNSSTLETVGYSTFATIFNVGWAVTQVAHMSMVNCMSSNPTSRVSLVSCRNAFTMVANLSLYGIALLIFTILQSVNVMFQYRWIAYVSISIGSCFVVIFLVGTKEPGHFLLSM

SEQ ID NO: 189395 - protein, 336 aa, Zea Mays
MAFLSLLLSMLFYGFSITFMDIFYMLLRSMVNCMSSNPTSRVSLVSCRNAFTMVANLSLYGIALLIFTILQSVNVMFQYRWIAYVSISIGSCFVVIFLVGTKEPGSIRHCVDKSLSRISWTYWFKKVLYYQVALVYTLTRLVTNVSQAFLAFYVINDLEMSQSSKALVPAIIYICSLIVSVILQETRWSSWRLKLYFSAGAVLWILSGLGIVFLPSRMHNLMYAISIIIGAANALMTVTSISMEGVLVGEDLNGCAFVYGSLSFVDKVSCGVVLYILESYQEIRSNLGTAFGYSITRLGLGLVPAVCSLLSSIVAYTMDLPDPDTRRRPLVEPLLV

SEQ ID NO: 189396 - protein, 221 aa, Zea Mays
MVSSRSARRSCTVLPYMRLMSSIAEVREQIDTKVAEWREEGKADIVPGVLFIDEVHMLDIECFSFLNRALENDMAPILVIATNRGITSIRGTNYRSPHGIPPDFLDRLLIITTHPYTEDEIRKILDIRCDEEDVEMSADAKVLLTKIGVETSLRYAINLITSAALACQRRKGKVVEMEDISRVYQLFLDVKRSTQYLMEYQSQYMFNEVPGQADGEDAMQS

SEQ ID NO: 189397 - protein, 444 aa, Zea Mays
MASAPLPAAIEPGKKGNVKFAFACAILASMTSILLGYDIGVMSGASLYIKKDLKISDVKLEILMGILNVYSLIGSFAAGRTSDWIGRRYTIVFAAVIFFAGAFLMGFAVNYWMLMFGRFVAGIGVGYALMIAPVYTAEVSPASARGFLTSFPEVFINFGILLGYVSNYAFSRLPLRLGWRVMLGIGAAPSVVLALMVLGMPESPRWLVMKGRLADAKVVLGKTSDTPEEAAERLADIKAAAGITSDNQLLGTTCAVGVTKTLFILVATFLLDRVGRRPLLLSSVGGMIFSLVGLAAGLTVIGHYQDEKIPWAIGVAIASTMAYVAFFSIGLGPITWVYSSEVFPLHVRAMGCALGVASNRLTSGVISMTFISLSKAITIGGAFFLYAGVAVLAWVFFFTFLPETRGRTLEAMSKLFGATDDELKPQDGATKDKQKLELAATGTN

SEQ ID NO: 189398 - protein, 189 aa, Zea Mays
MDLNRGAKVLEELQQMEMRLTGVIEGQCGLLKRNIDGRCIALGKHLEQWYDHDEPVFDAWPIFDEEPVDSATALLFDGADHCFGEELDTDQARSSTIATTTTSELTSTSSPPPSSTSSSRSSAPPASRMRMRSPTTNFSLTGSCPSTRWLHHGAIERRRRLPRHRLRRLLHQLRGVIRRLLTVQQLPQT

SEQ ID NO: 189399 - protein, 78 aa, Zea Mays
MDMYMKSMQQFTDSLAKMKLPALDLDIDNGSSGRSSPAAATTDAESTGADSIAVKKPAAAGKQDKPSPKVFYGSRAFF

SEQ ID NO: 189400 - protein, 93 aa, Zea Mays
MRRTRKEERERGRGRGQLVSTERLHWVERGREHAAWLGRARPVWAEMVFSFSRKFLIAFLFIFSRIFNSNLNQVSNSNKFKHMQQFKECLSSA

SEQ ID NO: 189401 - protein, 165 aa, Zea Mays
MLKTYSIIERPHPFLFSSASYDHLCVFVCACYLNLSTTVAHKVAPRSVCCIFLKYSSDHKGYWCIALTTHHLLIFYYIIFDETIFSFSNTSLPPLPPFLSWIFSMILTLWRPLINHHLFFHMQVPPHCFIRWPQCPSWLLRSRTPSGLARRLVCHPINTCCPMWP

SEQ ID NO: 189402 - protein, 645 aa, Zea Mays
MSLSEPQVDATTEPESQLKRKSSDIGWEWGRLVDPNDKNRVKCLLCGHESTGGIHRFKQHLGHVGSAVAKCKKVSDDVKAKCKKDLESAIQKKREKLQHDRDVRDNVQLIDDEPTYVQSLVGSSDSVSKLGPMDSFARRIDPKANQAEAKRQQNINEALWKERTHQVQQYVARWVYTHGIPFHACDNDEFKEMVEAIGRFGPGFQPPSQHHYREKLLEEEHARTKSLLQDREDEKNKYGCSVMTDAWTDMKRRSIMNICTHTTAGTSFIKSKEMSNVSHTSEVIFELVDKAIQDLGPDSVVQVVTDNASNNMGAKALLHDKRPNIFWSSCATHTINLMLQGIGNLPRFKKRIDQAKSFTIFVYGHHRTLACMRSFTLKRDIIRPGVTRFATAYLTLQSMMEKKDDLRKMVVDSKWYDLPDVKSKKGKEATAMVLSIPFWKGVSLCLKVFEPLVKLLRLVDGDVKPSMGFLYGELINAKKAIKEAFGNVEIKYKEVMSIVEKKMKNRLDSPLHVAAYMLNPYYSYTNSSIFCDSTIMEKFMLCVETFYHGEDEKAYRAVNDDLDRFQTKQGSFSKNMARSYQRFGFNPASWWRLYGGGAPDLQAIAIRILSLTTSSSGCERTWSVFEQEQINNRTPQQSCLHPIQQ

SEQ ID NO: 189403 - protein, 436 aa, Zea Mays
MASAAAATQVGTYFLRNYYNLLQQTPDVVHQFYSEASTMVRVDDLTGTTAAANNMMDIHSLIMSLNFTQIEIKTANFVNSWGDGVLVMVSGLVQTKEYSHQRKFIQMFFLAPQEKGYFVLNDYFHFVDQEHVQPAPVIAQEDYESNLAPNTVVETAPEYVHEEEAQQIAPEVHDVVENYTYSEPQQQVVSDNWGEEPLPEEPPSFSNEMAVAPEEPVQAPPVPLPHVDEPVCEPVKKTYASILKTAKAPAFPVAQQVPVSKTSHPTTESNQTQHSVMASSMGTEKPRSDVFGEGASHDDEESKSVYVGNVPSSVSEADLENEFKKFGRLIPDGVAIRSRKETGGYYAFVEFEELSGVHNALKASPIEINGRQIYVEERKPNSGIRGRGGRGRFSGGGRGYSRGGGDEYNSNRGRSNGYGRAPHQERGILGSHTPRN

SEQ ID NO: 189404 - protein, 442 aa, Zea Mays
MASAAAATQVGTYFLRNYYNLLQQTPDVVHQFYSEASTMVRVDDLTGTTAAANNMMVCRNLSDIHSLIMSLNFTQIEIKTANFVNSWGDGVLVMVSGLVQTKEYSHQRKFIQMFFLAPQEKGYFVLNDYFHFVDQEHVQPAPVIAQEDYESNLAPNTVVETAPEYVHEEEAQQIAPEVHDVVENYTYSEPQQQVVSDNWGEEPLPEEPPSFSNEMAVAPEEPVQAPPVPLPHVDEPVCEPVKKTYASILKTAKAPAFPVAQQVPVSKTSHPTTESNQTQHSVMASSMGTEKPRSDVFGEGASHDDEESKSVYVGNVPSSVSEADLENEFKKFGRLIPDGVAIRSRKETGGYYAFVEFEELSGVHNALKASPIEINGRQIYVEERKPNSGIRGRGGRGRFSGGGRGYSRGGGDEYNSNRGRSNGYGRAPHQERGILGSHTPRN

SEQ ID NO: 189405 - protein, 376 aa, Zea Mays
MSLNFTQIEIKTANFVNSWGDGVLVMVSGLVQTKEYSHQRKFIQMFFLAPQEKGYFVLNDYFHFVDQEHVQPAPVIAQEDYESNLAPNTVVETAPEYVHEEEAQQIAPEVHDVVENYTYSEPQQQVVSDNWGEEPLPEEPPSFSNEMAVAPEEPVQAPPVPLPHVDEPVCEPVKKTYASILKTAKAPAFPVAQQVPVSKTSHPTTESNQTQHSVMASSMGTEKPRSDVFGEGASHDDEESKSVYVGNVPSSVSEADLENEFKKFGRLIPDGVAIRSRKETGGYYAFVEFEELSGVHNALKASPIEINGRQIYVEERKPNSGIRGGRRGGRGRFSGGGRGYSRGGGDEYNSNRGRSNGYGRAPHQERGILGSHTPRN

SEQ ID NO: 189406 - protein, 186 aa, Zea Mays
MIGRRSMDKSRSAGLPPEVSFMLDLWYEETLLRYYAPALGFLMFAVGVNSSAKDLIETIKRPDAIAAGYIRQFVKLVTVDDPFITTDYMVSGGSTGSWPGSPSRNVGKIDEASELRRTVSDIKHNVQTQLSENAKTNKRVIGIHKELQKLHREAIQNTINSVTMVANLMPPLPSLSYQLPDESLGS

SEQ ID NO: 189407 - protein, 276 aa, Zea Mays
MQTRTEEDRTCHFQRTSQGPAVLCLCYNSDNNSFLEDISHLNRGDLQFVCRRWKWRQHAADKRLLREQKNALAVAALCSLSLGPPVHKSTTVSKLAVEELDIGHAFKERQARKQRSWSRLNVSELSGPILNENNPDARCLCWMLLVLVPPGMESQTNSFVSKWLLRKLMGYGTGYIGLVVSSAGLSIWTEWISFPNACCLSVVRASDQQVIDNDIWSCFGQYDMAAVVSTMLLVTGVTTLLHMFVGTRLSTCAGSILFIPGSCPCDHQLTRILWDQ

SEQ ID NO: 189408 - protein, 209 aa, Zea Mays
MSLSFRVVLLELMIGRRSMDKSRSAGLPPEVSFMLDLWYEETLLRYYAPALGFLMFAVGVNSSAKDLIETIKRPDAIAAGYIRQFVKLVTVDDPFITTDYMVSGGSTGSWPGSPSRNVGKIDEASELRRTVSDIKHNVQTQLSENAKTNKRVIGIHKELQKLLREAIQNTINSVTMVATLIASIAFVVIFNLPGQYFQDVNSGGDIDCE

SEQ ID NO: 189409 - protein, 167 aa, Zea Mays
MIGRRSMDKSRSAGYYAPALGFLMFAVGVNSSAKDLIETIKRPDAIAAGYIRQFVKLVTVDDPFITTDYMVSGGSTGSWPGSPSRNVGKIDEASELRRTVSDIKHNVQTQLSENAKTNKRVIGIHKELQKLHREAIQNTINSVTMVANLMPPLPSLSYQLPDESLGS

SEQ ID NO: 189410 - protein, 167 aa, Zea Mays
MAEDAPNAAAEGGQPAPPEGSADAAPSATAGAKAAEALLPSLSIWPPSQRTRDAVVRRLVQTLAAPSVLSQRYGAVPESEAERAAAAVEAEAFAAASKSAAAESPASIEEGIEVLQAYSKEVSRRLLELAKTRSAAATVPAEGSAQEAEDSSATSPAAEEAAVKEET

SEQ ID NO: 189411 - protein, 139 aa, Zea Mays
MSSFCQVSTEIGLGLTGFGVLFTLLGIIMLFDKGFLAMGNILFVSGVLLTIGLKPTVQFFTKPKNHKGSIFFGFGFFLVLIGWPVSGMLVESYGFITLFSGFWPTAAVYLQKSPSFGWIFHHPLVTSLITRFRGRRVPV

SEQ ID NO: 189412 - protein, 119 aa, Zea Mays
MPSHSVTSLDLKRNIENLERNGVTSMRSMVNLGSEVYMQAEVPDTRHIFVDIGLGFHVEFTWQEALQFISVREARLTRQIDEYTHLIASIKAQIKLVCEGIREVLQLPAEKELSPRNTW

SEQ ID NO: 189413 - protein, 78 aa, Zea Mays
MRFPFVQQSLRRHHVQLILISMYSLRWHMALPICSLFEPLFQVRLSSHHRAFPDPDARSCAHLPILGPRQVLITINDP

SEQ ID NO: 189414 - protein, 90 aa, Zea Mays
MVDGGGGGGGGAIALLFNLGGGGGGGGGGVVMPPPVILGGGGGGGGGGGGGGGGVFPPTPDLGGGGGGGGGGGGANACFCAPDDLGGDAP

SEQ ID NO: 189415 - protein, 335 aa, Zea Mays
MAPPEPEMFDVVIFGASGFTGKYVIREALKFLNASSSASPLRSLAVAGRSRDRIAAALRWAAAPAPPPEDVPILVADTSDPASLAALASRARVVLSCAGPFRLHGHAVAAACAAAGADCLDISGEPEFMERVESELHEPAARSGSLIISACGFDSVPAELGFLFHSRQWEPPSAPATVEAYVSLQSTKRIVGNIGTYESAVLGVANAGQLQALRRSRPRRPRPNIPGPPPPKGSLIEGHNPLGMWAMKLPSADTVVVKRTLSTLTEHPEGLPGAEETPEYADHRKKLWSSVKPAHFGVKIASRSLLILQSRPDRGRGEERLVQDVVCRSRLQQRG

SEQ ID NO: 189416 - protein, 169 aa, Zea Mays
MEAAMQTILVGMAHMEFRLTAALAGSGGEQASTSSSFASLFGSFESESAPPPVLYDCYDEPNDDEIAEVLALLEYNEGTSSATVLVDCNTTSKSPTKCSTMEFSDADSSARTRAVTYDEPSFHRFIPPPFRAGETNEEEDSSAEEAMAAMGAAASPSPFLLTVGNLLLP

SEQ ID NO: 189417 - protein, 944 aa, Zea Mays
MEITEEQRRRAEANRLAALEKRKRYAEAAAATAFPTSGASTFPAYDTAAAAEWRLAKCPRIAPPARQLPFVPLPPRPSPPPLPPTPPQPPVGFQVVLEVCGPDEFWVAVVPVEGRAYPGEAECLGAVQDCLAAASVVQYSATQSLSQSTHLRPVFKLVDYGVVLKCLKKLPGASVQEIPSSTKRIIQNIPRYHVQKWASDEEVHELLKKLPQQIKDALLPFQLEGVMFGLRRRGRCLIADEMGLGKTLQAIAIACCFKDEGSILIVCPAVLRYSWAEELERWDPSFMPKDIHIVFGRQDSLEHLNATPRAVIISYQMLSRLRESMVNRTWALMIVDESHNIRCTKKLEEKYETKAVLHLASKTERIILLSGTPSFSRPFDIYHQINMLWPHMLGTDKFDYAKKYCLLHVARSYQGKMFKDFSKGTRLTELNVLLSQTVMIRRLKEHLLNELPPKRRQIIRLKLKAPDIRAATSSCGKRVNPNSCNGTLTIELPSKSNDDENTKEEEEDDCKKSPRSLTPQEIGIAKLSGFSEWFSNHFIMNGFDANHNLDPQSSCQKTIIFAHHLKVLDGIQVFISENEIRFVRIDGSTLQRERKEAVDSFRLDPEVKVAIIGITAGGVGLDFSSAQNVIFVELPKSASELLQAEDRAHRRGQRNAVNIYIFCGKNTLDESHWLQLNQSLFRVSSLMNGKKDAVREIEVDQVCQLEEIKDTEETQRKLHPLENHNADLTHVPKKLLESDDLSIDGFLGIEDLEFDLDFTIRTIPLEFEDENPGTSLKNNPTPTVLEDRSCIDVSLSPAAVFCSVLSSCKSIKRLSGNSGSLSQAASVPDFPIQVESLRFEVSRHTGRIHLYSCVPGHDSRPKPLCENFLPEELNSPLCSPSDVKTRTLLLKKIPSFCNVFNAFIKEWLALRPIDQNKLLGKPLQLPLNLELCFLKDSINHSTEG

SEQ ID NO: 189418 - protein, 816 aa, Zea Mays
MLWPHMLGTDKFDYAKKYCLLHVARSYQGKMFKDFSKGTRLTELNVLLSQTVMIRRLKEHLLNELPPKRRQIIRLKLKAPDIRAATSSCGKRVNPNSCNGTLTIELPSKSNDDENTKEEEEDDCKKSPRSLTPQEIGIAKLSGFSEWFSNHFIMNGFDANHNLDPQSSCQKTIIFAHHLKVLDGIQVFISENEIRFVRIDGSTLQRERKEAVDSFRLDPEVKVAIIGITAGGVGLDFSSAQNVIFVELPKSASELLQAEDRAHRRGQRNAVNIYIFCGKNTLDESHWLQLNQSLFRVSSLMNGKKDAVREIEVDQVCQLEEIKDTEETQRKLHPLENHNADLTHVPKKLLESDDLSIDGFLGIEDLEFDLDFTIRTIPLEFEDENPGTSLKNNPTPTVLEDRSCIDVSLSPAAVFCSVLSSCKSIKSRKRLSGNSGSLSQAASVPDFPIQVESLRFEVSRHTGRIHLYSCVPGHDSRPKPLCENFLPEELNSPLCSPSDVKTRTLLLKKIPSFCNVFNAFIKEWLALRPIDQNKLLGKPLQLPLNLELCFLKDSINHSTEGILKGGSKRRAASLNDVSNPLPENAEWRQVVLRNGTCKERQYTQGWTIDDEPLCKLCQGLCNGRLAKSPEYFEDLFCSLACFQEYRLRTSGRALRQALFQIERGKCSQCKLDCCKLVKHIKLLPLGKREEYIRKVAPNIASRKKLLDKLVREPIDGNAWHADHIIPVYKGGGECKLENMRTLCVACHYEVTRTQHKELKEIRKKAKEHLKNALNKQKDKPSEATEELDDESLLIAVPGSAYSLGFPGNGSDEKAAE

SEQ ID NO: 189419 - protein, 1202 aa, Zea Mays
MEITEEQRRRAEANRLAALEKRKRYAEAAAATAFPTSGASTFPAYDTAAAAEWRLAKCPRIAPPARQLPFVPLPPRPSPPPLPPTPPQPPVGFQVVLEVCGPDEFWVAVVPVEGRAYPGEAECLGAVQDCLAAASVVQYSATQSLSQSTHLRPVFKLVDYGVVLKCLKKLPGASVQEIPSSTKRIIQNIPRYHVQKWASDEEVHELLKKLPQQIKDALLPFQLEGVMFGLRRRGRCLIADEMGLGKTLQAIAIACCFKDEGSILIVCPAVLRYSWAEELERWDPSFMPKDIHIVFGRQDSLEHLNATPRAVIISYQMLSRLRESMVNRTWALMIVDESHNIRCTKKLEEKYETKAVLHLASKTERIILLSGTPSFSRPFDIYHQINMLWPHMLGTDKFDYAKKYCLLHVARSYQGKMFKDFSKGTRLTELNVLLSQTVMIRRLKEHLLNELPPKRRQIIRLKLKAPDIRAATSSCGKRVNPNSCNGTLTIELPSKSNDDENTKEEEEDDCKKSPRSLTPQEIGIAKLSGFSEWFSNHFIMNGFDANHNLDPQSSCQKTIIFAHHLKVLDGIQVFISENEIRFVRIDGSTLQRERKEAVDSFRLDPEVKVAIIGITAGGVGLDFSSAQNVIFVELPKSASELLQAEDRAHRRGQRNAVNIYIFCGKNTLDESHWLQLNQSLFRVSSLMNGKKDAVREIEVDQVCQLEEIKDTEETQRKLHPLENHNADLTHVPKKLLESDDLSIDGFLGIEDLEFDLDFTIRTIPLEFEDENPGTSLKNNPTPTVLEDRSCIDVSLSPAAVFCSVLSSCKSIKSRKRLSGNSGSLSQAASVPDFPIQVESLRFEVSRHTGRIHLYSCVPGHDSRPKPLCENFLPEELNSPLCSPSDVKTRTLLLKKIPSFCNVFNAFIKEWLALRPIDQNKLLGKPLQLPLNLELCFLKDSINHSTEGILKGGSKRRAASLNDVSNPLPENAEWRQVVLRNGTCKERQYTQGWTIDDEPLCKLCQGLCNGRLAKSPEYFEDLFCSLACFQEYRLRTSGRALRQALFQIERGKCSQCKLDCCKLVKHIKLLPLGKREEYIRKVAPNIASRKKLLDKLVREPIDGNAWHADHIIPVYKGGGECKLENMRTLCVACHYEVTRTQHKELKEIRKKAKEHLKNALNKQKDKPSEATEELDDESLLIAVPGSAYSLGFPGNGSDEKAAE

SEQ ID NO: 189420 - protein, 1172 aa, Zea Mays
MEITEEQRRRAEANRLAALEKRKRYAEAAAATAFPTSGASTFPAYDTAAAAEWRLAKCPRIAPPARQLPFVPLPPRPSPPPLPPTPPQPPVGFQVVLEVCGPDEFWVAVVPVEGRAYPGEAECLGAVQDCLAAASVVQYSATQSLSQSTHLRPVFKLVDYGVVLKCLKKLPGASVQEIPSSTKRIIQNIPRYHVQKWASDEEVHELLKKLPQQIKDALLPFQLEGVMFGLRRRGRCLIADEMGLGKTLQAIAIACCFKDEGSILIVCPAVLRYSWAEELERWDPSFMPKDIHIVFGRQDSLEHLNATPRAVIISYQMLSRLRESMVNRTWALMIVDESHNIRCTKKLEEKYETKAVLHLASKTERIILLSGTPSFSRPFDIYHQINMLWPHMLGTDKFDYAKKYCLLHVARSYQGKMFKDFSKGTRLTELNVLLSQTVMIRRLKEHLLNELPPKRRQIIRLKLKAPDIRAATSSCGKRVNPNSCNGTLTIELPSKSNDDENTKEEEEDDCKKSPRSLTPQEIGIAKLSGFSEWFSNHFIMNGFDANHNLDPQSSCQKTIIFAHHLKVLDGIQVFISENEIRFVRIDGSTLQRERKEAVDSFRLDPEVKVAIIGITAGGVGLDFSSAQNVIFVELPKSASELLQAEDRAHRRGQRNAVNIYIFCGKLNQSLFRVSSLMNGKKDAVREIEVDQVCQLEEIKDTEETQRKLHPLENHNADLTHVPKKLLESDDLSIDGFLGIEDLEFDLDFTIRTIPLEFEDENPGTSLKNNPTPTVLEDRSCIDVSLSPAAVFCSVLSSCKSIKSRKRLSGNSGSLSQAASVPDFPIQVESLRFEVSRHTGRIHLYSCVPGHDSRPKPLCENFLPEELNSPLCSPSDVKTRTLLLKKIPSFCNVFNAFIKEWLALRPIDQNKLLGKPLQLPLNLELCFLKDSINHSTEGILKGGSKRRAASLNDVSNPLPENAEWRQVVLRNGTCKERQYTQGWTIDDEPLCKLCQGLCNGRLAKSPEYFEDLFCSLACFQEYRLRTSGRALRQALFQIERGKCSQCKLDCCKLVKHIKLLPLGKREEYIRKVAPNIASRKKLLDKLVREPIDGNAWHADHIIPVYKGGGECKLENMRTLCVACHYEVTRTQHKELKEIRKKAKEHLKNALNKQKDKVSSLSSRLQLSLNHFCK

SEQ ID NO: 189421 - protein, 794 aa, Zea Mays
MLWPHMLGTDKFDYAKKYCLLHVARSYQGKMFKDFSKGTRLTELNVLLSQTVMIRRLKEHLLNELPPKRRQIIRLKLKAPDIRAATSSCGKRVNPNSCNGTLTIELPSKSNDDENTKEEEEDDCKKSPRSLTPQEIGIAKLSGFSEWFSNHFIMNGFDANHNLDPQSSCQKTIIFAHHLKVLDGIQVFISENEIRFVRIDGSTLQRERKEAVDSFRLDPEVKVAIIGITAGGVGLDFSSAQNVIFVELPKSASELLQNTLDESHWLQLNQSLFRVSSLMNGKKDAVREIEVDQVCQLEEIKDTEETQRKLHPLENHNADLTHVPKKLLESDDLSIDGFLGIEDLEFDLDFTIRTIPLEFEDENPGTSLKNNPTPTVLEDRSCIDVSLSPAAVFCSVLSSCKSIKSRKRLSGNSGSLSQAASVPDFPIQVESLRFEVSRHTGRIHLYSCVPGHDSRPKPLCENFLPEELNSPLCSPSDVKTRTLLLKKIPSFCNVFNAFIKEWLALRPIDQNKLLGKPLQLPLNLELCFLKDSINHSTEGILKGGSKRRAASLNDVSNPLPENAEWRQVVLRNGTCKERQYTQGWTIDDEPLCKLCQGLCNGRLAKSPEYFEDLFCSLACFQEYRLRTSGRALRQALFQIERGKCSQCKLDCCKLVKHIKLLPLGKREEYIRKVAPNIASRKKLLDKLVREPIDGNAWHADHIIPVYKGGGECKLENMRTLCVACHYEVTRTQHKELKEIRKKAKEHLKNALNKQKDKPSEATEELDDESLLIAVPGSAYSLGFPGNGSDEKAAE

SEQ ID NO: 189422 - protein, 1182 aa, Zea Mays
MEITEEQRRRAEANRLAALEKRKRYAEAAAATAFPTSGASTFPAYDTAAAAEWRLAKCPRIAPPARQLPFVPLPPRPSPPPLPPTPPQPPVGFQVVLEVCGPDEFWVAVVPVEGRAYPGEAECLGAVQDCLAAASVVQYSATQSLSQSTHLRPVFKLVDYGVVLKCLKKLPGASVQEIPSSTKRIIQNIPRYHVQKWASDEEVHELLKKLPQQIKDALLPFQLEGVMFGLRRRGRCLIADEMGLGKTLQAIAIACCFKDEGSILIVCPAVLRYSWAEELERWDPSFMPKDIHIVFGRQDSLEHLNATPRAVIISYQMLSRLRESMVNRTWALMIVDESHNIRCTKKLEEKYETKAVLHLASKTERIILLSGTPSFSRPFDIYHQINMLWPHMLGTDKFDYAKKYCLLHVARSYQGKMFKDFSKGTRLTELNVLLSQTVMIRRLKEHLLNELPPKRRQIIRLKLKAPDIRAATSSCGKRVNPNSCNGTLTIELPSKSNDDENTKEEEEDDCKKSPRSLTPQEIGIAKLSGFSEWFSNHFIMNGFDANHNLDPQSSCQKTIIFAHHLKVLDGIQVFISENEIRFVRIDGSTLQRERKEAVDSFRLDPEVKVAIIGITAGGVGLDFSSAQNVIFVELPKSASELLQAEDRAHRRGQRNAVNIYIFCGKNTLDESHWLQLNQSLFRVSSLMNGKKDAVREIEVDQVCQLEEIKDTEETQRKLHPLENHNADLTHVPKKLLESDDLSIDGFLGIEDLEFDLDFTIRTIPLEFEDENPGTSLKNNPTPTVLEDRSCIDVSLSPAAVFCSVLSSCKSIKSRKRLSGNSGSLSQAASVPDFPIQVESLRFEVSRHTGRIHLYSCVPGHDSRPKPLCENFLPEELNSPLCSPSDVKTRTLLLKKIPSFCNVFNAFIKEWLALRPIDQNKLLGKPLQLPLNLELCFLKDSINHSTEGILKGGSKRRAASLNDVSNPLPENAEWRQVVLRNGTCKERQYTQGWTIDDEPLCKLCQGLCNGRLAKSPEYFEDLFCSLACFQEYRLRTSGRALRQALFQIERGKCSQCKLDCCKLVKHIKLLPLGKREEYIRKVAPNIASRKKLLDKLVREPIDGNAWHADHIIPVYKGGGECKLENMRTLCVACHYEVTRTQHKELKEIRKKAKEHLKNALNKQKDKVSSLSSRLQLSLNHFCK

SEQ ID NO: 189423 - protein, 1200 aa, Zea Mays
MEITEEQRRRAEANRLAALEKRKRYAEAAAATAFPTSGASTFPAYDTAAAAEWRLAKCPRIAPPARQLPFVPLPPRPSPPPLPPTPPQPPVGFQVVLEVCGPDEFWVAVVPVEGRAYPGEAECLGAVQDCLAAASVVQYSATQSLSQSTHLRPVFKLVDYGVVLKCLKKLPGASVQEIPSSTKRIIQNIPRYHVQKWASDEEVHELLKKLPQQIKDALLPFQLEGVMFGLRRRGRCLIADEMGLGKTLQAIAIACCFKDEGSILIVCPAVLRYSWAEELERWDPSFMPKDIHIVFGRQDSLEHLNATPRAVIISYQMLSRLRESMVNRTWALMIVDESHNIRCTKKLEEKYETKAVLHLASKTERIILLSGTPSFSRPFDIYHQINMLWPHMLGTDKFDYAKKYCLLHVARSYQGKMFKDFSKGTRLTELNVLLSQTVMIRRLKEHLLNELPPKRRQIIRLKLKAPDIRAATSSCGKRVNPNSCNGTLTIELPSKSNDDENTKEEEEDDCKKSPRSLTPQEIGIAKLSGFSEWFSNHFIMNGFDANHNLDPQSSCQKTIIFAHHLKVLDGIQVFISENEIRFVRIDGSTLQRERKEAVDSFRLDPEVAIIGITAGGVGLDFSSAQNVIFVELPKSASELLQAEDRAHRRGQRNAVNIYIFCGKNTLDESHWLQLNQSLFRVSSLMNGKKDAVREIEVDQVCQLEEIKDTEETQRKLHPLENHNADLTHVPKKLLESDDLSIDGFLGIEDLEFDLDFTIRTIPLEFEDENPGTSLKNNPTPTVLEDRSCIDVSLSPAAVFCSVLSSCKSIKSRKRLSGNSGSLSQAASVPDFPIQVESLRFEVSRHTGRIHLYSCVPGHDSRPKPLCENFLPEELNSPLCSPSDVKTRTLLLKKIPSFCNVFNAFIKEWLALRPIDQNKLLGKPLQLPLNLELCFLKDSINHSTEGILKGGSKRRAASLNDVSNPLPENAEWRQVVLRNGTCKERQYTQGWTIDDEPLCKLCQGLCNGRLAKSPEYFEDLFCSLACFQEYRLRTSGRALRQALFQIERGKCSQCKLDCCKLVKHIKLLPLGKREEYIRKVAPNIASRKKLLDKLVREPIDGNAWHADHIIPVYKGGGECKLENMRTLCVACHYEVTRTQHKELKEIRKKAKEHLKNALNKQKDKPSEATEELDDESLLIAVPGSAYSLGFPGNGSDEKAAE

SEQ ID NO: 189424 - protein, 774 aa, Zea Mays
MLWPHMLGTDKFDYAKKYCLLHVARSYQGKMFKDFSKGTRLTELNVLLSQTVMIRRLKEHLLNELPPKRRQIIRLKLKAPDIRAATSSCGKRVNPNSCNGTLTIELPSKSNDDENTKEEEEDDCKKSPRSLTPQEIGIAKLSGFSEWFSNHFIMNGFDANHNLDPQSSCQKTIIFAHHLKVLDGIQVFISENEIRFVRIDGSTLQRERKEAVDSFRLDPEVKVAIIGITAGGVGLDFSSAQNVIFVELPKSASELLQNTLDESHWLQLNQSLFRVSSLMNGKKDAVREIEVDQVCQLEEIKDTEETQRKLHPLENHNADLTHVPKKLLESDDLSIDGFLGIEDLEFDLDFTIRTIPLEFEDENPGTSLKNNPTPTVLEDRSCIDVSLSPAAVFCSVLSSCKSIKSRKRLSGNSGSLSQAASVPDFPIQVESLRFEVSRHTGRIHLYSCVPGHDSRPKPLCENFLPEELNSPLCSPSDVKTRTLLLKKIPSFCNVFNAFIKEWLALRPIDQNKLLGKPLQLPLNLELCFLKDSINHSTEGILKGGSKRRAASLNDVSNPLPENAEWRQVVLRNGTCKERQYTQGWTIDDEPLCKLCQGLCNGRLAKSPEYFEDLFCSLACFQEYRLRTSGRALRQALFQIERGKCSQCKLDCCKLVKHIKLLPLGKREEYIRKVAPNIASRKKLLDKLVREPIDGNAWHADHIIPVYKGGGECKLENMRTLCVACHYEVTRTQHKELKEIRKKAKEHLKNALNKQKDKVSSLSSRLQLSLNHFCK

SEQ ID NO: 189425 - protein, 746 aa, Zea Mays
MRKNIACCMLHEVIRGKCLRTSLRAIRRLKEHLLNELPPKRRQIIRLKLKAPDIRAATSSCGKRVNPNSCNGTLTIELPSKSNDDENTKEEEEDDCKKSPRSLTPQEIGIAKLSGFSEWFSNHFIMNGFDANHNLDPQSSCQKTIIFAHHLKVLDGIQVFISENEIRFVRIDGSTLQRERKEAVDSFRLDPEVKVAIIGITAGGVGLDFSSAQNVIFVELPKSASELLQNTLDESHWLQLNQSLFRVSSLMNGKKDAVREIEVDQVCQLEEIKDTEETQRKLHPLENHNADLTHVPKKLLESDDLSIDGFLGIEDLEFDLDFTIRTIPLEFEDENPGTSLKNNPTPTVLEDRSCIDVSLSPAAVFCSVLSSCKSIKSRKRLSGNSGSLSQAASVPDFPIQVESLRFEVSRHTGRIHLYSCVPGHDSRPKPLCENFLPEELNSPLCSPSDVKTRTLLLKKIPSFCNVFNAFIKEWLALRPIDQNKLLGKPLQLPLNLELCFLKDSINHSTEGILKGGSKRRAASLNDVSNPLPENAEWRQVVLRNGTCKERQYTQGWTIDDEPLCKLCQGLCNGRLAKSPEYFEDLFCSLACFQEYRLRTSGRALRQALFQIERGKCSQCKLDCCKLVKHIKLLPLGKREEYIRKVAPNIASRKKLLDKLVREPIDGNAWHADHIIPVYKGGGECKLENMRTLCVACHYEVTRTQHKELKEIRKKAKEHLKNALNKQKDKVSSLSSRLQLSLNHFCK

SEQ ID NO: 189426 - protein, 886 aa, Zea Mays
MLSRLRESMVNRTWALMIVDESHNIRCTKKLEEKYETKAVLHLASKTERIILLSGTPSFSRPFDIYHQINMLWPHMLGTDKFDYAKKYCLLHVARSYQGKMFKDFSKGTRLTELNVLLSQTVMIRRLKEHLLNELPPKRRQIIRLKLKAPDIRAATSSCGKRVNPNSCNGTLTIELPSKSNDDENTKEEEEDDCKKSPRSLTPQEIGIAKLSGFSEWFSNHFIMNGFDANHNLDPQSSCQKTIIFAHHLKVLDGIQVFISENEIRFVRIDGSTLQRERKEAVDSFRLDPEVKVAIIGITAGGVGLDFSSAQNVIFVELPKSASELLQAEDRAHRRGQRNAVNIYIFCGKNTLDESHWLQLNQSLFRVSSLMNGKKDAVREIEVDQVCQLEEIKDTEETQRKLHPLENHNADLTHVPKKLLESDDLSIDGFLGIEDLEFDLDFTIRTIPLEFEDENPGTSLKNNPTPTVLEDRSCIDVSLSPAAVFCSVLSSCKSIKSRKRLSGNSGSLSQAASVPDFPIQVESLRFEVSRHTGRIHLYSCVPGHDSRPKPLCENFLPEELNSPLCSPSDVKTRTLLLKKIPSFCNVFNAFIKEWLALRPIDQNKLLGKPLQLPLNLELCFLKDSINHSTEGILKGGSKRRAASLNDVSNPLPENAEWRQVVLRNGTCKERQYTQGWTIDDEPLCKLCQGLCNGRLAKSPEYFEDLFCSLACFQEYRLRTSGRALRQALFQIERGKCSQCKLDCCKLVKHIKLLPLGKREEYIRKVAPNIASRKKLLDKLVREPIDGNAWHADHIIPVYKGGGECKLENMRTLCVACHYEVTRTQHKELKEIRKKAKEHLKNALNKQKDKPSEATEELDDESLLIAVPGSAYSLGFPGNGSDEKAAE

SEQ ID NO: 189427 - protein, 791 aa, Zea Mays
MLWPHMLGTDKFDYAKKYCLLHVARSYQGKMFKDFSKGTRLTELNVLLSQTVMIRRLKEHLLNELPPKRRQIIRLKLKAPDIRAATSSCGKRVNPNSCNGTLTIELPSKSNDDENTKEEEEDDCKKSPRSLTPQEIGIAKLSGFSEWFSNHFIMNGFDANHNLDPQSSCQKTIIFAHHLKVLDGIQVFISENEIRFVRIDGSTLQRERKEAVDSFRLDPEVKVAIIGITAGGVGLDFSSAQNVIFVELPKSASELLQNTLDESHWLQLNQSLFRVSSLMNGKKDAVREIEVDQVCQLEEIKDTEETQRKLHPLENHNADLTHVPKKLLESDDLSIDGFLGIEDLEFDLDFTIRTIPLEFEDENPGTSLKNNPTPTVLEDRSCIDVSLSPAAVFCSVLSSCKSIKRLSGNSGSLSQAASVPDFPIQVESLRFEVSRHTGRIHLYSCVPGHDSRPKPLCENFLPEELNSPLCSPSDVKTRTLLLKKIPSFCNVFNAFIKEWLALRPIDQNKLLGKPLQLPLNLELCFLKDSINHSTEGILKGGSKRRAASLNDVSNPLPENAEWRQVVLRNGTCKERQYTQGWTIDDEPLCKLCQGLCNGRLAKSPEYFEDLFCSLACFQEYRLRTSGRALRQALFQIERGKCSQCKLDCCKLVKHIKLLPLGKREEYIRKVAPNIASRKKLLDKLVREPIDGNAWHADHIIPVYKGGGECKLENMRTLCVACHYEVTRTQHKELKEIRKKAKEHLKNALNKQKDKPSEATEELDDESLLIAVPGSAYSLGFPGNGSDEKAAE

SEQ ID NO: 189428 - protein, 691 aa, Zea Mays
MLWPHMLGTDKFDYAKKYCLLHVARSYQGKMFKDFSKGTRLTELNVLLSQTVMIRRLKEHLLNELPPKRRQIIRLKLKAPDIRAATSSCGKRVNPNSCNGTLTIELPSKSNDDENTKEEEEDDCKKSPRSLTPQEIGIAKLSGFSEWFSNHFIMNGFDANHNLDPQSSCQKTIIFAHHLKVLDGIQVFISENEIRFVRIDGSTLQRERKEAVDSFRLDPEVKVAIIGITAGGVGLDFSSAQNVIFVELPKSASELLQNTLDESHWLQLNQSLFRVSSLMNGKKDAVREIEVDQVCQLEEIKDTEETQRKLHPLENHNADLTHVPKKLLESDDLSIDGFLGIEDLEFDLDFTIRTIPLEFEDENPGTSLKNNPTPTVLEDRSCIDVSLSPAAVFCSVLSSCKSIKSRKRLSGNSGSLSQAASVPDFPIQVESLRFEGILKGGSKRRAASLNDVSNPLPENAEWRQVVLRNGTCKERQYTQGWTIDDEPLCKLCQGLCNGRLAKSPEYFEDLFCSLACFQEYRLRTSGRALRQALFQIERGKCSQCKLDCCKLVKHIKLLPLGKREEYIRKVAPNIASRKKLLDKLVREPIDGNAWHADHIIPVYKGGGECKLENMRTLCVACHYEVTRTQHKELKEIRKKAKEHLKNALNKQKDKPSEATEELDDESLLIAVPGSAYSLGFPGNGSDEKAAE

SEQ ID NO: 189429 - protein, 284 aa, Zea Mays
MEDDDDCPPLAVELPPRVPSPPEQSPSDASPVGITVITGYLGAGKSTLVNYILNEQHGKRIAVILNEFGEEIGVERAMINEGQGGALIEEWVELANGCVCCSVKHSLVQALEQLVQRKDRMDHILLETTGLADPAPLVSVLWLDDQLESSIVLDSIITVIDAKNFRVQIDEHKNSSSFPEAFHQIAFADVVILNKIDLVEDSLEDLEKHIRDVNALVTVVRSVRCQVDLNEVFNRQAYGAKVESWLEDLLWEKKSIMDIYRCKGILYIHDSDQVHTLQGLSVLM

SEQ ID NO: 189430 - protein, 241 aa, Zea Mays
MLQTGTVPDEESYNLVVGLLIRQNLVDSSLKYLDLMLKSGYTPSLTVFTDYIQACVRSGRLDTLTSIIQKCKTADKIKVLCPQWAWCIDISEAAFEANNSKLALFALEFLARWIVRGENVKPPVQLSVNEGLVISALSAAGRTFSTDLLNAAWSLLRKSLRQKRAPTPETYLAKIYAHSSIGQLQRAFGTLHEFENAYGNSKDVDLELFSPFTSLHPLVVACCKDGFSTLDLVHSHITCYT

SEQ ID NO: 189431 - protein, 171 aa, Zea Mays
MPVNPPPPPPGSSSLAPAGASYFPLPFHLQQHQPPPPQVPPPMAASSYQQYQQQLHQAHQLFQRDAQTITPEALQSVKAALATSDVLDPVAAANARLSDPSTSKKPIPRRAAGQSWEDPTLTEWPENDYRLFCGDLGNEVNDDVLSKAFSRFPSFNMARITSISYGSFHGC

SEQ ID NO: 189432 - protein, 83 aa, Zea Mays
MDLFMVVRDKRTGKTKGYGFVSFSNPTDLAAAIKEMNGKYVGNRPIKLRKSNWKERTDVEALERQKNHVKRKPKIPKKTILHK

SEQ ID NO: 189433 - protein, 105 aa, Zea Mays
MGPEGGVDGPMVSYDNQRCVDALDAALERRGVALPRPNATCDTVLCFCGIRLHQIGSLRCPAAARNATPTAAVKALEKSCRNASYAGCSRCVQSLQKVNTQENKY

SEQ ID NO: 189434 - protein, 213 aa, Zea Mays
MGDPGTSANPTVRHRLSPHLVGYEEYKSEYITTQKKAYFDLHKDEDWLRNKYHLTNLENVIESYHYNLVKHKKRTGKNYFKLFLPTTAKWKSGHMANVVPSLCVARNVACNVRGGVFRLAYFSFSCKEFDENILRKVFELYYENGLLDLSYAPDVGDYLVCEDTSFVPGNKDQAPIPECMMGTEVEKRLNGQGLALFIGCYNGTRCCRACSEW

SEQ ID NO: 189435 - protein, 123 aa, Zea Mays
MGDPGTSANPTVRHRLSPHLVGYEEYKSEYITTQKKAYFDLHKDEDWLRNKYHLTNLENVIESYHYNLVKHKKRTGKNYFKLFLPTTAKWKSGHMANVVPSLCVARNVACNVRGGVFSLMRIY

SEQ ID NO: 189436 - protein, 145 aa, Zea Mays
MGDPGTSANPTVRHRLSPHLVGYEEYKSEYITTQKKAYFDLHKDEDWLRNKYHLTNLENVIERVLHYLLDAIMAQGAVEPALNGDSLFGPVVPRMKRKTPSELRMANVVPGLCVARNVACNVRGGVFRIPVLYQATKIRLLYLRA

SEQ ID NO: 189437 - protein, 271 aa, Zea Mays
MYCSQDLNTKDLETSVIVLVHGGGFGAWCWYKTISLLEDSGFRVNAIDLTGSGIHSYDTNKICSLSEYAEPLTSYLEGLGDAEKVILVAHDLGGACVSYAMEMFPTKVAKAVFLCAAMLTNGNSALDMFQQQMDTNGTLQKAQAFVYSNGKDRPPTAINVDRALLRDLLFNQSPSKDVSLASVSMRPIPFAPVLEKLVLTAENYGSVRRFYVETTEDNAIPLPLQQSMCGANPPEKVLRLKGADHAPFFSKPQALHKTLVEIAAMPPVGAS

SEQ ID NO: 189438 - protein, 128 aa, Zea Mays
MIDDAMLRPGRFGKKHYVPIPGARERVSILKALARRIPVSSTVDLDVLALREECSNFTGADLASLVDEAAMLAMAERWMYLDSRTSTSPSSLIEPSHFEEALSKVKPSISKKQKRLYEKMRKKHLSTT

SEQ ID NO: 189439 - protein, 435 aa, Zea Mays
MTAEQEWSEVQVRALDGRSTVVKLPLGASVRDLKAALRTSFLPAQVSPSFHLFLKGAKLRLDAEIGSLAIGDGDFIVLVPFTRTPQQHFSVSTASQDQGHCPPKQPEVSSAANSAWQDIMDDLSAMPASPQSDAASKDFYSSCDPCSGRFTEDMKAGQISTSGSSRKRRKTCKENGNGSPQMVSSSEANGTAEKHNISKKSGVAKSAAMLCHDMQPLKPAEMVEHLKQGLGKEGQIVHIQEISSREASFTELPCNLSEAMREALKSIGISRLYSHQSQAITSSISGRHIVVATSTSSGKSLCYNIPVLECLSQDLMACALYIFPMKALAQDQLRTLIKLKNASHIDVDVKIYDGDTPREDRLWIRDNARLLITNPDMLHVSILPYHGQFQRILSNLRYIVIDEAHSYKGAFGCHTALIIRRLKRICSNGMYNFFI

SEQ ID NO: 189440 - protein, 464 aa, Zea Mays
MTAEQEWSEVQVRALDGRSTVVKLPLGASVRDLKAALRTSFLPAQVSPSFHLFLKGAKLRLDAEIGSLAIGDGDFIVLVPFTRTPQQHFSVSTASQDQGHCPPKQPEVSSAANSAWQDIMDDLSAMPASPQSDAASKDFYSSCDPCSGRFTEDMKAGQISTSGSSRKRRKTCKENGNGSPQMVSSSEANGTAEKHNISKKSGVAKSAAMLCHDMQPLKPAEMVEHLKQGLGKEGQIVHIQEISSREASFTELPCNLSEAMREALKSIGISRLYSHQSQAITSSISGRHIVVATSTSSGKSLCYNIPVLECLSQDLMACALYIFPMKALAQDQLRTLIKLKNASHIDVDVKIYDGDTPREDRLWIRDNARLLITNPDMLHVSILPYHGQFQRILSNLRYIVIDEAHSYKGAFGCHTALIIRRLKRICSNVYGSCPTFIFCTATSANPCEHVMVQRGLSQPCALMW

SEQ ID NO: 189441 - protein, 1014 aa, Zea Mays
MTAEQEWSEVQVRALDGRSTVVKLPLGASVRDLKAALRTSFLPAQVSPSFHLFLKGAKLRLDAEIGSLAIGDGDFIVLVPFTRTPQQHFSVSTASQDQGHCPPKQPEVSSAANSAWQDIMDDLSAMPASPQSDAASKDFYSSCDPCSGRFTEDMKAGQISTSGSSRKRRKTCKENGNGSPQMVSSSEANGTAEKHNISKKSGVAKSAAMLCHDMQPLKPAEMVEHLKQGLGKEGQIVHIQEISSREASFTELPCNLSEAMREALKSIGISRLYSHQSQAITSSISGRHIVVATSTSSGKSLCYNIPVLECLSQDLMACALYIFPMKALAQDQLRTLIKLKNASHIDVDVKIYDGDTPREDRLWIRDNARLLITNPDMLHVSILPYHGQFQRILSNLRYIVIDEAHSYKGAFGCHTALIIRRLKRICSNVELIQNDGSPCGSKYFLLWNPSLPMTEGRSKASSVHRRSSSIVEVSYLFSEMVQHGLRCIAFCKSRKLCELVLAYTREILQETAKELVDSICVYRAGYIAEDRRKIEADLFGGKLHGVAATNALELGIDVGHIDATLHLGFPGSIARSVKNDIFNEAQCLSCHPAKIQNFNCSLWQQAGRSGRRAKQSLAIYVAFEGPLDQYFMKFPHKLFGRSIEHCQVDSHNLKVLEQHLPCAAYEHPLCVQYDECYFGSSLDSVMTTLKDKGYIINNRAGPFSSSMWNYIGPEKSPSQAVSIRAIEQDRYKVIDKLNSRLLEEIEESKAFFQVYEGAVYMHQGANYLVEELDLASRTAFCRKADLKYYTKTRDYTDINVLGGEFAYLPTSICRTNRVKTTAQANDCTVTTKWFGFYRISKSSNTISDSFELNLPPYSFTSQAVWVRIPHSVKMTVEESKLEFRGGSHAASHALLNIVPLHMMCSASDLGTECANPHESRGIPDRILLYDRHPGGIGIASQAQMLFEELLLAALEVVSTCNCTSAVGCPNCIQSLTCSEYNEVLDKEAAILILKGVIDYERSYFEAEDASQRSC

SEQ ID NO: 189442 - protein, 560 aa, Zea Mays
MTAEQEWSEVQVRALDGRSTVVKLPLGASVRDLKAALRTSFLPAQVSPSFHLFLKGAKLRLDAEIGSLAIGDGDFIVLVPFTRTPQQHFSVSTASQDQGHCPPKQPEVSSAANSAWQDIMDDLSAMPASPQSDAASKDFYSSCDPCSGRFTEDMKAGQISTSGSSRKRRKTCKENGNGSPQMVSSSEANGTAEKHNISKKSGVAKSAAMLCHDMQPLKPAEMVEHLKQGLGKEGQIVHIQEISSREASFTELPCNLSEAMREALKSIGISRLYSHQSQAITSSISGRHIVVATSTSSGKSLCYNIPVLECLSQDLMACALYIFPMKALAQDQLRTLIKLKNASHIDVDVKIYDGDTPREDRLWIRDNARLLITNPDMLHVSILPYHGQFQRILSNLRYIVIDEAHSYKGAFGCHTALIIRRLKRICSNVYGSCPTFIFCTATSANPCEHVMELANLDEVELIQNDGSPCGSKYFLLWNPSLPMTEGRSKASSVHRRSSSIVEVSYLFSEMVQHGLRCIAFCKSRKLCELVLAYTREILQETAKELVDSICVYRAGYIAEK

SEQ ID NO: 189443 - protein, 842 aa, Zea Mays
MTAEQEWSEVQVRALDGRSTVVKLPLGASVRDLKAALRTSFLPAQVSPSFHLFLKGAKLRLDAEIGSLAIGDGDFIVLVPFTRTPQQHFSVSTASQDQGHCPPKQPEVSSAANSAWQDIMDDLSAMPASPQSDAASKDFYSSCDPCSGRFTEDMKAGQISTSGSSRKRRKTCKENGNGSPQMVSSSEANGTAEKHNISKKSGVAKSAAMLCHDMQPLKPAEMVEHLKQGLGKEGQIVHIQEISSREASFTELPCNLSEAMREALKSIGISRLYSHQSQAITSSISGRHIVVATSTSSGKSLCYNIPVLECLSQDLMACALYIFPMKALAQDQLRTLIKLKNASHIDVDVKIYDGDTPREDRLWIRDNARLLITNPDMLHVSILPYHGQFQRILSNLRYIVIDEAHSYKGAFGCHTALIIRRLKRICSNVYGSCPTFIFCTATSANPCEHVMELANLDEVELIQNDGSPCGSKYFLLWNPSLPMTEGRSKASSVHRRSSSIVEVSYLFSEMVQHGLRCIAFCKSRKLCELVLAYTREILQETAKELVDSICVYRAGYIAEDRRKIEADLFGGKLHGVAATNALELGIDVGHIDATLHLGFPGSIASLWQQAGRSGRRAKQSLAIYVAFEGPLDQYFMKFPHKLFGRSIEHCQVDSHNLKVLEQHLPCAAYEHPLCVQYDECYFGSSLDSVMTTLKDKGYIINNRAGPFSSSMWNYIGPEKSPSQAVSIRAIEQDRYKVIDKLNSRLLEEIEESKAFFQGANYLVEELDLASRTAFCRKADLKYYTKTRDYTDINVLGGEFVCSQGYYYSSFLYIFFIIDSSPGVVFSTLFCLLLFCLVYLTLV

SEQ ID NO: 189444 - protein, 646 aa, Zea Mays
MTAEQEWSEVQVRALDGRSTVVKLPLGASVRDLKAALRTSFLPAQVSPSFHLFLKGAKLRLDAEIGSLAIGDGDFIVLVPFTRTPQQHFSVSTASQDQGHCPPKQPEVSSAANSAWQDIMDDLSAMPASPQSDAASKDFYSSCDPCSGRFTEDMKAGQISTSGSSRKRRKTCKENGNGSPQMVSSSEANGTAEKHNISKKSGVAKSAAMLCHDMQPLKPAEMVEHLKQGLGKEGQIVHIQEISSREASFTELPCNLSEAMREALKSIGISRLYSHQSQAITSSISGRHIVVATSTSSGKSLCYNIPVLECLSQDLMACALYIFPMKALAQDQLRTLIKLKNASHIDVDVKIYDGDTPREDRLWIRDNARLLITNPDMLHVSILPYHGQFQRILSNLRYIVIDEAHSYKGAFGCHTALIIRRLKRICSNVYGSCPTFIFCTATSANPCEHVMELANLDEVELIQNDGSPCGSKYFLLWNPSLPMTEGRSKASSVHRRSSSIVEVSYLFSEMVQHGLRCIAFCKSRKLCELVLAYTREILQETAKELVDSICVYRAGYIAEDRRKIEADLFGGKLHGVAATNALELGIDVGHIDATLHLGFPGSIASLWQQAGRSGRRAKQSLAIYVAFEGPLDQYFMKFPHKLFGRF

SEQ ID NO: 189445 - protein, 986 aa, Zea Mays
MTAEQEWSEVQVRALDGRSTVVKLPLGASVRDLKAALRTSFLPAQVSPSFHLFLKGAKLRLDAEIGSLAIGDGDFIVLVPFTRTPQQHFSVSTASQDQGHCPPKQPEVSSAANSAWQDIMDDLSAMPASPQSDAASKDFYSSCDPCSGRFTEDMKAGQISTSGSSRKRRKTCKENGNGSPQMVSSSEANGTAEKHNISKKSGVAKSAAMLCHDMQPLKPAEMVEHLKQGLGKEGQIVHIQEISSREASFTELPCNLSEAMREALKSIGISRLYSHQSQAITSSISGRHIVVATSTSSGKSLCYNIPVLECLSQDLMACALYIFPMKALAQDQLRTLIKLKNASHIDVDVKIYDGDTPREDRLWIRDNARLLITNPDMLHVSILPYHGQFQRILSNLRYIVIDEAHSYKGAFGCHTALIIRRLKRICSNVYGSCPTFIFCTATSANPCEHVMELANLDEVELIQNDGSPCGSKYFLLWNPSLPMTEGRSKASSVHRRSSSIVEVSYLFSEMVQHGLRCIAFCKSRKLCELVLAYTREILQETAKELVDSICVYRAGYIAEDRRKIEADLFGGKLHGVAATNALELGIDVGHIDATLHLGFPGSIASLWQQAGRSGRRAKQSLAIYVAFEGPLDQYFMKFPHKLFGRSIEHCQVDSHNLKVLEQHLPCAAYEHPLCVQYDECYFGSSLDSVMTTLKDKGYIINNRAGPFSSSMWNYIGPEKSPSQAVSIRAIEQDRYKVIDKLNSRLLEEIEESKAFFQVYEGAVYMHQGANYLVEELDLASRTAFCRKADLKYYTKTRDYTDINVLGGEFAYLPTSICRTNRVKTTAQANDCTVTTKWFGFYRISKSSNTISDSFELNLPPYSFTSQAVWVRIPHSVKMTVEESKLEFRGGSHAASHALLNIVPLHMMCSASDLGTECANPHESRGIPDRILLYDRHPGGIGIASQSLTCSEYNEVLDKEAAILILKGVIDYERSYFEAEDASQRSC

SEQ ID NO: 189446 - protein, 329 aa, Zea Mays
MTTLKDKGYIINNRAGPFSSSMWNYIGPEKSPSQAVSIRAIEQDRYKVIDKLNSRLLEEIEESKAFFQVYEGAVYMHQGANYLVEELDLASRTAFCRKADLKYYTKTRDYTDINVLGGEFAYLPTSICRTNRVKTTAQANDCTVTTKWFGFYRISKSSNTISDSFELNLPPYSFTSQAVWVRIPHSVKMTVEESKLEFRGGSHAASHALLNIVPLHMMCSASDLGTECANPHESRGIPDRILLYDRHPGGIGIASQAQMLFEELLLAALEVVSTCNCTSAVGCPNCIQSLTCSEYNEVLDKEAAILILKGVIDYERSYFEAEDASQRSC

SEQ ID NO: 189447 - protein, 564 aa, Zea Mays
MTAEQEWSEVQVRALDGRSTVVKLPLGASVRDLKAALRTSFLPAQVSPSFHLFLKGAKLRLDAEIGSLAIGDGDFIVLVPFTRTPQQHFSVSTASQDQGHCPPKQPEVSSAANSAWQDIMDDLSAMPASPQSDAASKDFYSSCDPCSGRFTEDMKAGQISTSGSSRKRRKTCKENGNGSPQMVSSSEANGTAEKHNISKKSGVAKSAAMLCHDMQPLKPAEMVEHLKQGLGKEGQIVHIQEISSREASFTELPCNLSEAMREALKSIGISRLYSHQSQAITSSISGRHIVVATSTSSGKSLCYNIPVLECLSQDLMACALYIFPMKALAQDQLRTLIKLKNASHIDVDVKIYDGDTPREDRLWIRDNARLLITNPDMLHVSILPYHGQFQRILSNLRYIVIDEAHSYKGAFGCHTALIIRRLKRICSNVYGSCPTFIFCTATSANPCEHVMELANLDEVELIQNDGSPCGSKYFLLWNPSLPMTEGRSKASSVHRRSSSIVEVSYLFSEMVQHGLRCIAFCKSRKLCELVLAYTREILQETAKELVDSICVYRAGYIAEKKNRG

SEQ ID NO: 189448 - protein, 946 aa, Zea Mays
MTAEQEWSEVQVRALDGRSTVVKLPLGASVRDLKAALRTSFLPAQVSPSFHLFLKGAKLRLDAEIGSLAIGDGDFIVLVPFTRTPQQHFSVSTASQDQGHCPPKQPEVSSAANSAWQDIMDDLSAMPASPQSDAASKDFYSSCDPCSGRFTEDMKAGQISTSGSSRKRRKTCKENGNGSPQMVSSSEANGTAEKHNISKKSGVAKSAAMLCHDMQPLKPAEMVEHLKQGLGKEGQIVHIQEISSREASFTELPCNLSEAMREALKSIGISRLYSHQSQAITSSISGRHIVVATSTSSGKSLCYNIPVLECLSQDLMACALYIFPMKALAQDQLRTLIKLKNASHIDVDVKIYDGDTPREDRLWIRDNARLLITNPDMLHVSILPYHGQFQRILSNLRYIVIDEAHSYKGAFGCHTALIIRRLKRICSNVEVSYLFSEMVQHGLRCIAFCKSRKLCELVLAYTREILQETAKELVDSICVYRAGYIAEDRRKIEADLFGGKLHGVAATNALELGIDVGHIDATLHLGFPGSIASLWQQAGRSGRRAKQSLAIYVAFEGPLDQYFMKFPHKLFGRSIEHCQVDSHNLKVLEQHLPCAAYEHPLCVQYDECYFGSSLDSVMTTLKDKGYIINNRAGPFSSSMWNYIGPEKSPSQAVSIRAIEQDRYKVIDKLNSRLLEEIEESKAFFQVYEGAVYMHQGANYLVEELDLASRTAFCRKADLKYYTKTRDYTDINVLGGEFAYLPTSICRTNRVKTTAQANDCTVTTKWFGFYRISKSSNTISDSFELNLPPYSFTSQAVWVRIPHSVKMTVEESKLEFRGGSHAASHALLNIVPLHMMCSASDLGTECANPHESRGIPDRILLYDRHPGGIGIASQAQMLFEELLLAALEVVSTCNCTSAVGCPNCIQSLTCSEYNEVLDKEAAILILKGVIDYERSYFEAEDASQRSC

SEQ ID NO: 189449 - protein, 328 aa, Zea Mays
MTEGRSKASSVHRRSSSIVEVSYLFSEMVQHGLRCIAFCKSRKLCELVLAYTREILQETAKELVDSICVYRAGYIAEDRRKIEADLFGGKLHGVAATNALELGIDVGHIDATLHLGFPGSIASLWQQAGRSGRRAKQSLAIYVAFEGPLDQYFMKFPHKLFGRSIEHCQVDSHNLKVLEQHLPCAAYEHPLCVQYDECYFGSSLDSVMTTLKDKGYIINNRAGPFSSSMWNYIGPEKSPSQAVSIRAIEQDRYKVIDKLNSRLLEEIEESKAFFQVYEGAVYMHQGANYLVEELDLASRTAFCRKADLKYYTKTRDYTDINVLGGEFN

SEQ ID NO: 189450 - protein, 111 aa, Zea Mays
MVGINLDQTLSRKGRPSVSLKDRTESRLADLGPFNWPHASSWVSFASVGPIPEQLARTGSGEMARVACTLRGKRLEGGVLYSRKHGGHHGESNVYQPGQWLDGGVLCSRVA

SEQ ID NO: 189451 - protein, 802 aa, Zea Mays
MAREEDGPQFVRWREEFVSQERGSRVVHYYLEDAAGVSHLAVIGTERSLRHMLYVVSEDFNAAWGCGGSADGGGAPPVFARKWRSRREVVDWLGSFLPVKALDSNCSSDITWSGSFWTCSKQLRHYQAFCRNGTTISTHTFVLVLSEEQNRYLAYLEDMYEDKKGQKKIKVRWFHQNQEIACAIPPPPHPCEVFITPFTQVISVECVDDIATVLTRDHYEKCSHAMSIMTGIRFCSRQYSKNKFKYFDLRTLRGYFSQAVVRSMKFPAESEKDSEYCTPGKAKFPKQLERLYSKCLGTKICRSPQADSIPSYQILSNEQPPGKHLSIKFIVPQNQLKPTYNTGDRLEILSQDSGIIGCWFRCTVLKSCTNHNRLKVQYDDLQNADDSGRLEEMVPASALALPDKLGLRHQDRLRIRPRPQENSFVDGAALLPGTAVDVWQFSGWWEGVVVSLDNIVADSLQVYFPGENFFRACQLRNIRISKDWVKNRWVDIETKSDVLSQIPSDSIQAKQTDNHALSVGVTGSSSSAMPEQEIAATQANSNGDAAVPKQELTVAQANSNGDQPVPKQELAATQANSNGDKSVPDQELAAIQANSSGDKPVPKQELAATRANSNGDKPVPDQELAAIQANSSGDKPVPEQELPATQANSNGDKPVPEQELPATQANSDGDKPVPEQELPATQANSSGDKPVPKIELAATQANSNGDKPVPEFTATQATSNGNNRQIEASKQSEVSMTDEASPLAEDDKRTILGKRPRDVSMTDEGSALVEDGKRTIIGKHPRDEGNAEQRCNGEVGVVVSKT

SEQ ID NO: 189452 - protein, 442 aa, Zea Mays
MVDEAWERAVEAALHAGGEGSSSPARSLTLDGAVKCTHGRLPAAEILERHQSLEHLSIAGVGVTSLEGFPRLRNLTRLTLSDNRIAGGLDHLVAAGLSSLRDLDLSNNRIQDVDDLAPLADLRLVSLDLYECPVTRVKDYRSRVFEMIRTLKYLDKMDADENERPESDDDDDDGEGDGEGDGDDDDEDEEDEEDPGSGEVANGGVAHARAGVPSHPVEVNGVIDVDEEESDADEVIPNGGVEHSHGANGFRVAAAGEARGEEDEDVEEDDDDDDDFEEEDLGEEIDEDVDDEDAVVEVHDVPSSDEEEDGVEEDEEEEDEDEDDEEEEEVEDEGEEDEEGLEVGNDDDEDDADADDEDEDTEYLVQPIAQPQAMAIGSELDGVDPDDADEDKEEVDNDDDGATDQPSSSHGAKRKRDDDDLSGSGDDSEDDGVEDLRPFKHK

SEQ ID NO: 189453 - protein, 187 aa, Zea Mays
MASDDGLKTEAPNTRAPQAAACQLSVSPPIAMLAYLLHGPAAAIAAAPSAFLLRSLPPAKTPFLSSLPRPVSPRRAAAAAFAFNPAAAAAPIVASLLEGPVLVWAGRLCLYYALLHVGLAGSPRNPFLSHEIGGEDGAGDSDLGFSKWAEKLRGGASALTRKKPEHNPSGPQGNLWMETYIYYYIVL

SEQ ID NO: 189454 - protein, 227 aa, Zea Mays
MASDDGLKTEAPNTRAPQAAACQLSVSPPIAMLAYLLHGPAAAIAAAPSAFLLRSLPPAKTPFLSSLPRPVSPRRAAAAAFAFNPAAAAAPIVASLLEGPVLVWAGRLCLYYALLHVGLAGSPRNPFLSHEIGGEDGAGDSDLGFSKWAEKLRGGASGFVQFSKFCLPDYNCLFAYLFMHSSDLSLMLCSVEVDAMKELYGSALRHLKDHIVHDYMVVKKMLSIRES

SEQ ID NO: 189455 - protein, 169 aa, Zea Mays
MASDDGLKTEAPNTRAPQAAACQLSVSPPIAMLAYLLHGPAAAIAAAPSAFLLRSLPPAKTPFLSSLPRPVSPRRAAAAAFAFNPAAAAAPIVASLLEGPVLVWAGRLCLYYALLHVGLAGSPRNPFLSHEIGGEDGAGDSDLGFSKWAEKLRGGASESDSTALLGRTI

SEQ ID NO: 189456 - protein, 221 aa, Zea Mays
MASDDGLKTEAPNTRAPQAAACQLSVSPPIAMLAYLLHGPAAAIAAAPSAFLLRSLPPAKTPFLSSLPRPVSPRRAAAAAFAFNPAAAAAPIVASLLEGPVLVWAGRLCLYYALLHVGLAGSPRNPFLSHEIGGEDGAGDSDLGFSKWAEKLRGGASGEKDAQHKRKLTSKWKPTTKGTLKRTYRVRSTDEGRRILKEIASVLSQDDHFVDASSHKVPQAT

SEQ ID NO: 189457 - protein, 238 aa, Zea Mays
MGDDDDDLDMVFTVSLEEKENLCLYGFPNESWEVNLPAEEVPPDLPEPALGINFARDGMQEKEWLSMVAAHSDAWLLSVAFYFGARFGFNKNDRKRLYSLIDDLPMAFEIVSGKSETKAPAPPSSSNHSNIKPKSNNKKKPPEPKVKQPKPRAPAEEGEEEDGSASEGEHGETLCGACKESYGPDEFWICCDLCEKWFHGKCVKITAAKAEHIKQYKCPSCTGGGGVSNSGTKRARPS

SEQ ID NO: 189458 - protein, 122 aa, Zea Mays
MIIILYDRGRIQRYFFTIWHRRGSSTYERPPNWKDEGIWFCQIFIASRGRESCQGNGWQDSTWKIDLCGDGKRTRKQVGHPPHERISLNMKHESAISLCQMANIPNSQLMLQLIYKAQVNFS

SEQ ID NO: 189459 - protein, 298 aa, Zea Mays
MAERAWSHAMEKKTAGTNAKQRIYMLGRFRKAVKWASLFSQLCSVKGDSRTSLEAEAYASYMKGALFFEQDKNIDAAMINFKNTRAIYEELGKYGSIENQLLCRQRIDEVEPMIDFCSHKLGGSYLQAHELLDTANDLLKAKMEAVLSETRSQQAASMTEFKWLGRTFPITNAKTRVSILKAQQLERDLSAAATESVAADKKLAIFDKIFSAYHDARSCIRNDLASAGNAEDIKDDLNGLDKAVSAVLGLRTIERNQLLVSIGKSKFTKHRDEKNERTTKPEELVRLYDLLIQMFLFG

SEQ ID NO: 189460 - protein, 294 aa, Zea Mays
MAERAWSHAMEKKTAGTNAKQRIYMLGRFRKAVKWASLFSQLCSVKGDSRTSLEAEAYASYMKGALFFEQDKNIDAAMINFKNTRAIYEELGKYGSIENQLLCRQRIDEVEPMIDFCSHKLGGSYLQAHELLDTANDLLKAKMEAVLSETRSQQAASMTEFKWLGRTFPITNAKTRVSILKAQQLERDLSAAATESVAADKKLAIFDKIFSAYHDARSCIRNDLASAGNAEDIKDDLNGLDKAVSAVLGLRTIERNQLLVSIGKSKFTKHRDEKNERTTKPEELVRLYDLLIQI

SEQ ID NO: 189461 - protein, 974 aa, Zea Mays
MDDLEQAILLASDSPAAAAASPSVRAEALAFCARARDESPPSSLLRLCLSGIASSPHAQVHFWCLQSLHDLLLRRRLVLPDDLALLRSSLLSLAVSSHAASPPFLRNKLAQLVALLVRLDYPHVYPSYFLDLLPPAPPQPGPTDMFARVLISLDDDLLSQEYPRSSEEAADAMRVKDSMRVQCVSQIASHWHTAAVTLRTADPAVAAVALDAARRCISWIDVGLVANDVFVPLLFDIAMSPASMPPLAAAAVGCLSAVATKRMDFRAKVGLLRSLLAAHQGLGSPDSGVKMAPLVTTYAAEALECHRRLGPTDADGAAALEMLEEVLPAVFAAAESGNDEDVDSGSVLEFLSGYVSIMKAPSEKQLAHLGRILDLVRVQMSFDPVYRGHLDVLDKIGKEEEDLMAEQRKDLIVLFRSICRVAPAAAQLFIRGLIMTALSSAEASVEDVEVALTLFFRLGEAVGEEEIRSGAGLLGELVPMLLSARFLCHTHRLVALVYLETVTRYMKFVQEHVQYVPHLLGVFLDNRGIHHQNAHVSRRAGYLFMRAVKSLKANLVPYLDTILQSLQDVLSQFTSMDWANKDTKFPSSEDGSQIFEAVGLLIGIEEVSPEKQAQCLTALLNPLCHQIESLVMDAKARGLEESLPRAISLQQIIVALNMVSKGFNERLVMVNRPAIGVMFKKTLDVVLQVLVSFPSVRPLRSKVISFLHRMIEILGISVLPCIPIALRQLLLDNEAKDMVEFLVLVNQIICKFKSSASAILEEVFPTIASHLSVILSQDAFSAGLASNTEEMRELQELQRTLYIFLHAMATHDLSTVLLTSSSRQYLETIMQLLLFTSCKHKDILLRKIFVNLVKDWCSNSEDKVPGFRVFMIEKFATNCCLYSVLDKSFDLRDANSLVLFGEIVLAQKIMYERFGEEFIMNFVAKGLPEVHCPPDLAEQYYQKLKGNDIKAFRSFYQSLVEKIRPQGNGSLVFR

SEQ ID NO: 189462 - protein, 521 aa, Zea Mays
MKKEKIQLTVHSGFSKEILLQGTSHPLKEKSRQGDKLFFHHEAIVENWSIKDFNFSYNVYSGDLSGGVLVQPATLCDYDDRDMFCIFLLPGSGNRKVFGKAVVFIVDTSGSMQGKPLENVKHAVSTALSELVEGDYFNIITFNDELHSFSSCLEQVNDKAIASATEWMNANFVAEGGTDIMHPLSEAMALLSSVHDTLPQIYLITDGSVDDEHNICRTTKTDLSNRGSRSPRISTFGLGSYCNHYFLRMLASIGKGHYDAALGTASIENQILKWFRRASSTIVANISIDALTHLDEFEVDSEYIPDLSANSPLCVSGKYKGKFPDTIKAKGYLADMKEISVELKVQQLKEIPLDKVLVIQQIDFMTSKAWMSADKQVERKVIKLSTQNGVPSEYTDMIFLQTNLDKVEGTQKVKQKLKGHKGRDEQQIYGLKLGFGNKDATRENLITGFGDMNPAEKSVMLQKGSGCCSRVADCLCCMCCIKACNRMNDQCAVLMAQICAALACLGCYECCAEVCCGGSES

SEQ ID NO: 189463 - protein, 616 aa, Zea Mays
MLVLPRGAEVTVGRRSYNTQVIEVEDHTLEKHAKIESGGLLQPHLFFLTIPQVEGGADICATFQWSQKLLYDSGRFSVDIPFRFPYFVNPLPKVFMKKEKIQLTVHSGFSKEILLQGTSHPLKEKSRQGDKLFFHHEAIVENWSIKDFNFSYNVYSGDLSGGVLVQPATLCDYDDRDMFCIFLLPGSGNRKVFGKAVVFIVDTSGSMQGKPLENVKHAVSTALSELVEGDYFNIITFNDELHSFSSCLEQVNDKAIASATEWMNANFVAEGGTDIMHPLSEAMALLSSVHDTLPQIYLITDGSVDDEHNICRTTKTDLSNRGSRSPRISTFGLGSYCNHYFLRMLASIGKGHYDAALGTASIENQILKWFRRASSTIVANISIDALTHLDEFEVDSEYIPDLSANSPLCVSGKYKGKFPDTIKAKGYLADMKEISVELKVQQLKEIPLDKVLVIQQIDFMTSKAWMSADKQVERKVIKLSTQNGVPSEYTDMIFLQTNLDKVEGTQKVKQKLKGHKGRDEQQIYGLKLGFGNKDATRENLITGFGDMNPAEKSVMLQKGSGCCSRVADCLCCMCCIKACNRMNDQCAVLMAQICAALACLGCYECCAEVCCGGSES

SEQ ID NO: 189464 - protein, 260 aa, Zea Mays
MLQASIENQILKWFRRASSTIVANISIDALTHLDEFEVDSEYIPDLSANSPLCVSGKYKGKFPDTIKAKGYLADMKEISVELKVQQLKEIPLDKVLVIQQIDFMTSKAWMSADKQVERKVIKLSTQNGVPSEYTDMIFLQTNLDKVEGTQKVKQKLKGHKGRDEQQIYGLKLGFGNKDATRENLITGFGDMNPAEKSVMLQKGSGCCSRVADCLCCMCCIKACNRMNDQCAVLMAQICAALACLGCYECCAEVCCGGSES

SEQ ID NO: 189465 - protein, 57 aa, Zea Mays
MAASARPGERATSFAVACSLLSRFVRQNGVAAADLGLRIKDTISNCSFRCRTSQEGA

SEQ ID NO: 189466 - protein, 203 aa, Zea Mays
MFCFVLFPFSGEVEQQRTPATTNSLPGAEGEEVERRKETMELFPQSVGFSIKDAAAPREEQGDKEKPKQLTIFYGGKVLVFDDFPADKAKDLMQLASKGSPVVQNVALPQPSAAAAVTTDKAVLDPVISLAAAKKPARTNASDMPIMRKASLHRFLEKRKDRLNAKTPYQTAPSDAAPVKKEPESQPWLGLGPNAVDSSLNLS

SEQ ID NO: 189467 - protein, 612 aa, Zea Mays
MRRGPDGPRTLCNACGIAYRKGKMRRMIEAEPPIDEAALAKLVPEVGMEFVSEEKAYEFYNKYAGHVGFSVRKSTSHKSSENITKVRTFVCSREGYNRDKKSLEAKKPRLDTRIGCPARLIIKVTPECKYRVTDFKADHNHQLAPPSTMHMLRSQRILTELQPGEAELSDDSVVTPTTKATGDLVVRQVSFLRSLSLLPADYKNYLRSKRMKAMQPGDGGAILKYLQTMQMDNPSFFYTMQIDEDDKLTNFFWADQKSRDDFNYFAMLYDESFDSYKWLFDSFKIAMHGKQPAVALIDQSIPLSSAMAAAWPSTTQRICAWHVYQNSLKHLNHVFQGSKTFAKDFGKCVFGYEDEDEFVFSWRSMLEKYDLRHNEWLSKVFAEKEQWALAYDRHIFCADIISALQAESFSSILKKFLSPQLELLSFFKHYERAVDEHRYAELQADFQASQSYPRIPPAKMLKQTAHTYTPVVFEIFRKEFELFMDSVLFSCGEAGTTSEYKVASSEKPKEHFVRFDSSDCSCLCTCRKFEFMGIPCCHMLKVLDYRNIKELPQKYLLKRWRRTAKSANEDNEGNATNANNGSLLIVPAPPTNHHGLQSFSAMIQDASVSSMH

SEQ ID NO: 189468 - protein, 248 aa, Zea Mays
MLEKYDLRHNEWLSKVFAEKEQWALAYDRHIFCADIISALQAESFSSILKKFLSPQLELLSFFKHYERAVDEHRYAELQADFQASQSYPRIPPAKMLKQTAHTYTPVVFEIFRKEFELFMDSVLFSCGEAGTTSEYKVASSEKPKEHFVRFDSSDCSCLCTCRKFEFMGIPCCHMLKVLDYRNIKELPQKYLLKRWRRTAKSANEDNEGNATNANNGSLLIVPAPPTNHHGLQSFSAMIQDASVSSMH

SEQ ID NO: 189469 - protein, 1233 aa, Zea Mays
MFIPAENVTASAAAAADITKKELLRAIDVRLSSLKQDLAAACSRASSAGFNPISVSELILFANHFGASRLSEACTKFMSLCQRRPDISPQTAQPAVSSHWKVFDDGNVRGSSSSDMSIDEPLVDLSESKNKSTVSGSGSQVHRLSNIQGLESAAAQQPKPTIQQAVDKQEAETDASPAPSKGELSRRLSVKDRINMFESQKKEQTPSSGNSNSAGTGRVVPGKGEHRRVPSGASMEKLVRRWSSVSDMSIDLSNNESSSLNDKKDNGTPAGTPTSTDLEADSKVRANEDSNGQKDSITSHSWPCQKDNVPMDLATTDLCPPSILSNTLAPHKESIYGDGAENDMVMNSSIESEASFGKEPGVIQGHTRMSNHATSNVSTQDRLKSSAKSVEEALLKNKVIVTSASSEEHVCMIDKEITAVAHEVPVASEQIPQNDIRGLHTKDIHTEAEVTGRKDQPSRSFGRVSGGVNPKPKASSNSRANAKGSSVRDAIASTETEFRDVSLQRNRLPRKSEDVGKKVTAGSDSDCSGRQGKNLSRQSSITDQELNLQARVTRPGKGNQDRHGELQMKANELEKLFAEHKLTSSRRGKPTDVQVESTPMVSEVKPTMVLHETIHTKQVVKESITVNDFDAGELLKMVNNQEFNISTPQKLGILSLEESRGKFYEHYMQKRDAKLKEGWKLQREEKEAMLKAMHDSLERSKAELLTKFSRSADVPDSTYVSHCSQKIPPSRSARKNKDQGVGSFLVEEEMNSDYLSGDGSSRSADSRKHFSNKVASTQNASAGPIHKRSSRTASSGYANRRNPPENPLAQSVPSFSDLRKENTKPSPGVSRVSARVQQKSFARSKSIIEESKSILKEDQSRRSQSMRKNQIPDELKDISSGNDDIYNWAPSRISKNQSEGPFAYSTRRSGPPKPFLRKGNGTHPVIGIAGFQAAAAMMANALQHGDSGDFEDQQEDSPDDAKEEEEYESMEENLRESDFPADSDSENPRVSHEFGNSDDPGSENGDADFPSKTPAIGSTKFTAFTGNVHNPAGDVPAPWSSRLPQLFPYTNDNSDGDAFADSPSGSPSPWNSHSLDEITDADVSRMRKKWGSAQMPFAGVNAPQQPRKDVSKGLKKLWKFGRKTRGGDGLVNDWVSASTASECDDDMEDGRDLVVGSSDDFRKSRMGYLASYDGFVENEVFSEQEQSLRSSIPNPPANFRLREDQLTGSSLKAPRSFFSLSTFRSKGGDARLR

SEQ ID NO: 189470 - protein, 85 aa, Zea Mays
MLFYLAFPGGFSCFGEINMSYIFLKRVVRVYSWQRRGSRDLRFIKKRMEDNLPVNARENQERPRKHSQRCTMIISTMGEQRMSIH

SEQ ID NO: 189471 - protein, 352 aa, Zea Mays
MGTPNEMMAYSSLSKMDTSQNHGAALSNVVAGNNYPVQDYLYEQASEPDFPEYDSRDDLFAPTRASPKVNLNTVLGGLVSIVTGVNKSEDDASQHESFSTDISFLRSDKNGNVNVHPSVCVPSAPPLLEANALQYSAYKEVLLADPPEWLPDSSANVCLQCNLPFTALTRGRHHCRFCGGIFCKNCSKGRCLMPMKFRIRDPQRVCDACYERLDPLQGLLINYNSNCMQQAKHDVMDWTSTRSWLNMPVGVSMEYEIYKATNTMKKYCQVARLNPEKSIPSSILKGAKGLAILTVAKAGAVLTYKVGTGLVVARRSDGSWSAPSAILSVGLGWGVQLSRLSAVAFIFHLGQD

SEQ ID NO: 189472 - protein, 423 aa, Zea Mays
MGTPNEMMAYSSLSKMDTSQNHGAALSNVVAGNNYPVQDYLYEQASEPDFPEYDSRDDLFAPTRASPKVNLNTVLGGLVSIVTGVNKSEDDASQHESFSTDISFLRSDKNGNVNVHPSVCVPSAPPLLEANALQYSAYKEVLLADPPEWLPDSSANVCLQCNLPFTALTRGRHHCRFCGGIFCKNCSKGRCLMPMKFRIRDPQRVCDACYERLDPLQGLLINYNSNCMQQAKHDVMDWTSTRSWLNMPVGVSMEYEIYKATNTMKKYCQVARLNPEKSIPSSILKGAKGLAILTVAKIGGELTDFIIVLHDRKAVKAFSSRIHLSLGAGLSAAAGPIGRAFEADVRASEKGSGICYTYSCTKGAFVGVSLEGNVVTTRMETNLRFYGDAYLTATDILFGRVERPRAAQPLYSALDDLFSKMVC

SEQ ID NO: 189473 - protein, 242 aa, Zea Mays
MDWTSTRSWLNMPVGVSMEYEIYKATNTMKKYCQVARLNPEKSIPSSILKGAKGLAILTVAKAGAVLTYKVGTGLVVARRSDGSWSAPSAILSVGLGWGVQIGGELTDFIIVLHDRKAVKAFSSRIHLSLGAGLSAAAGPIGRAFEADVRASEKGSGICYTYSCTKDCTVRRVKFEYGYEDGAFVGVSLEGNVVTTRMETNLRFYGDAYLTATDILFGRVERPRAAQPLYSALDDLFSKMVC

SEQ ID NO: 189474 - protein, 568 aa, Zea Mays
MRSNRRRLGGRGGGWGGQGGGVSVAASFAALLGCVVALVGGAAGQGPRPPSDYKTLSGAAPLVVAKGGFSGVFPDSSQGAYSFAMITSAPDTAMWCDVQLTKDGVGVCLRDINMKNCTSVDQAYPERKRTYVIDGVRKTGWFVSDFTIAELQSVSLTQAIWPRTRRFDGIYPIISITDFRSLVMPSPVWLNVQHDIFYKQHGLDMRNYILSIKKGVSMDYISSPELGFLKNMSGRVGRKTKLVFRFLEKALLDHSINQTYGSLSSNLPFIKSIASGIIVPKSYIWPVTKDNYLLPSTSIVTEAHNAGLEIYASDFANDRIIPYNYSYDPLAEYLNFINDGGFSVDGVLSEHPITASEAIGCFTKLNSNKTDHGEPLVISHNGASGDYPDCTDLAYHSAIDDGADIIDCPIQVTNDGVLMCMSSTNLLDTTNVQRTTYNSLVSVVPDIQPQPGIFTFNLTWSDINSNVLKPKISSPVSGYFLVRNPRYTNQGKFLKLSDFLAIAMDKDLSGVMIIIEVILSLKHCIKKKTFSHRSRKPPNSCSTYTQRHHCPCKDDRNRGRTLDLRLVL

SEQ ID NO: 189475 - protein, 320 aa, Zea Mays
MNDRQRETIMRLKGAAPLVVAKGGFSGVFPDSSQGAYSFAMITSAPDTAMWCDVQLTKDGVGVCLRDINMKNCTSVDQAYPERKRTYVIDGVRKTGWFVSDFTIAELQSVSLTQAIWPRTRRFDGIYPIISITDFRSLVMPSPVWLNVQHDIFYKQHGLDMRNYILSIKKGVSMDYISSPELGFLKNMSGRVGRKTKLVFRFLEKALLDHSINQTYGSLSSNLPFIKSIASGIIVPKSYIWPVTKDNYLLPSTSIVTEAHNAGLEIYASDFANDRIIPYNYSYDPLAEYLNFINDGGFSVDGVLSEHPITASEAIDFQVY

SEQ ID NO: 189476 - protein, 733 aa, Zea Mays
MNDRQRETIMRLKGAAPLVVAKGGFSGVFPDSSQGAYSFAMITSAPDTAMWCDVQLTKDGVGVCLRDINMKNCTSVDQAYPERKRTYVIDGVRKTGWFVSDFTIAELQSVSLTQAIWPRTRRFDGIYPIISITDFRSLVMPSPVWLNVQHDIFYKQHGLDMRNYILSIKKGVSMDYISSPELGFLKNMSGRVGRKTKLVFRFLEKALLDHSINQTYGSLSSNLPFIKSIASGIIVPKSYIWPVTKDNYLLPSTSIVTEAHNAGLEIYASDFANDRIIPYNYSYDPLAEYLNFINDGGFSVDGVLSEHPITASEAIGCFTKLNSNKTDHGEPLVISHNGASGDYPDCTDLAYHSAIDDGADIIDCPIQVTNDGVLMCMSSTNLLDTTNVQRTTYNSLVSVVPDIQPQPGIFTFNLTWSDINSNVLKPKISSPVSGYFLVRNPRYTNQGKFLKLSDFLAIAMDKDLSGVMIIIENAAFLVNSLGIDIVDSLTTALSAAGFDNHPTKEVLIKSKDSDVLVKLKQQKTKCKLVYTLPSGIGDASNSSLKDIKKFAEYVAVDSKSVFTLSSDFIIRQNSLVQDLQSAGLALYAEVFQNEFVAQPLDFFGDETVEINYYIQSFNLSGIITDFPKTVRRYKRNTCTVLGKDMPSYMQPPQAGSLAQFLQTFKTQPPSLPPMSTLNSSSVEEPPLPTVALRSVSDGSASGATKTPGTPSDAPTATVNAGMLLVMVFTALLI

SEQ ID NO: 189477 - protein, 283 aa, Zea Mays
MMVASLLMVYCQNTQLLHQRQLNAAFLVNSLGIDIVDSLTTALSAAGFDNHPTKEVLIKSKDSDVLVKLKQQKTKCKLVYTLPSGIGDASNSSLKDIKKFAEYVAVDSKSVFTLSSDFIIRQNSLVQDLQSAGLALYAEVFQNEFVAQPLDFFGDETVEINYYIQSFNLSGIITDFPKTVRRYKRNTCTVLGKDMPSYMQPPQAGSLAQFLQTFKTQPPSLPPMSTLNSSSVEEPPLPTVALRSVSDGSASGATKTPGTPSDAPTATVNAGMLLVMVFTALLI

SEQ ID NO: 189478 - protein, 108 aa, Zea Mays
MKGSPPTLGVWWFSPSLLILHGISLTDPSTPPHRTSLLCCPSHLGHHVDQLCHQLLLLLQHLQQHGLLPRPCCPRCSLCNSHCQEPHPRDPGAAEAQLQPVGTVFHRK

SEQ ID NO: 189479 - protein, 578 aa, Zea Mays
MVALRDLNLDHNQLSNINDMFSQLTNLTTLDLSYNTFSGDIPHSFNSLTSLKTLYLQNNKFNGTIDVLTDLPLTDLNVENNQLTGWIPDKLKGINNLQTSGNSFNNGPAPPPPPSPLSPPSTNTPPPSRQHAVPSSAGKNTPSENGGKHSKLGGGAVAGIIICLLVVSAIVAFLVIKRKSWRLSQGQDPEQNEPLSPFASGLKQMKSIKSIKIVSTMGKEELQKTVSMSLKPPTKIDLHKSFDENDTTNKAISRNVSLSSITIPAYTVADLQMATGSFSPDSFIGEGSVGRVYKAKFGDQKVMAVKKINFSVFPSHPSDLFIELVANISMLNHPNLAELAGYCSEHGQCLLAYEFYRNGSLHDFLHLKDEHSKPLSWNNRVKIALGSARALEYLHETCSPSVVHKNFKSSNILLDGELTPHLSDSGFAGLLANQEFQESDENSGYRAPEVILAGQYSLKSDVYSFGVVMLELLTGRKPFDRTRPRPEQSLVRWATPQLHDIDALDQMVDPALQGLYPSKSLSRFADAIALCVQPEPEFRPPMSEVVQSLVRLVQRANMTRMHESQSRRHGESGGDYEF

SEQ ID NO: 189480 - protein, 677 aa, Zea Mays
MNSPPQLTNWVSQNGDPCGQSWLGVTCSGSRVTAIKLSGMRLNGTLGYNMNQLTALVQLDMSNNNLGGSDIPYNLPPNLQSLNLAVNNFTGTVPYSISQMVALRDLNLDHNQLSNINDMFSQLTNLTTLDLSYNTFSGDIPHSFNSLTSLKTLYLQNNKFNGTIDVLTDLPLTDLNVENNQLTGWIPDKLKGINNLQTSGNSFNNGPAPPPPPSPLSPPSTNTPPPSRQHAVPSSAGKNTPSENGGKHSKLGGGAVAGIIICLLVVSAIVAFLVIKRKSWRLSQGQDPEQNEPLSPFASGLKQMKSIKSIKIVSTMGKEELQKTVSMSLKPPTKIDLHKSFDENDTTNKAISRNVSLSSITIPAYTVADLQMATGSFSPDSFIGEGSVGRVYKAKFGDQKVMAVKKINFSVFPSHPSDLFIELVANISMLNHPNLAELAGYCSEHGQCLLAYEFYRNGSLHDFLHLKDEHSKPLSWNNRVKIALGSARALEYLHETCSPSVVHKNFKSSNILLDGELTPHLSDSGFAGLLANQEFQESDENSGYRAPEVILAGQYSLKSDVYSFGVVMLELLTGRKPFDRTRPRPEQSLVRWATPQLHDIDALDQMVDPALQGLYPSKSLSRFADAIALCVQPEPEFRPPMSEVVQSLVRLVQRANMTRMHESQSRRHGESGGDYEF

SEQ ID NO: 189481 - protein, 650 aa, Zea Mays
MAGGVAVGVVALFLAAASFGANANTDSNDVNALNVFYTTMNSPPQLTNWVSQNGDPCGQSWLGVTCSGSRVTAIKLSGMRLNGTLGYNMNQLTALVQLDMSNNNLGGSDIPYNLPPNLQSLNLAVNNFTGTVPYSISQMVALRDLNLDHNQLSNINDMFSQLTNLTTLDLSYNTFSGDIPHSFNSLTSLKTLYLQNNKFNGTIDVLTDLPLTDLNVENNQLTGWIPDKLKGINNLQTSGNSFNNGPAPPPPPSPLSPPSTNTPPPSRQHAVPSSAEMKSIKSIKIVSTMGKEELQKTVSMSLKPPTKIDLHKSFDENDTTNKAISRNVSLSSITIPAYTVADLQMATGSFSPDSFIGEGSVGRVYKAKFGDQKVMAVKKINFSVFPSHPSDLFIELVANISMLNHPNLAELAGYCSEHGQCLLAYEFYRNGSLHDFLHLKDEHSKPLSWNNRVKIALGSARALEYLHETCSPSVVHKNFKSSNILLDGELTPHLSDSGFAGLLANQEFQESDENSGYRAPEVILAGQYSLKSDVYSFGVVMLELLTGRKPFDRTRPRPEQSLVRWATPQLHDIDALDQMVDPALQGLYPSKSLSRFADAIALCVQPEPEFRPPMSEVVQSLVRLVQRANMTRMHESQSRRHGESGGDYEF

SEQ ID NO: 189482 - protein, 58 aa, Zea Mays
MTGIDFLFGVNTLLLVYIEFWHFTQTGPGVCVCVGGGWGACPHGIAFKKKHFTQTTVR

SEQ ID NO: 189483 - protein, 912 aa, Zea Mays
MWRRLPTRRLASALLSSSPLQRATATHAPPLERHFPTTASGLLPPSLLPPWQQEPRWFSSSAAAEAVSSEDAEELHHAIEEIVRAQPSPNLPQPQAVAEEHQAPGRDHRSRHRRSGRGRHAEVLAAEHGMTYHRYTSLRRRQIRIETEAWEQAANEYRELLADMCEQKLAPNLPYVKSLFLGWFEPLRDQIATEQELVADPGSRASHGPFFSMLPADMMAVITMHKLMGLLMTGSGDGSVRVIQAACQIGEAIEHEVRINRFLEKTRKKNNKEMENEEEAGDTNIAIEQQRLRKKVTDLMKKQKLRQVRNIVKNQDKSRPWGQDAHAKVGSRLIDLFIGTAHIQPPASQSSDGLPDIRPAFRHEMRTMVKEQQKSSRRYGVIKCDPLVRQGLDRTAKHMVIPYMPMLIPPICWTGYDKGAHLFLPSYVMRTHGARQQRDAVKRAPREQMQFVFEALNTLGSTKWRVNKRVLSIVDRIWSNGGRLADLVDRTDVPVPEKPDTEDETLLKNWKWHLRAAKKKNSERHSQRCDVELKLAVARKMKDEEGFYYPHNLDFRGLRWLKIHLANLPLEGRRWWLGAEDPFQCLAVCMNLTEALRSSSPETTISHIPVHQDGSCNGLQHYAALGKDKLGAIAVNLVAGEKPADVYTGIANRVMEIMRMDAQKDPSVEPDAARARLIVDQVDRKLVKQTVMTSVYGVTYIGAREQIRRRLKERGVIPNDSELFGASCYAAKVTLTALGEMFQAARSIMNWLGDCAKVIACENEPVRWTTPLGLPVVQPYRKLGRHLIKTSLQVLTLQRETDKVMVKRQRTAFPPNFVHSLDGSHMMMTAVACKRQGLNFAGVHDSYWTHASDVDTMNKILREKFVELYDTPILENLLESFEKSFPKLKFPPLPERGDFDMKEVLESTYFFN

SEQ ID NO: 189484 - protein, 656 aa, Zea Mays
MLMQKSESYVGSRLIDLFIGTAHIQPPASQSSDGLPDIRPAFRHEMRTMVKEQQKSSRRYGVIKCDPLVRQGLDRTAKHMVIPYMPMLIPPICWTGYDKGAHLFLPSYVMRTHGARQQRDAVKRAPREQMQFVFEALNTLGSTKWRVNKRVLSIVDRIWSNGGRLADLVDRTDVPVPEKPDTEDETLLKNWKWHLRAAKKKNSERHSQRCDVELKLAVARKMKDEEGFYYPHNLDFRGRAYPMHPYLNHLGSDLCRGVLEFAEGRPLGKSGLRWLKIHLANLYAAGVDKLSYDGRIAFAENHLEEIFDSADRPLEGRRWWLGAEDPFQCLAVCMNLTEALRSSSPETTISHIPVHQDGSCNGLQHYAALGKDKLGAIAVNLVAGEKPADVYTGIANRVMEIMRMDAQKDPSVEPDAARARLIVDQVDRKLVKQTVMTSVYGVTYIGAREQIRRRLKERGVIPNDSELFGASCYAAKVTLTALGEMFQAARSIMNWLGDCAKVIACENEPVRWTTPLGLPVVQPYRKLGRHLIKTSLQVLTLQRETDKVMVKRQRTAFPPNFVHSLDGSHMMMTAVACKRQGLNFAGVHDSYWTHASDVDTMNKILREKFVELYDTPILENLLESFEKSFPKLKFPPLPERGDFDMKEVLESTYFFN

SEQ ID NO: 189485 - protein, 463 aa, Zea Mays
MKSSRRYGVIKCDPLVRQGLDRTAKHMVIPYMPMLIPPICWTGYDKGAHLFLPSYVMRTHGARQQRDAVKRAPREQMQFVFEALNTLGSTKWRVNKRVLSIVDRIWSNGGRLADLVDRTDVPVPEKPDTEDETLLKNWKWHLRAAKKKNSERHSQRCDVELKLAVARKMKDEEGFYYPHNLDFRGRAYPMHPYLNHLGSDLCRGVLEFAEGRPLGKSGLRWLKIHLANLYAAGVDKLSYDGRIAFAENHLEEIFDSADRPLEGRRWWLGAEDPFQCLAVCMNLTEALRSSSPETTISHIPVHQDGSCNGLQHYAALGKDKLGAIAVNLVAGEKPADVYTGIANRVMEIMRMDAQKDPSVEPDAARARLIVDQVDRKLVKQTVMTSVYGVTYIGAREQIRRRLKERGVIPNDSELFGASCYAAKVTLTALGEMFQAARSIMNWLGDCAKVNICAVCNGVFLIYN

SEQ ID NO: 189486 - protein, 603 aa, Zea Mays
MKSSRRYGVIKCDPLVRQGLDRTAKHMVIPYMPMLIPPICWTGYDKGAHLFLPSYVMRTHGARQQRDAVKRAPREQMQFVFEALNTLGSTKWRVNKRVLSIVDRIWSNGGRLADLVDRTDVPVPEKPDTEDETLLKNWKWHLRAAKKKNSERHSQRCDVELKLAVARKMKDEEGFYYPHNLDFRGRAYPMHPYLNHLGSDLCRGVLEFAEGRPLGKSGLRWLKIHLANLYAAGVDKLSYDGRIAFAENHLEEIFDSADRPLEGRRWWLGAEDPFQCLAVCMNLTEALRSSSPETTISHIPVHQDGSCNGLQHYAALGKDKLGAIAVNLVAGEKPADVYTGIANRVMEIMRMDAQKDPSVEPDAARARLIVDQVDRKLVKQTVMTSVYGVTYIGAREQIRRRLKERGVIPNDSELFGASCYAAKVTLTALGEMFQAARSIMNWLGDCAKVIACENEPVRWTTPLGLPVVQPYRKLGRHLIKTSLQVLTLQRETDKVMVKRQRTAFPPNFVHSLDGSHMMMTAVACKRQGLNFAGVHDSYWTHASDVDTMNKILREKFVELYDTPILENLLESFEKSFPKLKFPPLPERGDFDMKEVLESTYFFN

SEQ ID NO: 189487 - protein, 108 aa, Zea Mays
MVKRQRTAFPPNFVHSLDGSHMMMTAVACKRQGLNFAGVHDSYWTHASDVDTMNKILREKFVELYDTPILENLLESFEKSFPKLKFPPLPERGDFDMKEVLESTYFFN

SEQ ID NO: 189488 - protein, 156 aa, Zea Mays
MENAGCDPLHFHQLLPRQVQWWEAAEFGTSVTVHRYHNWHTQRPSEIAAASALAAVSENQVVGSSSALSASEVPINKVMIARCYELLQEQALVRKTGHVNGSPSVPQSPIGVLDATCFSFRSEDARLVSSQSNNISSSSSNDNQVSKRRRLSISPI

SEQ ID NO: 189489 - protein, 220 aa, Zea Mays
MERYEVIKDIGSGNFGVAKLVRDVRTKELFAVKFIERGMKIDENVQREIMNHRSLRHPNIVKFKEVVLTPTHLAIVMEYAAGGELFERICNAGRFSEDEARFFFQQLISGVSYCHSMQICHRDLKLENTLLDDSIAPRLKICDFGYSKSSVLHSQPKSTVGTPAYIAPEVLARKEYDGKVADVWSCGVTLYVMLVGAYPFEDPDEPKNFRKTLTRPVRGS

SEQ ID NO: 189490 - protein, 132 aa, Zea Mays
MESTALMTARLPLLTSGSRSKPLPFASFTRAACRLASAPFSGSGSVVLLSRRSRDYAGVGSLVSAAADPGDTADAGSESILLSVQGMMCDGCAASVKRILESQLSVLSQNGLYTKRSYMAKFEIQRIASLQQ

SEQ ID NO: 189491 - protein, 104 aa, Zea Mays
MSRFGRSGPPPPIRDTYSLLVLNITFRTTADDLFPLFDKYGEIVDIYIPRDRRTGDSRGFAFVRYKYEDEAQKAVERLDGRLVDGREIMVQFAKYGPNAERIVA

SEQ ID NO: 189492 - protein, 210 aa, Zea Mays
MEAVVRKVQQRVRKAREEMDQWDDLNTRLLSQFSNAAAVISRLQALGEDKNYGPLRAVPNIRVDLIGNQMEVLELIFVKIRETLEKFNDVVKALNKALRDTKQMVRGGSALTAKQMQLQVGILPSIAECLDGFQTLCEMHHDEFTLKSSAISLLTWKTCSSDIAVLRQLLVDQPNIPKDEGETESVWKLYVNPIVEALWTRQVFISVSNR

SEQ ID NO: 189493 - protein, 158 aa, Zea Mays
MEAVVRKVQQRVRKAREEMDQWDDLNTRLLSQFSNAAAVISRLQALGEDKNYGPLRAVPNIRVDLIGNQMEVLELIFVKIRETLEKFNDVVKALNKALRDTKQMVRGGSALTAKQMQLQVGILPSIAECLDGFQTLCEMHHDEFTLKSSAISLLTWKT

SEQ ID NO: 189494 - protein, 524 aa, Zea Mays
MLTYPILNDRSIDQWTVTELKDELERRYLPVSGSKDELLKRLFEAMQDEILDGEGKTTVVTSPPEELKGGETPGSIDVSVNQASIEQHVHKGASEVAKQGVGLVISVTEAYDESTFATSEVTQEAVVGTAEVSQRSLDAVAEVESCLVDAAATDEPDGNGQGSASSGDTIVKEGSPRSEGHGNTIEKTPEDGTNKKIAVDDEPSDLTGGDIKLGLDVHSKILKLEDEPAPPHDMLHNHEDSDVVAVAEPEDDTSKKMISDDVPTGLMHTNVELGAKVDCKIEQEEVSTLSDAAALHSYPKEHIVAVAKGLALPRRMLMSGYTSNIDLDRKEESPDINSCEKLNLNRSSGDESMDEDVMERKHADSYIKPEDLRGKTKVTSEHVFKDVSLLDTRAEGSPAHSKEVVTEEKLSTPTEKRKLEDQEVIENNEPIKRQYLWNEDAVNISDQQASKITSTGTQKEVICPAPERSFGRPNTVARRNSPKERIGEVLLHVQNILFSGGSCGHEECCLRPPVALKQQQLSDR

SEQ ID NO: 189495 - protein, 602 aa, Zea Mays
MLTYPILNDRSIDQWTVTELKDELERRYLPVSGSKDELLKRLFEAMQDEILDGEGKTTVVTSPPEELKGGETPGSIDVSVNQASIEQHVHKGASEVAKQGVGLVISVTEAYDESTFATSEVTQEAVVGTAEVSQRSLDAVAEVESCLVDAAATDEPDGNGQGSASSGDTIVKEGSPRSEGHGNTIEKTPEDGTNKKIAVDDEPSDLTGGDIKLGLDVHSKILKLEDEPAPPHDMLHNHEDSDVVAVAEPEDDTSKKMISDDVPTGLMHTNVELGAKVDCKIEQEEVSTLSDAAALHSYPKEHIVAVAKGLALPRRMLMSGYTSNIDLDRKEESPDINSCEKLNLNRSSGDESMDEDVMERKHADSYIKPEDLRGKTKVTSEHVFKDVSLLDTRAEGSPAHSKEVVTEEKLSTPTEKRKLEDQEVIENNEPIKRQYLWNEDAVNISDQQASKITSTGTQKEVICPAPERSFGRPNTVARRNSPKERIVPPAKTSATTSLRIDRFVRPFTLKAVKELLGKTGSICSFWMDEIKTHCYVTYSSVEEAVATRNAVYDLQWPSNNNNYLIAEFVDPEEVYCPLQHGLPRCLPPLTLDQQGRAFLPLH

SEQ ID NO: 189496 - protein, 612 aa, Zea Mays
MLTYPILNDRSIDQWTVTELKDELERRYLPVSGSKDELLKRLFEAMQDEILDGEGKTTVVTSPPEELKGGETPGSIDVSVNQASIEQHVHKGASEVAKQGVGLVISVTEAYDESTFATSEVTQEAVVGTAEVSQRSLDAVAEVESCLVDAAATDEPDGNGQGSASSGDTIVKEGSPRSEGHGNTIEKTPEDGTNKKIAVDDEPSDLTGGDIKLGLDVHSKILKLEDEPAPPHDMLHNHEDSDVVAVAEPEDDTSKKMISDDVPTGLMHTNVELGAKVDCKIEQEEVSTLSDAAALHSYPKEHIVAVAKGLALPRRMLMSGYTSNIDLDRKEESPDINSCEKLNLNRSSGDESMDEDVMERKHADSYIKPEDLRGKTKVTSEHVFKDVSLLDTRAEGSPAHSKEVVTEEKLSTPTEKRKLEDQEVIENNEPIKRQYLWNEDAVNISDQQASKITSTGTQKEVICPAPERSFGRPNTVARRNSPKERIVPPAKTSATTSLRIDRFVRPFTLKAVKELLGKTGSICSFWMDEIKTHCYVTYSSVEEAVATRNAVYDLQWPSNNNNYLIAEFVDPEEYLPMFLLLREVYCPLQHGLPRCLPPLTLDQQGRAFLPLH

SEQ ID NO: 189497 - protein, 584 aa, Zea Mays
MLTYPILNDRSIDQWTVTELKDELERRYLPVSGSKDELLKRLFEAMQDEILDGEGKTTVVTSPPEELKGGETPGSIDVSVNQASIEQHVHKGASEVAKQGVGLVISVTEAYDESTFATSEVTQEAVVGTAEVSQRSLDAVAEVESCLVDAAATDEPDGNGQGSASSGDTIVKEGSPRSEGHGNTIEKTPEDGTNKKIAVDDEPSDLTGGDIKLGLDVHSKILKLEDEPAPPHDMLHNHEDSDVVAVAEPEDDTSKKMISDDVPTGLMHTNVELGAKVDCKIEQEEVSTLSDAAALHSYPKEHIVAVAKGLALPRRMLMSGYTSNIDLDRKEESPDINSCEKLNLNRSSGDESMDEDVMERKHADSYIKPEDLRGKTKVTSEHVFKDVSLLDTRAEGSPAHSKEVVTEEKLSTPTEKRKLEDQEVIENNEPIKRQYLWNEDAVNISDQQASKITSTGTQKEVICPAPERSFGRPNTVARRNSPKERIVPPAKTSATTSLRIDRFVRPFTLKAVKELLGKTGSICSFWMDEIKTHCYVTYSSVEEAVATRNAVYDLQWPSNNNNYLIAEFVDPEEQPSNRQWLTKL

SEQ ID NO: 189498 - protein, 379 aa, Zea Mays
MLHNHEDSDVVAVAEPEDDTSKKMISDDVPTGLMHTNVELGAKVDCKIEQEEVSTLSDAAALHSYPKEHIVAVAKGLALPRRMLMSGYTSNIDLDRKEESPDINSCEKLNLNRSSGDESMDEDVMERKHADSYIKPEDLRGKTKVTSEHVFKDVSLLDTRAEGSPAHSKEVVTEEKLSTPTEKRKLEDQEVIENNEPIKRQYLWNEDAVNISDQQASKITSTGTQKEVICPAPERSFGRPNTVARRNSPKERIVPPAKTSATTSLRIDRFVRPFTLKAVKELLGKTGSICSFWMDEIKTHCYVTYSSVEEAVATRNAVYDLQWPSNNNNYLIAEFVDPEEYLPMFLLLREVYCPLQHGLPRCLPPLTLDQQGRAFLPLH

SEQ ID NO: 189499 - protein, 461 aa, Zea Mays
MLHNHEDSDVVAVAEPEDDTSKKMISDDVPTGLMHTNVELGAKVDCKIEQEEVSTLSDAAALHSYPKEHIVAVAKGLALPRRMLMSGYTSNIDLDRKEESPDINSCEKLNLNRSSGDESMDEDVMERKHADSYIKPEDLRGKTKVTSEHVFKDVSLLDTRAEGSPAHSKEVVTEEKLSTPTEKRKLEDQEVIENNEPIKRQYLWNEDAVNISDQQASKITSTGTQKEVICPAPERSFGRPNTVARRNSPKERIVPPAKTSATTSLRIDRFVRPFTLKAVKELLGKTGSICSFWMDEIKTHCYVTYSSVEEAVATRNAVYDLQWPSNNNNYLIAEFVDPEEVKLKLETPPSQIPPISLSTATAQQTATFQQAMANQTLVPPHVPATSRGLLPTPARFAKVPPTSDPGPARESLPPPPLSLEPARTLDELFKKTQTYPRIYYMPLSEEEVSAKRAAHDKGRRG

SEQ ID NO: 189500 - protein, 380 aa, Zea Mays
MMRSLRDSLHARIAARLEAKSKTDEQRIWRASKAHDIMELRDRLTELKSKTAVDKTKVEQASSGLKAKTASLNLALVTLKKRQADAVAMHTSAMEIAQMNLMTITSDCMKMQSKSVKQLCRLFPMRRVIKEGEKKDNYSGPYDSICGARLPRGLDPHSIPAEELSASLGYMLHFVNIAVRILSAPVLHVSGFKGSCSNIWQRSSYWSTRQSQSKVYPLFIPRKNACTGGEETSLSESGSSNFGVDSVDSVKKQSFGSTRSNSFNLSGASSHSMERHQYLQRGISLLKTSVTAITTYYYNSLGLDVPSNLSTFEAFSKLLHTLSSSKAFRTAFELNIASRSEKQAQQLNRSIWKSSSAVSSDSSFMDSMHTTIMVKFLFCS

SEQ ID NO: 189501 - protein, 440 aa, Zea Mays
MMRSLRDSLHARIAARLEAKSKTDEQRIWRASKAHDIMELRDRLTELKSKTAVDKTKVEQASSGLKAKTASLNLALVTLKKRQADAVAMHTSAMEIAQMNLMTITSDCMKMQSKSVKQLCRLFPMRRVIKEGEKKDNYSGPYDSICGARLPRGLDPHSIPAEELSASLGYMLHFVNIAVRILSAPVLHVSGFKGSCSNIWQRSSYWSTRQSQSKVYPLFIPRKNACTGGEETSLSESGSSNFGVDSVDSVKKQSFGSTRSNSFNLSGASSHSMERHQYLQRGISLLKTSVTAITTYYYNSLGLDVPSNLSTFEAFSKLLHTLSSSKAFRTAFELNIASRSEKQAQQLNRSIWKSSSAVSSDSSFMDSMHTTIMPSTLDNLLLNSNQSFLYTAKLVKHGGVPDSIFNGWDLVEREVLPPPPSRFEDVAQWERAMYAGTKKK

SEQ ID NO: 189502 - protein, 210 aa, Zea Mays
MLHFVNIAVRILSAPVLHVSGFKGSCSNIWQRSSYWSTRQSQSKVYPLFIPRKNACTGGEETSLSESGSSNFGVDSVDSVKKQSFGSTRSNSFNLSGASSHSMERHQYLQRGISLLKTSVTAITTYYYNSLGLDVPSNLSTFEAFSKLLHTLSSSKAFRTAFELNIASRSEKQAQQLNRSIWKSSSAVSSDSSFMDSMHTTIMVKFLFCS

SEQ ID NO: 189503 - protein, 121 aa, Zea Mays
MKASQAWMEWVMKKRKAFDQRGDMAVAAWAEQQQREMTLRARRLSRSKVDPEEERKLFAKEKKASMEFYSTTLKRHTLVLRKRDIMRKKAEEEKDKEISRLLAAEGLELDTDEDENKTFLG

SEQ ID NO: 189504 - protein, 114 aa, Zea Mays
MEWVMKKRKAFDQRGDMAVAAWAEQQQREMTLRARRLSRSKVDPEEERKLFAKEKKASMEFYSTTLKRHTLVLRKRDIMRKKAEEEKDKEISRLLAAEGLELDTDEDENKTFLG

SEQ ID NO: 189505 - protein, 298 aa, Zea Mays
MYIVLRPESAGGGGRTVEEKQAPDSGKEGRKRRRQGDGAQEESEEKGADGGHGKEEVNIEDQPLLRLVVMGRKSLPDPAKHSRPYWGYVELVTTKVDDIKDALKEEEYSTATRGKRHRAAARALGEGVYRIVKHESESGSGGRRRSPRPHTHLVYKLELPSTRGAMEPQEAMNVEPEASFLVQVKNPDPPSGGRDGGFRGLQSKRRAAFPAHLQDAFGGRRYAPADPPDLLNYEGCELLLIAASDDVEDELGLQLEGEVEDGEGEGVETPQGALGCSDLVKMFGEVADVKPLLSGSWD

SEQ ID NO: 189506 - protein, 618 aa, Zea Mays
MVLDFFTKWDEGCMNDEETRVTHTTAQKPCCCSVTDVAVGLRYKETAKYVPSTSKGSCKPMPERSPHVAAECNGRGLSDEIEDKPSTSAQSEIEYGYQSLHSLENMPMATQSSSETLKEEELLDVMLLLYHLGISPNFRQAFYFMSQQSQSISLLEETDRQIREKSCSEQVRRLKEARNSYHEDLVDCVRHCVWYRATLFSQWKQRGMYATCMWVVELLLVLSNSNSMFHYVPEFYVESLVDCFHALRRSDPPFVSPALFLMQGLASFVTLVVKHFDDTRIYKEFMLVFENNREAINKMPRSLLSAFDNRSWIPVTNILSRFCKGSGFASYKNGESASSATFQVLLRETCIHEQELFFSFLNRLFNTLSWTMTEFSMSIREMQDKNQVADLQQRKCSVIFDISCSLARILEFCTREIPCAFLMGPDMNLRRLTELVVFILNHIISVADAEFFDMTLRRPGQHQEKTNRTMILAPLVGIILSLMECSSTSERRELNDVIAVFASMDCPATIHFGLQYLLSYNWSNVLRGDSSLAKLAQLKEFSHYFRRITASVDGEEEDHSLNAGDEDDDHTCCICYNCDSDATFQPCHHRSCFGCISRHLLNNQRCFFCNAVVTSVTR

SEQ ID NO: 189507 - protein, 1225 aa, Zea Mays
MAEGSSSHRRSAFSPGLAVLLSGDEAKISSQKSHLVSYHDEIGHQAVERTIEHIFDLPHKSVVRPPGPVDTGFVHSVVRNQARKFDLDWENCIRGYHRSVFIVDKGAGQRKVVLDDSSICGSFRNVRGPSLVESSAPFSSARANACVWKGKWMYEVTLETSGVQQLGWATLSCPFTDQKGVGDADDSYSFDGRRVTKWNNDPKPYGQPWAVGDVIGCCINLDAGEISFYRNGTSLGVAFDGIRSVEPKKGYYAAVSLSEGERCHLNFGSHPFRYPVDGFDPLEAPPRSWSFVTYLLRCLFRLLEVHNLEKSESAYFEKLRRVKKFAPLQELFGPISEGICAEIFSAIEASQGCLEYIAWGSLITLLLDVFRTREPHDFSCLDQVLDLFLRFPGCTSLFQELIVALSCMCKVAPLVLTECPYSGSYPFLALVCHLLRHKDVMCLWWKAEDFVFSFEGFLTRKIPNKQDLQCLVPSVWWPGSSEDEVSMTLTMTTLSDAIKKIEEMHRELCSLVICFIPPMSTPQPPGSVFRSFVQSLVLKARGGDHRMVVNGTFNNTVLVSLYTVILHLLSEGFSMDSAGSASSSKANFGNGVGFLHKGGKRKFPTQLFFRNDAYHSVIPRIGGPPSILMHHQFDAVENEVQWDEGCMNDEETRVTHTTAQKPCCCSVTDVAVGLRYKETAKYVPSTSKGSCKPMPERSPHVAAECNGRGLSDEIEDKPSTSAQSEIEYGYQSLHSLENMPMATQSSSETLKEEELLDVMLLLYHLGISPNFRQAFYFMSQQSQSISLLEETDRQIREKSCSEQVRRLKEARNSYHEDLVDCVRHCVWYRATLFSQWKQRGMYATCMWVVELLLVLSNSNSMFHYVPEFYVESLVDCFHALRRSDPPFVSPALFLMQGLASFVTLVVKHFDDTRIVNPDLKDLLLQSISVLVQYKEFMLVFENNREAINKMPRSLLSAFDNRSWIPVTNILSRFCKGSGFASYKNGESASSATFQVADLQQRKCSVIFDISCSLARILEFCTREIPCAFLMGPDMNLRRLTELVVFILNHIISVADAEFFDMTLRRPGQHQEKTNRTMILAPLVGIILSLMECSSTSERRELNDVIAVFASMDCPATIHFGLQYLLSYNWSNVLRGDSSLAKLAQLKEFSHYFRRITASVDGEEEDHSLNAGDEDDDHTCCICYNCDSDATFQPCHHRSCFGCISRHLLNNQRCFFCNAVVTSVTR

SEQ ID NO: 189508 - protein, 1243 aa, Zea Mays
MAEGSSSHRRSAFSPGLAVLLSGDEAKISSQKSHLVSYHDEIGHQAVERTIEHIFDLPHKSVVRPPGPVDTGFVHSVVRNQARKFDLDWENCIRGYHRSVFIVDKGAGQRKVVLDDSSICGSFRNVRGPSLVESSAPFSSARANACVWKGKWMYEVTLETSGVQQLGWATLSCPFTDQKGVGDADDSYSFDGRRVTKWNNDPKPYGQPWAVGDVIGCCINLDAGEISFYRNGTSLGVAFDGIRSVEPKKGYYAAVSLSEGERCHLNFGSHPFRYPVDGFDPLEAPPRSWSFVTYLLRCLFRLLEVHNLEKSESAYFEKLRRVKKFAPLQELFGPISEGICAEIFSAIEASQGCLEYIAWGSLITLLLDVFRTREPHDFSCLDQVLDLFLRFPGCTSLFQELIVALSCMCKVAPLVLTECPYSGSYPFLALVCHLLRHKDVMCLWWKAEDFVFSFEGFLTRKIPNKQDLQCLVPSVWWPGSSEDEVSMTLTMTTLSDAIKKIEEMHRELCSLVICFIPPMSTPQPPGSVFRSFVQSLVLKARGGDHRMVVNGTFNNTVLVSLYTVILHLLSEGFSMDSAGSASSSKANFGNGVGFLHKGGKRKFPTQLFFRNDAYHSVIPRIGGPPSILMHHQFDAVENEVQWDEGCMNDEETRVTHTTAQKPCCCSVTDVAVGLRYKETAKYVPSTSKGSCKPMPERSPHVAAECNGRGLSDEIEDKPSTSAQSEIEYGYQSLHSLENMPMATQSSSETLKEEELLDVMLLLYHLGISPNFRQSQSISLLEETDRQIREKSCSEQVRRLKEARNSYHEDLVDCVRHCVWYRATLFSQWKQRGMYATCMWVVELLLVLSNSNSMFHYVPEFYVESLVDCFHALRRSDPPFVSPALFLMQGLASFVTLVVKHFDDTRIYKEFMLVFENNREAINKMPRSLLSAFDNRSWIPVTNILSRFCKGSGFASYKNGESASSATFQVLLRETCIHEQELFFSFLNRLFNTLSWTMTEFSMSIREMQDKNQVADLQQRKCSVIFDISCSLARILEFCTREIPCAFLMGPDMNLRRLTELVVFILNHIISVADAEFFDMTLRRPGQHQEKTNRTMILAPLVGIILSLMECSSTSERRELNDVIAVFASMDCPATIHFGLQYLLSYNWSNVLRGDSSLAKLAQLKEFSHYFRRITASVDGEEEDHSLNAGDEDDDHTCCICYNCDSDATFQPCHHRSCFGCISRHLLNNQRCFFCNAVVTSVTR

SEQ ID NO: 189509 - protein, 1009 aa, Zea Mays
MAEGSSSHRRSAFSPGLAVLLSGDEAKISSQKSHLVSYHDEIGHQAVERTIEHIFDLPHKSVVRPPGPVDTGFVHSVVRNQARKFDLDWENCIRGYHRSVFIVDKGAGQRKVVLDDSSICGSFRNVRGPSLVESSAPFSSARANACVWKGKWMYEVTLETSGVQQLGWATLSCPFTDQKGVGDADDSYSFDGRRVTKWNNDPKPYGQPWAVGDVIGCCINLDAGEISFYRNGTSLGVAFDGIRSVEPKKGYYAAVSLSEGERCHLNFGSHPFRYPVDGFDPLEAPPRSWSFVTYLLRCLFRLLEVHNLEKSESAYFEKLRRVKKFAPLQELFGPISEGICAEIFSAIEASQGCLEYIAWGSLITLLLDVFRTREPHDFSCLDQVLDLFLRFPGCTSLFQELIVALSCMCKVAPLVLTECPYSGSYPFLALVCHLLRHKDVMCLWWKAEDFVFSFEGFLTRKIPNKQDLQCLVPSVWWPGSSEDEVSMTLTMTTLSDAIKKIEEMHRELCSLVICFIPPMSTPQPPGSVFRSFVQSLVLKARGGDHRMVVNGTFNNTVLVSLYTVILHLLSEGFSMDSAGSASSSKANFGNGVGFLHKGGKRKFPTQLFFRNDAYHSVIPRIGGPPSILMHHQFDAVENEVQWDEGCMNDEETRVTHTTAQKPCCCSVTDVAVGLRYKETAKYVPSTSKGSCKPMPERSPHVAAECNGRGLSDEIEDKPSTSAQSEIEYGYQSLHSLENMPMATQSSSETLKEEELLDVMLLLYHLGISPNFRQAFYFMSQQSQSISLLEETDRQIREKSCSEQVRRLKEARNSYHEDLVDCVRHCVWYRATLFSQWKQRGMYATCMWVVELLLVLSNSNSMFHYVPEFYVESLVDCFHALRRSDPPFVSPALFLMQGLASFVTLVVKHFDDTRIVNPDLKDLLLQSISVLVQYKEFMLVFENNREAINKMPRSLLSAFDNRSWIPVTNILSRFCKGSGFASYKNGESASSATFQLDNDRVLYVHPGDAR

SEQ ID NO: 189510 - protein, 205 aa, Zea Mays
MVLARVLPLPAPSSAPHRRLLLPTQAAPAPARVLTVRAVACRAANAMAAVALDPPAVAPSPAEVAAVGVGEELPEGYDQMMPTVEPSRRRRAGLLLHPTSLRGPHGIGDLGDEALAFLHWLRDAGCTLWQVLPLVPPGRTAGEDGSPYSGQDANCGNTLLLSLEELVKDGLLMSDELPDPVDTEYVEFDTVANLKEPLIAKRGSY

SEQ ID NO: 189511 - protein, 542 aa, Zea Mays
MVLARVLPLPAPSSAPHRRLLLPTQELPEGYDQMMPTVEPSRRRRAGLLLHPTSLRGPHGIGDLGDEALAFLHWLRDAGCTLWQVLPLVPPGRTAGEDGSPYSGQDANCGNTLLLSLEELVKDGLLMSDELPDPVDTEYVEFDTVANLKEPLIAKAAERLLLSHGELRTQYDCFKKNPNISGWLEDAALFAAIDKSINAFSWYEWPEPLKNRHLGALEDIYEKQKDFIETFMAQQFLFQRQWQRIRKYAQKLGISIMGDMPIYVGYHSADVWANRKSFLLDKNGFPTFVSGVPPDAFSETGQLWNSPLYDWKAMEADCFSWWIKRIKRALDLYDEFRIDHFRGLAGFWAVPSDAKVALVGSWRAGPRNSFFDTLFKAVGRIDIIAEDLGVITEDVVQLRKSIGAPGMAVLQFAFGGGSDNPHLPHNHEMDQVVYTGTHDNDTVLGWWQNLPEEEKKIVIKYLPEAENIDITWTLITAALSSVARTSVVTMQDILGLDSSARMNTPATQKGNWRWRIPSSVGFDSLSPEAAKLKELLALYNRQ

SEQ ID NO: 189512 - protein, 478 aa, Zea Mays
MEAVYNSVISLGVKAIGWRPEWRFKWKPLDSADEEKGTAHFPMVLVQIPMYNELEVYKLSIAAACELQWPKDRIVIQVLDDSTDPFIKNLVELECEHWVNKGVNIKYATRTSRKGFKAGALKKGMECDYAWQSEYIAIFDADFQPEPDFLLQTVPFLLHNPEVALVQARWSFVNDTTSLLTRVQKMFYDYHFKVEQEAGSATFAFFSFNGTAGVWRTGAIRDAGGWKDRTTVEDMDLAVRATLKGWKFVYVGDVRVKSELPSTYKAYCRQQFRWSSGGANLFRKMAKDVLFAKDISLVKKFYMLYSFFFVRRVVAPTAACILYNVIIPISVTIPELYLPVWGVAYIPMVLTVVTAIRHPKNLHILPFWILFESVMTLHRMRAAMTGLLELEGFNQWIVTKKVGNDLEDTEVPLLQKTRKRLRDRVNLPEIGFSVFLFLCASYNLVFHGKTSYYLYMYLQGLAFLLLGFNFTGNCSCYQ

SEQ ID NO: 189513 - protein, 185 aa, Zea Mays
MCFELIILMSVRYCYIIGRNDGLWVHFFLQKRDNFYSPSSIIYIYCFNGNLSSMTNSFCISFLVEMQDLTCSCFVSGDLPIIISCASLALADAGIMMYDLVTSVSVSCFRKNIIIDPTSDEEAWQDGSLVVAFMPARKEITQLTLTGEWSDGRITNAVELCMDACSKLGDILRDRLKDTATLTCE

SEQ ID NO: 189514 - protein, 220 aa, Zea Mays
MRRGYSYSPSPPRGYRRRARSPSPHDHYGGRGRDLPTSLLVRNLRRDCRPEDLRRPFGQFGRVKDIYLPRDYYTGDPRGFGFVQYYDPADAADAKYYMDGQVVLGRQITVVFAEENRKKPQEMRARDRVRGHSYDDRRYSRSRSPRYYRGRSPSRSQSYSRSPPQNPRHRLRERSYSGSPVDSRSRSGSPYEDGYRKSSRRERLSFPVPEKYRETVCCTF

SEQ ID NO: 189515 - protein, 210 aa, Zea Mays
MRRGYSYSPSPPRGYRRRARSPSPHDHYGGRGRDLPTSLLVRNLRRDCSRPEDLRRPFGQFGRVKDIYLPRDYYTGDPRGFGFVQYYDPADAADAKYYMDGQVVLGRQITVVFAEENRKKPQEMRARDRVRGHSYDDRRYSRSRSPRYYRGRSPSRSQSYSRSPPQNPRHRLRERSYSGSPVDSRSRSGSPYEDGYRKSSRRERSLSVSG

SEQ ID NO: 189516 - protein, 137 aa, Zea Mays
MMTGGILALGRLVIIGAALLHAAKATRGLHLRIQDTDLERGPTPAHLWTADQEVGALMRMDIANHHGERGLFLSADEAVLRSRAIAVNLRMVAYLLCLSEPYMFCLDYHSQYQRSIVRLFAVLSSLEDTEGGHRFSQ

SEQ ID NO: 189517 - protein, 162 aa, Zea Mays
MRRGYSYSPSPPRGYRRRARSPSPHDHYGGRGRDLPTSLLVRNLRRDCSRPEDLRRPFGQFGRVKDIYLPRDYYTGDPRGFGFVQYYDPADAADAKYYMDGQVVLGRQITVVFAEENRKKPQEMRARDRVRFVGSSQCDFLVHADFSIHSFFFGCILQGSFL

SEQ ID NO: 189518 - protein, 195 aa, Zea Mays
MEKKQEAALYNFFETGSRSAHYASVGDEADQARSVPADDSSKSRAGSCLRCSWSEWCSSATLQILHCTPYSPRLLHNATSTRSLVGLRCNFDLCSSFRGYGVLAGGLGGGEHEGLFRSWGLRRADSRSDRLQLEGATTSSFFLNSGKLVWRRRLATIPIHHEVGLLVVICGHGNRQRSGFLSPEEAIFEYHGNSK

SEQ ID NO: 189519 - protein, 358 aa, Zea Mays
MALVAGSYERFIWGFSLKTLTSPSATGASPSETLTLAPLFSYPAHTGPVRCVAAAPRAGLVASGGADDSVRLYDLPSAADLGPLLDPSAAVSALAFYSRGPVPRNLLAACDDGSLHIYDADGFALLSTLRAFPRHEAAEALAVHPSGRVALAVGRAGALAMLNLVRGRRSFACRLEHPASAIAYAEDRDGGDRFVMAAENKVSVHDSVDARVIHDMDCGKKVLAMAPAKSGVLYTGGEDRCITAWDLSSGKVSSRIEGAHATRVKGVVVFGNSNDGSQLSNLISSASSDGVIRIWDIRTIGNGKPTPLAEANTKARLTCLAGTSLKCAVVRDVIFVGEGFPYPFPRPHSCGSLRQPPL

SEQ ID NO: 189520 - protein, 717 aa, Zea Mays
MAGLSGGGGGWGGYDDDDWGLSAEQLDQMERDAIRQLAERKASASAASTAPIPASPLGATSPLPSRATVPAAAVSSPLGGNHPATRASLEARFGKVEALSPSRNAVNNSQGSSPKISVHLFLHSSGMIAARFPYSQLLVDAFRKIPKASWNAKERVWMFPPSSLAIVEEVPRSVPGLTVEVHKLDPLVQRALAAALRSKDLRGLYDRIPPHLESKLMPFQREGIRFVLQHGGRALIADEMGLGKTLQAIAVASCLRDAWPVLVISPSSLRLHWASAIQSWLNIPVEDILVVLPHTGGSHKAGFRVAYSNSKGDFHLDGVFNVISYDVVPKIQSTLLDLDFKIVIADESHFMKNGQAKRTVASLPVLQKAQYVVLLSGTPALSRPIELFTQIQALYPTVYKSVSEYGNIYCKGGFFGLYQGASNHEELHNLMKATVMIRRLKKDVLSQLPVKRRQQVFLDLSEKDVKNVRALFIELETLKVKIESSDSKEMIDSLRFAYQNIVNKIYTDSAVAKIPAVLDFLGTMIEEGCKFLIFAHHQPMIDAIEKHLLKKKVKCIKIDGKTPLTTRQTLVTDFQNNDDVKAAVLSIKAGGYGITLTAASTVIFAELSWTPGDIIQAEDRAHRIGQVSSVNVYYLLSNGTIDDLMWDVVQGKLENLGCWTGRRRRWRFPRGTAGQAPRRSRRHWSASSSGPARPRPRRRVCPALNEAASDLRRGRGL

SEQ ID NO: 189521 - protein, 631 aa, Zea Mays
MAGLSGGGGGWGGYDDDDWGLSAEQLDQMERDAIRQLAERKASASAASTAPIPASPLGATSPLPSRATVPAAAVSSPLGGNHPATRASLEARFGKVEALSPSRNAVNNSQGSSPKISVHLFLHSSGMIAARFPYSQLLVDAFRKIPKASWNAKERVWMFPPSSLAIVEEVPRSVPGLTVEVHKLDPLVQRALAAALRSKDLRGLYDRIPPHLESKLMPFQREGIRFVLQHGGRALIADEMGLGKTLQAIAVASCLRDAWPVLVISPSSLRLHWASAIQSWLNIPVEDILVVLPHTGGSHKAGFRVAYSNSKGDFHLDGVFNVISYDVVPKIQSTLLDLDFKIVIADESHFMKNGQAKRTVASLPVLQKAQYVVLLSGTPALSRPIELFTQIQALYPTVYKSVSEYGNIYCKGGFFGLYQGASNHEELHNLMKATVMIRRLKKDVLSQLPVKRRQQVFLDLSEKDVKNVRALFIELETLKVKIESSDSKEMIDSLRFAYQNIVNKIYTDSAVAKIPAVLDFLGTMIEEGCKFLIFAHHQPMIDAIEKHLLKKKVKCIKIDGKTPLTTRQTLVTDFQNNDDVKAAVMLDGQEKTLEVSQRDCRPSPSKKQKTLVGFLKRPSASTSAEEGMPST

SEQ ID NO: 189522 - protein, 531 aa, Zea Mays
MIAARFPYSQLLVDAFRKIPKASWNAKERVWMFPPSSLAIVEEVPRSVPGLTVEVHKLDPLVQRALAAALRSKDLRGLYDRIPPHLESKLMPFQREGIRFVLQHGGRALIADEMGLGKTLQAIAVASCLRDAWPVLAIQSWLNIPVEDILVVLPHTGGSHKAGFRVAYSNSKGDFHLDGVFNVISYDVVPKIQSTLLDLDFKIVIADESHFMKNGQAKRTVASLPVLQKAQYVVLLSGTPALSRPIELFTQIQALYPTVYKSVSEYGNIYCKGGFFGLYQGASNHEELHNLMKATVMIRRLKKDVLSQLPVKRRQQVFLDLSEKDVKNVRALFIELETLKVKIESSDSKEMIDSLRFAYQNIVNKIYTDSAVAKIPAVLDFLGTMIEEGCKFLIFAHHQPMIDAIEKHLLLSIKAGGYGITLTAASTVIFAELSWTPGDIIQAEDRAHRIGQVSSVNVYYLLSNGTIDDLMWDVVQGKLENLGQMLDGQEKTLEVSQRDCRPSPSKKQKTLVGFLKRPSASTSAEEGMPST

SEQ ID NO: 189523 - protein, 456 aa, Zea Mays
MAGLSGGGGGWGGYDDDDWGLSAEQLDQMERDAIRQLAERKASASAASTAPIPASPLGATSPLPSRATVPAAAVSSPLGGNHPATRASLEARFGKVEALSPSRNAVNNSQGSSPKISVHLFLHSSGMIAARFPYSQLLVDAFRKIPKASWNAKERVWMFPPSSLAIVEEVPRSVPGLTVEVHKLDPLVQRALAAALRSKDLRGLYDRIPPHLESKLMPFQREGIRFVLQHGGRALIADEMGLGKTLQAIAVASCLRDAWPVLVISPSSLRLHWASAIQSWLNIPVEDILVVLPHTGGSHKAGFRVAYSNSKGDFHLDGVFNVISYDVVPKIQSTLLDLDFKIVIADESHFMKNGQAKRTVASLPVLQKAQYVVLLSGTPALSRPIELFTQIQALYPTVYKSVSEYGNIYCKGGFFGLYQGASNHEELHNLMKATVMIRRLKKDVLSQLPVKRRQQI

SEQ ID NO: 189524 - protein, 220 aa, Zea Mays
MWYLYIQNIRLLFFYSPLYFEFEYLFSRSWACLPMSKKRKHLDPANSLKDSEQVVASDFIRGDDLDDLLSKLIRSVEIAKASRGRLPEKIWMKQQFAIGVNDVTRVLERMPHSVTAHPAQMSSEAPTVSGQRQAPLVPLQAVLVAADCNPKWLTKHIPTLAFTRQVPVLCMKDNKGGSVRLGHVVNVRTALAIGVKAKDSVVNKTIDEFLKDSKLVANEP

SEQ ID NO: 189525 - protein, 185 aa, Zea Mays
MSKKRKHLDPANSLKDSEQVVASDFIRGDDLDDLLSKLIRSVEIAKASRGRLPEKIWMKQQFAIGVNDVTRVLERMPHSVTAHPAQMSSEAPTVSGQRQAPLVPLQAVLVAADCNPKWLTKHIPTLAFTRQVPVLCMKDNKGGSVRLGHVVNVRTALAIGVKGVLPHTGGSHKAGFRVAYSNSKG

SEQ ID NO: 189526 - protein, 183 aa, Zea Mays
MDIYYPYPSPDRHMTCGPRHGRILDSSASARPQQPSPPTAQLPSRVFCYYKPHFNLLRHNILYNLEFNKTVFLPRFTIKIELLVNLNQFSFSFIFSTRFALALFCERIRRGQSQGTPTLVLPPSQTSATVLPSSILRHRTVAVVLDFATARRRLAGLHNLARRHHQYPRRPLYQVRSGFQHPR

SEQ ID NO: 189527 - protein, 115 aa, Zea Mays
MDGQDPVSVKFSVSTFEAWQQSLKCKQTALKTVMLLAARLPIVRWPLLALPGKVWSSSKRLPASLLPPLGLVRLFPIHMDWMGLEKIVKKFDLFGIQTHPIPLNPHGLRANRTSP

SEQ ID NO: 189528 - protein, 61 aa, Zea Mays
MDGQDPVSVKFSVSTFEAWQQSLKCKQTALKTVMLLAARLPIVRWPLLALPGKAVWVCAST

SEQ ID NO: 189529 - protein, 255 aa, Zea Mays
MLLHSIRRRPAPGLRQNGFQKMDKIKDSSRQSKQLEDLTAKMRECKRLIKEFDRILKDEEKKNTPDVNKQLNDKKQFMIKELNSYVTLRKTYQSSLGNKRIELFDTGNDQVAEGTPVQMASEMSNQELISTGRKQMDQTDQAIERSKMVVAQTVEVGAQTAATLTQQTEQMKRIGNELDSVHFSLKKASQMVKEIGRQVATDKCIMAFLFLIVCGVIAIIVVKIVNPHNKNIRDIPGLAPPAMNRKLLSIDAAGL

SEQ ID NO: 189530 - protein, 236 aa, Zea Mays
MCGSRLSSLVPSGVLGTVSGDTSLVLSLASNYSSPILVVRLQTQPFDLVHSNVWGIAPFVSKEGHRYYVISLMIFLVSHKLFFGFTSSSSHCLSEFCYYGHTQFDSHIHVSRADSAGEYLSRALRQSLAKQGTLPQHSCTGAHAHNAVVECRHHHLLETALASLLTSFVSLHFWAEVVSTTVYLVNIQPSIALHGATPLEQLFARPSQYSHLHAFGCVAFVLLQSRERTKLIGQSV

SEQ ID NO: 189531 - protein, 175 aa, Zea Mays
MSVRSSQQSDSQEARARRPTYATMPGLTIGDTVPNLELDSTHGKIRIHDYVGDGYAIIFSHPADFTPVCTTEMAAMAGYAKEFEKRGVKLLGISCDDVESHRQWTKDVEAYGGKQQQQQHTTTKRWPRPLTGSPGSAPSSRPASPTRRPGRCSRRGSRPPTCPPRRATSVSPRFS

SEQ ID NO: 189532 - protein, 851 aa, Zea Mays
MAASSSRGAAAAAVDDDDEPYLLGFIISKIVGMRYYRGKVHGRETVGLVRQPLNRYDNNAIAVFNARNDQVGHLPGALAAVLAPLLDSHLLAAAQGIVPRSGSKINPNAYSLPCQVHLFARPAAASVVEAALHEAGIDLIHVDHPEFALSQAAAVMEQFKKPDRDRDVDKLFSLVGKEGKNQTQPMDPPGDVVLSELFGHQKEALGWMVHREESADLPPFWQEGEDGGFENVLTNQKTEKRPPPLKGGIFADDMGLGKTLTLLSLIGRTKARNVGAKKARGGKRRKVEDGGEGSRTTLVVCPPSVFSSWVTQLEEHLKAGSLKVYMYHGERTRDKKELLKYDLVLTTYSILGTEFEQEDSPVKDIEWFRVILDEAHVIKNSAARQTKAVIALNAERRWVVTGTPIQNSSFDLYPLMAFLRFQPFSIKSYWQSLIQRPLEKGSKAGLSRLQNLLGAISLRRIKEMDDGNKSMVELPSKTVLACYIDLSAEEREYYDQMEQEGRNKMQEFGDRDSILSNYSTVLYFILRLRQLCDDVALCPLDMKAWFPASSIEDVSKHPELLKKLALLVDDGDDFDCPICLSPPTKTVITSCTHIYCQTCILKILKSSSSRCPICRRTLSKEDLFLAPEVKHPDEDGSGNLESDRPLSSKVKMLILLEAPLRKAGFKTLRLDGSMSAKKRLQVIQEFSHGGSDSPTVLLASLKAAGAGVNLTAASTVYLFDPWWNPGVEEQAMDRVHRIGQKKEVKVIRLIVKGSIEERILALQERKKRLISGAFGKKGGKNEKEMRVEELRMMLGLGVTLNSTNKKVHHQYCNTHLSFLLCQEIVLSYFRALHFFCKYYQISPAATTAVCL

SEQ ID NO: 189533 - protein, 778 aa, Zea Mays
MAASSSRGAAAAAVDDDDEPYLLGFIISKIVGMRYYRGKVHGRETVGLVRQPLNRYDNNAIAVFNARNDQVGHLPGALAAVLAPLLDSHLLAAAQGIVPRSGSKINPNAYSLPCQVHLFARPAAASVVEAALHEAGIDLIHVDHPEFALSQAAAVMEQFKKPDRDRDVDKLFSLVGKEGKNQTQPMDPPGDVVLSELFGHQKEALGWMVHREESADLPPFWQEGEDGGFENVLTNQKTEKRPPPLKGGIFADDMGLGKTLTLLSLIGRTKARNVGAKKARGGKRRKVEDGGEGSRTTLVVCPPSVFSSWVTQLEEHLKAGSLKVYMYHGERTRDKKELLKYDLVLTTYSILGTEFEQEDSPVKDIEWFRVILDEAHVIKNSAARQTKAVIALNAERRWVVTGTPIQNSSFDLYPLMAFLRFQPFSIKSYWQSLIQRPLEKGSKAGLSRLQNLLGAISLRRIKEMDDGNKSMVELPSKTVLACYIDLSAEEREYYDQMEQEGRNKMQEFGDRDSILSNYSTVLYFILRLRQLCDDVALCPLDMKAWFPASSIEDVSKHPELLKKLALLVDDGDDFDCPICLSPPTKTVITSCTHIYCQTCILKILKSSSSRCPICRRTLSKEDLFLAPEFRKMLILLEAPLRKAGFKTLRLDGSMSAKKRLQVIQEFSHGGSDSPTVLLASLKAAGAGVNLTAASTVYLFDPWWNPGVEEQAMDRVHRIGQKKEVKVIRLIVKGSIEERILALQERKKRLISGAFGKKGGKNEKEMRVEELRMMLGLGK

SEQ ID NO: 189534 - protein, 774 aa, Zea Mays
MAASSSRGAAAAAVDDDDEPYLLGFIISKIVGMRYYRGKVHGRETVGLVRQPLNRYDNNAIAVFNARNDQVGHLPGALAAVLAPLLDSHLLAAAQGIVPRSGSKINPNAYSLPCQVHLFARPAAASVVEAALHEAGIDLIHVDHPEFALSQAAAVMEQFKKPDRDRDVDKLFSLVGKEGKNQTQPMDPPGDVVLSELFGHQKEALGWMVHREESADLPPFWQEGEDGGFENVLTNQKTEKRPPPLKGGIFADDMGLGKTLTLLSLIGRTKARNVGAKKARGGKRRKVEDGGEGSRTTLVVCPPSVFSSWVTQLEEHLKAGSLKVYMYHGERTRDKKELLKYDLVLTTYSILGTEFEQEDSPVKDIEWFRVILDEAHVIKNSAARQTKAVIALNAERRWVVTGTPIQNSSFDLYPLMAFLRFQPFSIKSYWQSLIQRPLEKGSKAGLSRLQNLLGAISLRRIKEMDDGNKSMVELPSKTVLACYIDLSAEEREYYDQMEQEGRNKMQEFGDRDSILNMKAWFPASSIEDVSKHPELLKKLALLVDDGDDFDCPICLSPPTKTVITSCTHIYCQTCILKILKSSSSRCPICRRTLSKEDLFLAPEVKHPDEDGSGNLESDRPLSSKFRKMLILLEAPLRKAGFKTLRLDGSMSAKKRLQVIQEFSHGGSDSPTVLLASLKAAGAGVNLTAASTVYLFDPWWNPGVEEQAMDRVHRIGQKKEVKVIRLIVKGSIEERILALQERKKRLISGAFGKKGGKNEKEMRVEELRMMLGLGK

SEQ ID NO: 189535 - protein, 186 aa, Zea Mays
MTRASTIDFGRRKQSELFGSGPLRPANIIRNKFPTYKNGSNGIVIKLADGPEMPSLKEAVAKEATDLLDRCQRPSVRELTMKFEKGFNTATLLSNEAKWRHAALLERDILLKDLKSVLESLRGRVGGKNKDEIVESLSMVDILAIELSKREDELLRQKTEVTKIADTLKLMPRELLTKKEPMLGWR

SEQ ID NO: 189536 - protein, 194 aa, Zea Mays
MMLEGSNRRIHSVHRHSGLAVAGLAADGRQIVSRTKSEAASYEKTRVYGEPISVKELADRVASYVHLCTLYWWLRPFGCGVILGGYDRDGPQLYMIEPSGVSYKYFGAALGKGRQAAKTEIEKLKLSELTCREGIVEVAKIIYGVHDEAKDKAFELELSWICDESNRQHQKVPNELLEQAKAAAQAALEEMDAD

SEQ ID NO: 189537 - protein, 751 aa, Zea Mays
MTVWYDLLQWRNEMYNSVIDAFKDFGQTNPQLHHLGYRDKAWNVNKLAHIARKQGLPEVCVTILDKMYGHATMEVQEAFVKICEQAKAYLEMKGELVSGLNLINNTNLEFFPVKNKAEIFRLRGDFLLKMNECETANQSYSNAITLFKHLPKGWISWGNYCDMVFKETKDEVWLEYAVSCFFQGIKYGVSNSRSHLARILYLLSFDGQNEPVGRALDKYLEQLPHWVWLSWIPQLLLSLQRSEAQHCKLVLMKIAQVYPQALYYWLRTYLMERRDVATKTEIGRNMLAQQRMQQAMMANNAANNLPDGSARASNHAGSNMTSDNQSHQASQSVGAAGSHDGGNVQGQDPERSTPEGGTNTSHDQGQQSSTGAEGSQVPLRRNSGHGWVTSAASAFDAAKDIMEALRSKHTNLANELELLLSEIGSRFVTLPEERLLAVVNALLHRCYKYPTATTGEVPQSLKKELSGVCRACFSQDAVNKHVDFVKEYKQDFERDLDPESATTFPATLAELTERLKHWKNILQSNVEDRFPAVLKLEEESKTLRDFHVVDIELPGQYFTDQEIAPDHTVKLDRVGPDIPIVRRHGSSFRRLTLIGSDGSQRHFIVQTSLTPNARSDERMLQLFRVLNKMFDKHKESRRRHLAIHTPIIIPVWSQLNQAVSGQLSPEAIVELRLQAYNEITKNIVNDNIFSQYMHKILPTGNYLWTFKKQFAIQVALSCFMSYMLQIGGRAPNKILFAKNTGKIFQTDFHPG

SEQ ID NO: 189538 - protein, 902 aa, Zea Mays
MTVWYDLLQWRNEMYNSVIDAFKDFGQTNPQLHHLGYRDKAWNVNKLAHIARKQGLPEVCVTILDKMYGHATMEVQEAFVKICEQAKAYLEMKGELVSGLNLINNTNLEFFPVKNKAEIFRLRGDFLLKMNECETANQSYSNAITLFKHLPKGWISWGNYCDMVFKETKDEVWLEYAVSCFFQGIKYGVSNSRSHLARILYLLSFDGQNEPVGRALDKYLEQLPHWVWLSWIPQLLLSLQRSEAQHCKLVLMKIAQVYPQALYYWLRTYLMERRDVATKTEIGRNMLAQQRMQQAMMANNAANNLPDGSARASNHAGSHDGGNVQGQDPERSTPEGGTNTSHDQGQQSSTGAEGSQVPLRRNSGHGWVTSAASAFDAAKDIMEALRSKHTNLANELELLLSEIGSRFVTLPEERLLAVVNALLHRCYKYPTATTGEVPQSLKKELSGVCRACFSQDAVNKHVDFVKEYKQDFERDLDPESATTFPATLAELTERLKHWKNILQSNVEDRFPAVLKLEEESKTLRDFHVVDIELPGQYFTDQEIAPDHTVKLDRVGPDIPIVRRHGSSFRRLTLIGSDGSQRHFIVQTSLTPNARSDERMLQLFRVLNKMFDKHKESRRRHLAIHTPIIIPVWSQVRMVEDDLMYSTFLEVYEINCARHNREADSPITIFKEQLNQAVSGQLSPEAIVELRLQAYNEITKNIVNDNIFSQYMHKILPTGNYLWTFKKQFAIQVALSCFMSYMLQIGGRAPNKILFAKNTGKIFQTDFHPAYDPNGMIEFNELVPFRLTRNLQAFFSNFGVEGLIVSAMCSAAQSVVSPKQSQHIWHHLAMFFRDELLSWSWRRPLGIPSVPVAAGMINPSDFQQKVVNNVEHVISRIKSISPHCLAEEEVFLGGINIVSLWCF

SEQ ID NO: 189539 - protein, 803 aa, Zea Mays
MTVWYDLLQWRNEMYNSVIDAFKDFGQTNPQLHHLGYRDKAWNVNKLAHIARKQGLPEVCVTILDKMYGHATMEVQEAFVKICEQAKAYLEMKGELVSGLNLINNTNLEFFPVKNKAEIFRLRGDFLLKMNECETANQSYSNAITLFKHLPKGWISWGNYCDMVFKETKDEVWLEYAVSCFFQGIKYGVSNSRSHLARILYLLSFDGQNEPVGRALDKYLEQLPHWVWLSWIPQLLLSLQRSEAQHCKLVLMKIAQVYPQALYYWLRTYLMERRDVATKTEIGRNMLAQQRMQQAMMANNAANNLPDGSARASNHAGSNMTSDNQSHQASQSVGAAGSHDGGNVQGQDPERSTPEGGTNTSHDQGQQSSTGAEGSQVPLRRNSGHGWVTSAASAFDAAKDIMEALRSKHTNLANELELLLSEIGSRFVTLPEERLLAVVNALLHRCYKYPTATTGEVPQSLKKELSGVCRACFSQDAVNKHVDFVKEYKQDFERDLDPESATTFPATLAELTERLKHWKNILQSNVEDRFPAVLKLEEESKTLRDFHVVDIELPGQYFTDQEIAPDHTVKLDRVGPDIPIVRRHGSSFRRLTLIGSDGSQRHFIVQTSLTPNARSDERMLQLFRVLNKMFDKHKESRRRHLAIHTPIIIPVWSQVRMVEDDLMYSTFLEVYEINCARHNREADSPITIFKEQLNQAVSGQLSPEAIVELRLQAYNEITKNIVNDNIFSQYMHKILPTGNYLWTFKKQFAIQVALSCFMSYMLQIGGRAPNKILFAKNTGKIFQTDFHPAKPAHLASFGYVFPR

SEQ ID NO: 189540 - protein, 906 aa, Zea Mays
MTVWYDLLQWRNEMYNSVIDAFKDFGQTNPQLHHLGYRDKAWNVNKLAHIARKQGLPEVCVTILDKMYGHATMEVQEAFVKICEQAKAYLEMKGELVSGLNLINNTNLEFFPVKNKAEIFRLRGDFLLKMNECETANQSYSNAITLFKHLPKGWISWGNYCDMVFKETKDEVWLEYAVSCFFQGIKYGVSNSRSHLARILYLLSFDGQNEPVGRALDKYLEQLPHWVWLSWIPQLLLSLQRSEAQHCKLVLMKIAQVYPQALYYWLRTYLMERRDVATKTEIGRNMLAQQRMQQAMMANNAANNLPDGSARASNHAVGAAGSHDGGNVQGQDPERSTPEGGTNTSHDQGQQSSTGAEGSQVPLRRNSGHGWVTSAASAFDAAKDIMEALRSKHTNLANELELLLSEIGSRFVTLPEERLLAVVNALLHRCYKYPTATTGEVPQSLKKELSGVCRACFSQDAVNKHVDFVKEYKQDFERDLDPESATTFPATLAELTERLKHWKNILQSNVEDRFPAVLKLEEESKTLRDFHVVDIELPGQYFTDQEIAPDHTVKLDRVGPDIPIVRRHGSSFRRLTLIGSDGSQRHFIVQTSLTPNARSDERMLQLFRVLNKMFDKHKESRRRHLAIHTPIIIPVWSQVRMVEDDLMYSTFLEVYEINCARHNREADSPITIFKEQLNQAVSGQLSPEAIVELRLQAYNEITKNIVNDNIFSQYMHKILPTGNYLWTFKKQFAIQVALSCFMSYMLQIGGRAPNKILFAKNTGKIFQTDFHPAYDPNGMIEFNELVPFRLTRNLQAFFSNFGVEGLIVSAMCSAAQSVVSPKQSQHIWHHLAMFFRDELLSWSWRRPLGIPSVPVAAGMINPSDFQQKVVNNVEHVISRIKSISPHCLAEEEVFLGGINIVSLWCF

SEQ ID NO: 189541 - protein, 1447 aa, Zea Mays
MRPSENMRSQTSTKSPSNIASKFRHPSDFQDHHHVQIVDPRANVYKFTGSMQNQSSDHNISKRSRSPTLSYEDADGTKAHVNTGGNSRRLVDYSDTINDENVEASKRMRSPASEFTRMVKSPPSDTRGNIRSDASFSKFRNQIQSRIGGACSPSQQMSHLSDSNELNTLAISPPKPSTLSATRRTGISSLDATADDHLTPSTELEREEQAKAKRLARFHVELSRPVENTNDFVKTVKSSADKSKQATSVGRTPLRTNDDTDDNTLVDMDSTALAAIVGLCPDMCPEPERAERERKGDLDRYERLDGDRNLTTELLAVKKIRLHIIAMHELCEYNKGEGFSEGFDAHLNIEQMNKTSVELFQMYDDHRREGVLFSTEKEFRGYYALLKLDKHPGYKVEPAELSLDLAKMSREIRGSPEILFAREVARACRMGNFISFFRLARKATYLQACLMHAHFAKLRRQALASLHSGLQNGQGIPISQVVVWLAMEGEDVENLLEYHGFGLRQYEELYLVKEGPFLNSESDFPSGCSQLVHSKKSQRVVDDVSSGPDCAPTSKEKTVFPYTGQPVAGKRDLFLPQNAPAIPPDGRMDLDPSFPGPISITPDRQISPLFSDPFSPRAASKLFSSTHPKPLSPTEGRKDRFSSVLTAVSPRTGKRDILSKTPKVASPKAEAKTKLVNDLIAEDQDSGVAEIPQKVEMQTDILWSQANTQNANALAEPIISHPLADSMSLNYSSMYGAEDDFRAHVSGIGADMDEGTPPDHECLVIGAGLPISSPLSYHEEYEDHSISNSTNDDWLPIVMPAKKLISDENLKAILRKWRQHAADKRLLREQKNALAVAALCSLSLGPPVHKSTTVSKLAVEELDIGHAFKERQARKQRSWSRLNVSELSGPILNENNPDARCLCWKLLVLVPPGMESQTNSFVSKWLLRKLMGYGIGDIGLVVSSAGLSIWTEWISFPNACCLSVVRASDQQVIDNDIANSTSCIVFVVSESISWEMQKERFNSLLACIPDESNLPLLIFSGDTYNEGYEYASKYIINRLGLNGLNRGKIGSSLVIFLVENYTEDHANGFFDDDKLREGLKWLVSSLPVQPDVTLVKTHELLLEYLNPQLELLNTHVAPGAGPGDCISVFNNAVNQLAEEILAAANANCSQWPAPEIDLLERTSNERIYAEMFLPSIGWSSPSRIQPLLAAINSCKIPEFSYDLSWLNHGSHMGKQIQDQKKLLEECLARYLTESARLLDESQVVTEVNVMVQNCVGLELQDSSYYLAPRWVAIFRRIYNWRLAKLSTGKLSEAYVLTQHLYQAPAAAGSNGTTQGLTANTASSDAVDHIMMPAVSTGITLDEIIEISCDLNVVDAQPVTLPPRLPVHVHEEPQALADTNGVLGVDEMYIPRRVELGEVMPISDDKLSRLRVELGEAMPIKTDDKLSRLLEQCTKLQDRIDETLSIYF

SEQ ID NO: 189542 - protein, 1448 aa, Zea Mays
MRPSENMRSQTSTKSPSNIASKFRHPSDFQDHHHVQIVDPRANVYNRFTGSMQNQSSDHNISKRSRSPTLSYEDADGTKAHVNTGGNSRRLVDYSDTINDENVEASKRMRSPASEFTRMVKSPPSDTRGNIRSDASFSKFRNQIQSRIGGACSPSQQMSHLSDSNELNTLAISPPKPSTLSATRRTGISSLDATADDHLTPSTELEREEQAKAKRLARFHVELSRPVENTNDFVKTVKSSADKSKQATSVGRTPLRTNDDTDDNTLVDMDSTALAAIVGLCPDMCPEPERAERERKGDLDRYERLDGDRNLTTELLAVKKIRLHIIAMHELCEYNKGEGFSEGFDAHLNIEQMNKTSVELFQMYDDHRREGVLFSTEKEFRGYYALLKLDKHPGYKVEPAELSLDLAKMSREIRGSPEILFAREVARACRMGNFISFFRLARKATYLQACLMHAHFAKLRRQALASLHSGLQNGQGIPISQVVVWLAMEGEDVENLLEYHGFGLRQYEELYLVKEGPFLNSESDFPSGCSQLVHSKKSQRVVDDVSSGPDCAPTSKEKTVFPYTGQPVAGKRDLFLPQNAPAIPPDGRMDLDPSFPGPISITPDRQISPLFSDPFSPRAASKLFSSTHPKPLSPTEGRKDRFSSVLTAVSPRTGKRDILSKTPKVASPKAEAKTKLVNDLIAEDQDSGVAEIPQKVEMQTDILWSQANTQNANALAEPIISHPLADSMSLNYSSMYGAEDDFRAHVSGIGADMDEGTPPDHECLVIGAGLPISSPLSYHEEYEDHSISNSTNDDWLPIVMPAKKLISDENLKAILRKWRQHAADKRLLREQKNALAVAALCSLSLGPPVHKSTTVSKLAVEELDIGHAFKERQARKQRSWSRLNVSELSGPILNENNPDARCLCWKLLVLVPPGMESQTNSFVSKWLLRKLMGYGIGDIGLVVSSAGLSIWTEWISFPNACCLSVVRASDQQVIDNDIANSTSCIVFVVSESISWEMQKERFNSLLACIPDESNLPLLIFSGDTYNEGYEYASKYIINRLGLNGLNRGKIGSSLVIFLVENYTEDHANGFFDDDKLREGLKWLVSSLPVQPDVTLVKTHELLLEYLNPQLELLNTHVAPGAGPGDCISVFNNAVNQLAEEILAAANANCSQWPAPEIDLLERTSNERIYAEMFLPSIGWSSPSRIQPLLAAINSCKIPEFSYDLSWLNHGSHMGKQIQDQKKLLEECLARYLTESARLLDESQVVTEVNVMVQNCVGLELQDSSYYLAPRWVAIFRRIYNWRLAKLSTGKLSEAYVLTQHLYQAPAAAGSNGTTQGLTANTASSDAVDHIMMPAVSTGITLDEIIEISCDLNVVDAQPVTLPPRLPVHVHEEPQALADTNGVLGVDEMYIPRRVELGEVMPISDDKLSRLRVELGEAMPIKTDDKLSRLLEQCTKLQDRIDETLSIYF

SEQ ID NO: 189543 - protein, 1444 aa, Zea Mays
MRPSENMRSQTSTKSPSNIASKFRHPSDFQDHHHVQIVDPRANVYKFTGSMQNQSSDHNISKRSRSPTLSYEDADGTKAHVNTGGNSRRLVDYSDTINDENVEASKRMRSPASEFTRMVKSPPSDTRGNIRSDASFSKFRNQIQSRIGGACSPSQQMSHLSDSNELNTLAISPPKPSTLSATRRTGISSLDATADDHLTPSTELEREEQAKAKRLARFHVELSRPVENTNDFVKTVKSSADKSKQATSVGRTPLRTNDDTDDNTLVDMDSTALAAIVGLCPDMCPEPERAERERKGDLDRYERLDGDRNLTTELLAVKKIRLHIIAMHELCEYNKGEGFSEGFDAHLNIEQMNKTSVELFQMYDDHRREGVLFSTEKEFRGYYALLKLDKHPGYKVEPAELSLDLAKMSREIRGSPEILFAREVARMGNFISFFRLARKATYLQACLMHAHFAKLRRQALASLHSGLQNGQGIPISQVVVWLAMEGEDVENLLEYHGFGLRQYEELYLVKEGPFLNSESDFPSGCSQLVHSKKSQRVVDDVSSGPDCAPTSKEKTVFPYTGQPVAGKRDLFLPQNAPAIPPDGRMDLDPSFPGPISITPDRQISPLFSDPFSPRAASKLFSSTHPKPLSPTEGRKDRFSSVLTAVSPRTGKRDILSKTPKVASPKAEAKTKLVNDLIAEDQDSGVAEIPQKVEMQTDILWSQANTQNANALAEPIISHPLADSMSLNYSSMYGAEDDFRAHVSGIGADMDEGTPPDHECLVIGAGLPISSPLSYHEEYEDHSISNSTNDDWLPIVMPAKKLISDENLKAILRKWRQHAADKRLLREQKNALAVAALCSLSLGPPVHKSTTVSKLAVEELDIGHAFKERQARKQRSWSRLNVSELSGPILNENNPDARCLCWKLLVLVPPGMESQTNSFVSKWLLRKLMGYGIGDIGLVVSSAGLSIWTEWISFPNACCLSVVRASDQQVIDNDIANSTSCIVFVVSESISWEMQKERFNSLLACIPDESNLPLLIFSGDTYNEGYEYASKYIINRLGLNGLNRGKIGSSLVIFLVENYTEDHANGFFDDDKLREGLKWLVSSLPVQPDVTLVKTHELLLEYLNPQLELLNTHVAPGAGPGDCISVFNNAVNQLAEEILAAANANCSQWPAPEIDLLERTSNERIYAEMFLPSIGWSSPSRIQPLLAAINSCKIPEFSYDLSWLNHGSHMGKQIQDQKKLLEECLARYLTESARLLDESQVVTEVNVMVQNCVGLELQDSSYYLAPRWVAIFRRIYNWRLAKLSTGKLSEAYVLTQHLYQAPAAAGSNGTTQGLTANTASSDAVDHIMMPAVSTGITLDEIIEISCDLNVVDAQPVTLPPRLPVHVHEEPQALADTNGVLGVDEMYIPRRVELGEVMPISDDKLSRLRVELGEAMPIKTDDKLSRLLEQCTKLQDRIDETLSIYF

SEQ ID NO: 189544 - protein, 1133 aa, Zea Mays
MLEQMIRLHIIAMHELCEYNKGEGFSEGFDAHLNIEQMNKTSVELFQMYDDHRREGVLFSTEKEFRGYYALLKLDKHPGYKVEPAELSLDLAKMSREIRGSPEILFAREVARACRMGNFISFFRLARKATYLQACLMHAHFAKLRRQALASLHSGLQNGQGIPISQVVVWLAMEGEDVENLLEYHGFGLRQYEELYLVKEGPFLNSESDFPSGCSQLVHSKKSQRVVDDVSSGPDCAPTSKEKTVFPYTGQPVAGKRDLFLPQNAPAIPPDGRMDLDPSFPGPISITPDRQISPLFSDPFSPRAASKLFSSTHPKPLSPTEGRKDRFSSVLTAVSPRTGKRDILSKTPKVASPKAEAKTKLVNDLIAEDQDSGVAEIPQKVEMQTDILWSQANTQNANALAEPIISHPLADSMSLNYSSMYGAEDDFRAHVSGIGADMDEGTPPDHECLVIGAGLPISSPLSYHEEYEDHSISNSTNDDWLPIVMPAKKLISDENLKAILRKWRQHAADKRLLREQKNALAVAALCSLSLGPPVHKSTTVSKLAVEELDIGHAFKERQARKQRSWSRLNVSELSGPILNENNPDARCLCWKLLVLVPPGMESQTNSFVSKWLLRKLMGYGIGDIGLVVSSAGLSIWTEWISFPNACCLSVVRASDQQVIDNDIANSTSCIVFVVSESISWEMQKERFNSLLACIPDESNLPLLIFSGDTYNEGYEYASKYIINRLGLNGLNRGKIGSSLVIFLVENYTEDHANGFFDDDKLREGLKWLVSSLPVQPDVTLVKTHELLLEYLNPQLELLNTHVAPGAGPGDCISVFNNAVNQLAEEILAAANANCSQWPAPEIDLLERTSNERIYAEMFLPSIGWSSPSRIQPLLAAINSCKIPEFSYDLSWLNHGSHMGKQIQDQKKLLEECLARYLTESARLLDESQVVTEVNVMVQNCVGLELQDSSYYLAPRWVAIFRRIYNWRLAKLSTGKLSEAYVLTQHLYQAPAAAGSNGTTQGLTANTASSDAVDHIMMPAVSTGITLDEIIEISCDLNVVDAQPVTLPPRLPVHVHEEPQALADTNGVLGVDEMYIPRRVELGEVMPISDDKLSRLRVELGEAMPIKTDDKLSRLLEQCTKLQDRIDETLSIYF

SEQ ID NO: 189545 - protein, 85 aa, Zea Mays
MTGAAARSYKVNHDSEMTLGLTCSPHALEDAEKNILTFRHTLAGEVEPNQEQVLQIALEICKEGVISFFVQNLPSLGWEIYIGVK

SEQ ID NO: 189546 - protein, 156 aa, Zea Mays
MTGAAARSYKVNHDSEMTLGLTCSPHALEDAEKNILTFRHTLAGEVEPNQEQVLQIALEICKEGVISFFVQNLPSLGWEVCFFLLLKFRRTAYHCINRRKKGLGGMYIHKLSVTTFFTVLLALLVPQRISSVSCLHENSYIQRWLAKPITTLLFLY

SEQ ID NO: 189547 - protein, 64 aa, Zea Mays
MCCPVWSLFFIYGKGLATNCILRVKHLAFVSEFIDLCTCSRIRCRNKLHCGLVLVPSRKLGEGV

SEQ ID NO: 189548 - protein, 147 aa, Zea Mays
MTGAAARRHTLAGEVEPNQEQVLQIALEICKEGVISFFVQNLPSLGWEDLLTKHEDQVSEFLSSNYEQGTKMRCFKALRCMPVSFRVSVRGPKCSIVKSFIFEVRYLNIMVGLLKDSTKNIRICSLHILKVFVANPNKPREIISGFG

SEQ ID NO: 189549 - protein, 81 aa, Zea Mays
MNRYLLPIQTNLERLSQVLADNHRELLKLLHNLPTSKGITTVLPNSNLTLTLFCVQAIDASNRVTEYDDWNSMLRFLSDVH

SEQ ID NO: 189550 - protein, 98 aa, Zea Mays
MTGAAARSYKVNHDSEMTLGLTCSPHALEDAEKNILTFRHTLAGEVEPNQEQVLQIALEICKEGVISFFVQNLPSLGWEGFEPAMLRQRRRSYVAPVY

SEQ ID NO: 189551 - protein, 116 aa, Zea Mays
MTGAAARSYKVNHDSEMTLGLTCSPHALEDAEKNILTFRHTLAGEVEPNQEQVLQIALEICKEGVISFFVQNLPSLGWEDLLTKHEDQVSEFLSSNYEQVFVANPNKPREIISGFG

SEQ ID NO: 189552 - protein, 179 aa, Zea Mays
MLDRCQQQQHQRCLLEPGRWFTLSGWRRTKEDIILEMKNAYAVSRLRKKTGYTKNQFYDQALKIYKEVNTLMAHGDTSSLRKILTERMHSTIKNELKRRQSMWNSVHWELVEPAVSIRTLRARMIGLDKNDLDKAFIQLTLEFVTKQKFEAYNSKGAVVSGDKSKEGALGPLATVAVTG

SEQ ID NO: 189553 - protein, 158 aa, Zea Mays
MKNAYAVSRLRKKTGYTKNQFYDQALKIYKEVNTLMAHGDTSSLRKILTERMHSTIKNELKRRQSMWNSVHWELVEPAVSIRTLRARMIGLDKNDLDKAFIQLTLEFVTKQKFEAYNSKGAVVSGDKSKEVLVKDIWVFERSLFHPGAYWRVCGRITL

SEQ ID NO: 189554 - protein, 689 aa, Zea Mays
MPPRALPTTSTPASRRVVYVLLAALATAPFLLLLLYGGASPSALCPTSYRTPRRLPYPSVLWSKVPPLPALSTSPHPDLRGSRWIVFTASPHAPRHRPLRAVPGWQVLAVADEATPADWSHPGAVLLTLTDQGRLGFRSVAFLPARGPARKAAAYLFAVQRGARVIYDADARNAVLGGNLTRHFDVDLDQRHGGAVLLQYSHANPNRTIVNPFVHFGQPSIWPRGLPLEKAGELDAEEFYTEIFSGGQFMQQGMCNGLPDVDSVFYFTRKSLEMEAFDFQFDADAPKVALPQGMMTPVNSVNTLFHSPAFWGLALPVSVSPMASDVIRGYWAQRILWEIGGYLVVYPPTVHRIDNVRGHPFDEEKDLHVNVGKLIKFLMEWRSSKLTLFERILDLSYAMTEEGFWSEKDLHFMTAWLQDLVAIGYRQPRLMSLEIDRPRATIGHGDKKGFGPKKLPSVHLGVEEIGEVSTDIGNLIKWRKHFGDIVLIVHCTELVDRTALEWRLLYGRIFRAVVVLSEQSNSDLAVEFSNLTQAYKYLPKVFDRFGGAQGFLFLQDRMVFNYWNLLNADKAKLWITNQVKESWSDVPLHGNNIEWFVNQGDMIKKAVSNFPSQYQDNYRRSVGENNLIRCSSEIFYVPQRADLPSDTTLSTIYTTEAHAVYPVKVQNEMDFVKLIRAMALGDPFLMELV

SEQ ID NO: 189555 - protein, 734 aa, Zea Mays
MPPRALPTTSTPASRRVVYVLLAALATAPFLLLLLYGGASPSALCPTSYRTPRRLPYPSVLWSKVPPLPALSTSPHPDLRGSRWIVFTASPHAPRHRPLRAVPGWQVLAVADEATPADWSHPGAVLLTLTDQGRLGFRSVAFLPARGPARKAAAYLFAVQRGARVIYDADARNAVLGGNLTRHFDVDLDQRHGGAVLLQYSHANPNRTIVNPFVHFGQPSIWPRGLPLEKAGELDAEEFYTEIFSGGQFMQQGMCNGLPDVDSVFYFTRKSLEMEAFDFQFDADAPKVALPQGMMTPVNSVNTLFHSPAFWGLALPVSVSPMASDVIRGYWAQRILWEIGGYLVVYPPTVHRIDNVRGHPFDEEKDLHVNVGKLIKFLMEWRSSKLTLFERILDLSYAMTEEGFWSEKDLHFMTAWLQDLVAIGYRQPRLMSLEIDRPRATIGHGDKKGFGPKKLPSVHLGVEEIGEVSTDIGNLIKWRKHFGDIVLIVHCTELVDRTALEWRLLYGRIFRAVVVLSEQSNSDLAVEFSNLTQAYKYLPKVFDRFGGAQGFLFLQDRMVFNYWNLLNADKAKLWITNQESWSDVPLHGNNIEWFVNQGDMIKKAVSNFPSQYQDNYRRSVGENNLIRCSSEIFYVPQRYTRDFSDLVKVIGSLDIHHSFAVPMLFLAIDSPSNFESKALTKLVYRADLPSDTTLSTIYTTEAHAVYPVKVQNEMDFVKLIRAMALGDPFLMELV

SEQ ID NO: 189556 - protein, 637 aa, Zea Mays
MPPRALPTTSTPASRRVVYVLLAALATAPFLLLLLYGGASPSALCPTSYRTPRRLPYPSVLWSKVPPLPALSTSPHPDLRGSRWIVFTASPHAPRHRPLRAVPGWQVLAVADEATPADWSHPGAVLLTLTDQGRLGFRSVAFLPARGPARKAAAYLFAVQRGARVIYDADARNAVLGGNLTRHFDVDLDQRHGGAVLLQYSHANPNRTIVNPFVHFGQPSIWPRGLPLEKAGELDAEEFYTEIFSGGQFMQQGMCNGLPDVDSVFYFTRKSLEMEAFDFQFDADAPKVALPQGMMTPVNSVNTLFHSPAFWGLALPVSVSPMASDVIRGYWAQRILWEIGGYLVVYPPTVHRIDNVRGHPFDEEKDLHVNVGKLIKFLMEWRSSKLTLFERILDLSYAMTEEGFWSEKDLHFMTAWLQDLVAIGYRQPRLMSLEIDRPRATIGHGDKKGFGPKKLPSVHLGVEEIGEVSTDIGNLIKWRKHFGDIVLIVHCTELVDRTALEWRLLYGRIFRAVVVLSEQSNSDLAVEFSNLTQAYKYLPKVFDRFGGAQGFLFLQDRMVFNYWNLLNADKAKLWITNQVKESWSDVPLHGNNIEWFVNQGDMIKKAVSNFPSQYQDNYRRSFCSPHVIPCDRFTEQL

SEQ ID NO: 189557 - protein, 83 aa, Zea Mays
MPHLNQSACDWKVVLYILPRPVFTGKITRRVLDPVPLTERGRLPDGFVPEDPDSHYVYVCKKMQGLTGTGSPTVNHIERQGEE

SEQ ID NO: 189558 - protein, 73 aa, Zea Mays
MLMAVSGAASQTQLSALAFCALVVVAAVSLSARSAVRRPRSNWKLSGGYAVRAGRRRHISFRGTTRRLEAWSV

SEQ ID NO: 189559 - protein, 1128 aa, Zea Mays
MACIKSAQRAALTALAPDAPYLAAGTMTGAVDLSFSASANIEIFRLDFQSDSPDLPLLAAAPSPDRFNRLSWSRPGAVEGDSFSLGLLAGGLSDGSVAVWNPLSLISSEGKAEDAMVARLEKHTGPVCGLEFSELTPNRLASGAEQGELCIWDLKNPVEPIVYPPLKSVGSHAQAEISCLSWNPKFQHIVASTSSNGMTVVWDLRNQKPLTSFSDSNRRKCSVLQWNPDMSTQLIVASDDDSSPSLRVWDVRKTISPVREFVGHSKGVIAMSWCPYDSSFLLTCSKDNRTICWDTVSGEIISELPASANWNFDLHWYRKIPGVIAASSFDGKIGIYNLEFSGIYAAGDAVGAPARQRAPVPKWLKCSTGASFGFGGKLVSFHPVAPTQGAQASTSEVHVHNLVIEQSLVSRSAEFEDAILNGDKSSLRALCEKKSQESLSDEERETWGFLMIMFEDGDFVRTKLLAHLGFEPPQAPPASSPDELSQTLADTLNLDHATITDYADAQFLTDNGDDFFNNPQPSEASLAEDLVSTNGQQTEQEMSGDVVPSDPSIDKSIQHALVVGDYKGAVNQCLSANRIADALVIAHAGGSALWESTRNHYLKNSISPYLKVVSAMVGNDLMSFVSTWPLSSWKETLALLCTFAQKEEWHVLCDTLASRLLNIGDTLAATLCYICAGNIDKAVEIWSRTLKSEDGGKIYVDLLQDLMEKTITLALATGHKRFSSSLSKLVENYAELLASQGLLKTAMEYLKLLGSDEHSNELAILRDRIACSMEENDNARSYVSESTATPSLYGTNQSYTAPDHSQNVYQQVPQPYNVPSNTYSEAYPQQPTGAYGYNNTYQPQQPTHMFVPPSAPASSQPGPSPVPVPQQTVKAFTPANPAGLKNPGQYQQPNTLGSQLYTGTANQQYPSGPSASYPSGPPTTFHQPVSPVQYQPVAPPVSSFGPSAPVPATVPNQMFPHSAAANSTSRFMPSNNQSFAPRPGLSPAQPSSPTQVQAQPAPPAPPPTVQTADTTKVSAELRPVIGTLTRLFDETSKALGGSQATQAKKREIEDNSRKIGALFSKLNSDDISPNVASKLRQLCSAIDASDFATAMHLQVLLTTSDWDECNFWLAALKRMIKTRQNFRM

SEQ ID NO: 189560 - protein, 673 aa, Zea Mays
MIMFEDGDFVRTKLLAHLGFEPPQAPPASSPDELSQTLADTLNLDHATITDYADAQFLTDNGDDFFNNPQPSEASLAEDLVSTNGQQTEQEMSGDVVPSDPSIDKSIQHALVVGDYKGAVNQCLSANRIADALVIAHAGGSALWESTRNHYLKNSISPYLKVVSAMVGNDLMSFVSTWPLSSWKETLALLCTKEEWHVLCDTLASRLLNIGDTLAATLCYICAGNIDKAVEIWSRTLKSEDGGKIYVDLLQDLMEKTITLALATGHKRFSSSLSKLVENYAELLASQGLLKTAMEYLKLLGSDEHSNELAILRDRIACSMEENDNARSYVSESTATPSLYGTNQSYTAPDHSQNVYQPYNVPSNTYSEAYPQQPTGAYGYNNTYQPQQPTHMFVPPSAPASSQQQPGPSPVPVPQQTVKAFTPANPAGLKNPGQYQQPNTLGSQLYTGTANQQYPSGPSASYPSGPPTTFHQPVSPVQYQPVAPPVSSFGPSAPVPATVPNQMFPHSAAANSTSRFMPSNNQSFAPRPGLSPAQPSSPTQVQAQPAPPAPPPTVQTADTTKVSAELRPVIGTLTRLFDETSKALGGSQATQAKKREIEDNSRKIGALFSKLNSDDISPNVASKLRQLCSAIDASDFATAMHLQVLLTTSDWDECNFWLAALKRMIKTRQNFRM

SEQ ID NO: 189561 - protein, 282 aa, Zea Mays
MFVPPSAPASSQQQPGPSPVPVPQQTVKAFTPANPAGLKNPGQYQQPNTLGSQLYTGTANQQYPSGPSASYPSGPPTTFHQPVSPVQYQPVAPPVSSFGPSAPVPATVPNQMFPHSAAANSTSRFMPSNNQSFAPRPGLSPAQPSSPTQVQAQPAPPAPPPTVQTADTTKVSAELRPVIGTLTRLFDETSKALGGSQATQAKKREIEDNSRKIGALFSKLNSDDISPNVASKLRQLCSAIDASDFATAMHLQVLLTTSDWDECNFWLAALKRMIKTRQNFRM

SEQ ID NO: 189562 - protein, 171 aa, Zea Mays
MFPHSAAANSTSRFMPSNNQSFAPRPGLSPAQPSSPTQVQAQPAPPAPPPTVQTADTTKVSAELRPVIGTLTRLFDETSKALGGSQATQAKKREIEDNSRKIGALFSKLNSDDISPNVASKLRQLCSAIDASDFATAMHLQVLLTTSDWDECNFWLAALKRMIKTRQNFRM

SEQ ID NO: 189563 - protein, 63 aa, Zea Mays
MLYAVARTQAAAVLAVADAQRMAWHAHEGHMQQLASLEETATVLLESPPGSILASQPSDEYLV

SEQ ID NO: 189564 - protein, 116 aa, Zea Mays
MICSLCKHTVECGFGIFIQAYNAPKGCSSANTVSLNCLKSIFLNIRMCGNRTEYCQSCRKYIRLREWIGHELQFHTILNAASQLSDRTPPVEQSVPKPARPASAAVPVVHFTNNCS

SEQ ID NO: 189565 - protein, 260 aa, Zea Mays
MQDRVLNNPNITVHFNTEAMDVVSNDKGQMSGVHLKRRDTGEESVLTVKGLFYGIGHTPNSQLLQGQIELDSAGYILVKEGSAKTSVDGVFAAGDVQDHEWRQAITAAGSGCIAALSVERYLVANDLLVEFHQPVQEETKKDITDKDVQMGFDISHRKHKGQYALRKLYHESPRLICVLYTSPTCGPCRTLKPILSKVIDEYGEFVHLVEIDIEEDPEIAEAAGIMGTPCVQFFKNKEMLRTVSGVKRKKEYREFIEANK

SEQ ID NO: 189566 - protein, 179 aa, Zea Mays
MAAADSDPAISISTCPHCQREIPSSNIALHSAHYARNLQKCEHCGNIVPRKLVDQHYDENHAPMICSLCKHTVECGFGIFIQAYNAPKGCSSANTVSLNCLKSIFLNIRMCGNRTEYCQSCRKYIRLREWIGHELQFHTILNAASQLSDRTPPVEQSVPKPARPASAAVPVVHFTNNCS

SEQ ID NO: 189567 - protein, 643 aa, Zea Mays
MKVEGILRQAADVEEVDRRLQEYEQGRTEFAPEEDAHVVGDCVKHVLRELPSSPVPASCCTALLEAFRLETKESQIKSMRAAISETFPEPNRRLLQRLLKMMHTIASHTAENRMTPSAVAACMAPLLLRPLLAGECEMEDDLDMNGDSAAQLIAAANAANSAQGIVTTLLEEYKSIFNDEHFRCSLSPDSQTGDSGSEESTDDETVDTKGNGFHDAENDVDQELDDAERMLSGKFTETSASACADLYDHKEVNGNSSDTELFVEDHTFESNVDLNDAPLSRLTENGKGPSNLMSAHETPLSVGEILLSLDAGIPLPCRAAEYSSKPNGTQQHVKRTNLWGWSNVRKGQRSELVDPSGEEELAIQRLEVMKNDLQIRIAKEARGNAILQASLERRKQALHERRVALEQDVSRLQEQLQAERDLRAALEVGLSMSSSQFSSSLSMDSKTKSELEEIALAEADVARLKQKVAELHFQLNQQRQHQYGSSVDANDHPQHLLNHLSQNIVQTGFDRSVAFCNQEKQRNEESLPSTSHWRSIKQHVLSHGSSRPFSRKHSSDTSLSDSTSVPAEGGPMLVNIPRTTKGVEYGRPPSVSSSTLVELTTRLDFFKERRSQLMEQLHSLDLGHGSTSHGFPYKPSSPWNSPK

SEQ ID NO: 189568 - protein, 626 aa, Zea Mays
MRTIRGGRDGMAASAAPGSAGRQARGVAAAATGNAVFKSGPLFISSKGIGWKTWKKRWFILTRTSLVFFKSDPSTLPQRSEVNLTLGGIDLNNSGSVVVREDKRLLTVLFPDGRDGRAFTLKAESSEDLFEWKTALEEALAQAPNAALVMGHNGIFRNDTTDVYEGAIPNWGKKRPIKSIVVGRPILLALEDIDGSPSFLEKALCFLEKHGMKVEGILRQAADVEEVDRRLQEYEQGRTEFAPEEDAHVVGDCVKHVLRELPSSPVPASCCTALLEAFRLETKESQIKSMRAAISETFPEPNRRLLQRLLKMMHTIASHTAENRMTPSAVAACMAPLLLRPLLAGECEMEDDLDMNGDSAAQLIAAANAANSAQGIVTTLLEEYKSIFNDEHFRCSLSPDSQTGDSGSEESTDDETVDTKGNGFHDAENDVDQELDDAERMLSGKFTETSASACADLYDHKEVNGNSSDTELFVEDHTFESNVDLNDAPLSRLTENGKGPSNLMSAHETPLSVGEILLSLDAGIPLPCRAAEYSSKPNGTQQHVKRTNLWGWSNVRKGQRSELVDPSGEEELAIQRLEVMKNDLQIRIAKEARGNAILQASLERRKQALHERRVALEQDVARAATG

SEQ ID NO: 189569 - protein, 706 aa, Zea Mays
MGHNGIFRNDTTDVYEGAIPNWGKKRPIKSIVVGRPILLALEDIDGSPSFLEKALCFLEKHGMKVEGILRQAADVEEVDRRLQEYEQGRTEFAPEEDAHVVGDCVKHVLRELPSSPVPASCCTALLEAFRLETKESQIKSMRAAISETFPEPNRRLLQRLLKMMHTIASHTAENRMTPSAVAACMAPLLLRPLLAGECEMEDDLDMNGDSAAQLIAAANAANSAQGIVTTLLEEYKSIFNDEHFRCSLSPDSQTGDSGSEESTDDETVDTKGNGFHDAENDVDQELDDAERMLSGKFTETSASACADLYDHKEVNGNSSDTELFVEDHTFESNVDLNDAPLSRLTENGKGPSNLMSAHETPLSVGEILLSLDAGIPLPCRAAEYSSKPNGTQQHVKRTNLWGWSNVRKGQRSELVDPSGEEELAIQRLEVMKNDLQIRIAKEARGNAILQASLERRKQALHERRVALEQDVSRLQEQLQAERDLRAALEVGLSMSSSQFSSSLSMDSKTKSELEEIALAEADVARLKQKVAELHFQLNQQRQHQYGSSVDANDHPQHLLNHLSQNIVQTGFDRSVAFCNQEKQRNEESLPSTSHWRSIKQHVLSHGSSRPFSRKHSSDTSLSDSTSVPAEGGPMLVNIPRTTKQGVEYGRPPSVSSSTLVELTTRLDFFKERRSQLMEQLHSLDLGHGSTSHGFPYKPSSPWNSPK

SEQ ID NO: 189570 - protein, 705 aa, Zea Mays
MGHNGIFRNDTTDVYEGAIPNWGKKRPIKSIVVGRPILLALEDIDGSPSFLEKALCFLEKHGMKVEGILRQAADVEEVDRRLQEYEQGRTEFAPEEDAHVVGDCVKHVLRELPSSPVPASCCTALLEAFRLETKESQIKSMRAAISETFPEPNRRLLQRLLKMMHTIASHTAENRMTPSAVAACMAPLLLRPLLAGECEMEDDLDMNGDSAAQLIAAANAANSAQGIVTTLLEEYKSIFNDEHFRCSLSPDSQTGDSGSEESTDDETVDTKGNGFHDAENDVDQELDDAERMLSGKFTETSASACADLYDHKEVNGNSSDTELFVEDHTFESNVDLNDAPLSRLTENGKGPSNLMSAHETPLSVGEILLSLDAGIPLPCRAAEYSSKPNGTQQHVKRTNLWGWSNVRKGQRSELVDPSGEEELAIQRLEVMKNDLQIRIAKEARGNAILQASLERRKQALHERRVALEQDVSRLQEQLQAERDLRAALEVGLSMSSSQFSSSLSMDSKTKSELEEIALAEADVARLKQKVAELHFQLNQQRQHQYGSSVDANDHPQHLLNHLSQNIVQTGFDRSVAFCNQEKQRNEESLPSTSHWRSIKQHVLSHGSSRPFSRKHSSDTSLSDSTSVPAEGGPMLVNIPRTTKGVEYGRPPSVSSSTLVELTTRLDFFKERRSQLMEQLHSLDLGHGSTSHGFPYKPSSPWNSPK

SEQ ID NO: 189571 - protein, 798 aa, Zea Mays
MRTIRGGRDGMAASAAPGSAGRQARGVAAAATGNAVFKSGPLFISSKGIGWKTWKKRWFILTRTSLVFFKSDPSTLPQRSEVNLTLGGIDLNNSGSVVVREDKRLLTVLFPDGRDGRAFTLKAESSEDLFEWKTALEEALAQAPNAALVMGHNGIFRNDTTDVYEGAIPNWGKKRPIKSIVVGRPILLALEDIDGSPSFLEKALCFLEKHGMKVEGILRQAADVEEVDRRLQEYEQGRTEFAPEEDAHVVGDCVKHVLRELPSSPVPASCCTALLEAFRLETKESQIKSMRAAISETFPEPNRRLLQRLLKMMHTIASHTAENRMTPSAVAACMAPLLLRPLLAGECEMEDDLDMNGDSAAQLIAAANAANSAQGIVTTLLEEYKSIFNDEHFRCSLSPDSQTGDSGSEESTDDETVDTKGNGFHDAENDVDQELDDAERMLSGKFTETSASACADLYDHKEVNGNSSDTELFVEDHTFESNVDLNDAPLSRLTENGKGPSNLMSAHETPLSVGEILLSLDAGIPLPCRAAEYSSKPNGTQQHVKRTNLWGWSNVRKGQRSELVDPSGEEELAIQRLEVMKNDLQIRIAKEARGNAILQASLERRKQALHERRVALEQDVSRLQEQLQAERDLRAALEVGLSMSSSQFSSSLSMDSKTKSELEEIALAEADVARLKQKVAELHFQLNQQRQHQYGSSVDANDHPQHLLNHLSQNIVQTGFDRSVAFCNQEKQRNEQGVEYGRPPSVSSSTLVELTTRLDFFKERRSQLMEQLHSLDLGHGSTSHGFPYKPSSPWNSPK

SEQ ID NO: 189572 - protein, 644 aa, Zea Mays
MKVEGILRQAADVEEVDRRLQEYEQGRTEFAPEEDAHVVGDCVKHVLRELPSSPVPASCCTALLEAFRLETKESQIKSMRAAISETFPEPNRRLLQRLLKMMHTIASHTAENRMTPSAVAACMAPLLLRPLLAGECEMEDDLDMNGDSAAQLIAAANAANSAQGIVTTLLEEYKSIFNDEHFRCSLSPDSQTGDSGSEESTDDETVDTKGNGFHDAENDVDQELDDAERMLSGKFTETSASACADLYDHKEVNGNSSDTELFVEDHTFESNVDLNDAPLSRLTENGKGPSNLMSAHETPLSVGEILLSLDAGIPLPCRAAEYSSKPNGTQQHVKRTNLWGWSNVRKGQRSELVDPSGEEELAIQRLEVMKNDLQIRIAKEARGNAILQASLERRKQALHERRVALEQDVSRLQEQLQAERDLRAALEVGLSMSSSQFSSSLSMDSKTKSELEEIALAEADVARLKQKVAELHFQLNQQRQHQYGSSVDANDHPQHLLNHLSQNIVQTGFDRSVAFCNQEKQRNEESLPSTSHWRSIKQHVLSHGSSRPFSRKHSSDTSLSDSTSVPAEGGPMLVNIPRTTKQGVEYGRPPSVSSSTLVELTTRLDFFKERRSQLMEQLHSLDLGHGSTSHGFPYKPSSPWNSPK

SEQ ID NO: 189573 - protein, 631 aa, Zea Mays
MYLPPKQFDTLEQAKQAESSEDLFEWKTALEEALAQAPNAALVMGHNGIFRNDTTDVYEGAIPNWGKKRPIKSIVVGRPILLALEDIDGSPSFLEKALCFLEKHGMKVEGILRQAADVEEVDRRLQEYEQGRTEFAPEEDAHVVGDCVKHVLRELPSSPVPASCCTALLEAFRLETKESQIKSMRAAISETFPEPNRRLLQRLLKMMHTIASHTAENRMTPSAVAACMAPLLLRPLLAGECEMEDDLDMNGDSAAQLIAAANAANSAQGIVTTLLEEYKSIFNDEHFRCSLSPDSQTGDSGSEESTDDETVDTKGNGFHDAENDVDQELDDAERMLSGKFTETSASACADLYDHKEVNGNSSDTELFVEDHTFESNVDLNDAPLSRLTENGKGPSNLMSAHETPLSVGEILLSLDAGIPLPCRAAEYSSKPNGTQQHVKRTNLWGWSNVRKGQRSELVDPSGEEELAIQRLEVMKNDLQIRIAKEARGNAILQASLERRKQALHERRVALEQDVSRLQEQLQAERDLRAALEVGLSMSSSQFSSSLSMDSKTKSELEEIALAEADVARLKQKVAELHFQLNQQRQHQYGSSVDANDHPQHLLNHLSQNIVQTGFDRSVAFCNQEKQRNEFS

SEQ ID NO: 189574 - protein, 460 aa, Zea Mays
MLQAAWPAAEMRRVGTGVRMLCGAALSVLLLLAGGAAASHSRSSCPATPPDAGNTLQVSHAFGPCSPLGPGTAAPSWAGFLADQASRDASRLLYLDSLAVRGRARAYAPIASGRQLLQTPTYVVRASLGTPPQQLLLAVDTSNDASWIPCAGCAGCPTSSAAPFDPASSASYRTVPCGSPLCAQAPNAACPPGGKACGFSLTYADSSLQAALSQDSLAVAGNAVKAYTFGCLQRATGTAAPPQGLLGLGRGPLSFLSQTKDMYEATFSYCLPSFKSLNFSGTLRLGRNGQPQRIKTTPLLANPHRSSLYYVNMTGIRVGRKVVPIPAFDPATGAGTVLDSGTMFTRLVAPAYVAVRDEVRRRVGAPVSSLGGFDTCFNTTAVAWPPVTLLFDGMQVTLPEENVVIHSTYGTISCLAMAAAPDGVNTVLNVIASMQQQNHRVLFDVPNGRVGFARERCTAA

SEQ ID NO: 189575 - protein, 413 aa, Zea Mays
MRRVGTGVRMLCGAALSVLLLLAGGAAASHSRSSCPATPPDAGNTLQVSHAFGPCSPLGPGTAAPSWAGFLADQASRDASRLLYLDSLAVRGRARAYAPIASGRQLLQTPTYVVRASLGTPPQQLLLAVDTSNDASWIPCAGCAGCPTSSAAPFDPASSASYRTVPCGSPLCAQAPNAACPPGGKACGFSLTYADSSLQAALSQDSLAVAGNAVKAYTFGCLQRATGTAAPPQGLLGLGRGPLSFLSQTKDMYEATFSYCLPSFKSLNFSGTLRLGRNGQPQRIKTTPLLANPHRSSLYYVNMTGIRVGRKVVPIPAFDPATGAGTVLDSGTMFTRLVAPAYVAVRDEVTLPEENVVIHSTYGTISCLAMAAAPDGVNTVLNVIASMQQQNHRVLFDVPNGRVGFARERCTAA

SEQ ID NO: 189576 - protein, 136 aa, Zea Mays
MAKRRRHELAPVVEELISPMNSLDDGCLMHIFSFLSPIPDRYNTALVCHRWRFLACHPRLWLRVERPIRDAMEPGVYPDLEAAVSAARPGDTILIAAGGSHVACNIQIKKPICIIGGGDLPDDTVLTCSRGFDNLT

SEQ ID NO: 189577 - protein, 259 aa, Zea Mays
MYPPIHQCSNGHTLCSGCKPRVHNRCPTCRHELGNIRCLALEKVAASLELPCKYQNFGCLGIYPYYCKLKHESQCQYRPYTCPYAGSECTVAGDIPYLVNHLKDDHKVDMHNGSTFNHRYVKSNPHEVENATWMLTVFSCFGQYFCLHFEAFQLGMAPVYIAFLRFMGDDAEAKNYSYSLEVGGSGRKMTWQGVPRSIRDSHRKVRDSYDGLIIQRNMALFFSGGDRKELKLRVTGRIWKEQQQLDACGVACVPSPVLP

SEQ ID NO: 189578 - protein, 319 aa, Zea Mays
MASVTYIDDSHAEVIDPPKNEEMLDATELVGDHIQNSPKPNVASYGNVRELLECPVCLSAMYPPIHQCSNGHTLCSGCKPRVHNRCPTCRHELGNIRCLALEKVAASLELPCKYQNFGCLGIYPYYCKLKHESQCQYRPYTCPYAGSECTVAGDIPYLVNHLKDDHKVDMHNGSTFNHRYVKSNPHEVENATWMLTVFSCFGQYFCLHFEAFQLGMAPVYIAFLRFMGDDAEAKNYSYSLEVGGSGRKMTWQGVPRSIRDSHRKVRDSYDGLIIQRNMALFFSGGDRKELKLRVTGRIWKEQQQLDACGVACVPSPVLP

SEQ ID NO: 189579 - protein, 104 aa, Zea Mays
MAPVYIAFLRFMGDDAEAKNYSYSLEVGGSGRKMTWQGVPRSIRDSHRKVRDSYDGLIIQRNMALFFSGGDRKELKLRVTGRIWKEQQQLDACGVACVPSPVLP

SEQ ID NO: 189580 - protein, 67 aa, Zea Mays
MRFIFMDFLQCKKSREKKILSFLSPNGYVNHFPCYMLSSTLASISRIKCHLSKPPSSLNIATQHRHQ

SEQ ID NO: 189581 - protein, 545 aa, Zea Mays
MCVILTRYCVPTTISERPRQRTSVPRAAATAIYPGSLLLSTQPRRPPSTGRHLSWTPALHATPGSPASAPHPPRQLSLRPVAPHDSPGPVVRTGTGCTVVGAEPEQPRRHIYSGLRTSLGLNPSGVWILPFHTISASPLPARWPWSGGKRGDYKELFVMALPKDGCLDGAKITEVGGVGYKELLVMALPKDDSIDGAKVAEAIGVKLPDVGGAIRTILNSREAREFASGALAGAMSKAILAPLETIRYCAYRILSLVVGLTGGINGRTRMIVGVGPRHIFGSLVDIIQQNGWQGLWAGNTINMLRIIPTQAVELGTFECVKRSMAEAQEKWKEDGCPKIQLGNMKIELPLHLLSPVAIAGAAAGIAATLACHPLEVIKDRLTINREVYPSIGLAFRRIYKTDGIGGFYAGLCPTLIGMIPYTTCYFFMYDTIKTSYCRLHKKSSLSRPELLLIGALSGLTASTISFPLEVARKRLMAGALQGKCPPNMIAALSEVIQEEGVMGLYRGWGASCLKVMPNSGITWVLYEAWKDVLLADRNKPRSLAN

SEQ ID NO: 189582 - protein, 318 aa, Zea Mays
MPKNLQLQTILNSREAREFASGALAGAMSKAILAPLETIRTRMIVGVGPRHIFGSLVDIIQQNGWQGLWAGNTINMLRIIPTQAVELGTFECVKRSMAEAQEKWKEDGCPKIQLGNMKIELPLHLLSPVAIAGAAAGIAATLACHPLEVIKDRLTINREVYPSIGLAFRRIYKTDGIGGFYAGLCPTLIGMIPYTTCYFFMYDTIKTSYCRLHKKSSLSRPELLLIGALSGLTASTISFPLEVARKRLMAGALQGKCPPNMIAALSEVIQEEGVMGLYRGWGASCLKVMPNSGITWVLYEAWKDVLLADRNKPRSLAN

SEQ ID NO: 189583 - protein, 242 aa, Zea Mays
MCVILTRYCVPTTISERPRQRTSVPRAAATAIYPGSLLLSTQPRRPPSTGRHLSWTPALHATPGSPASAPHPPRQLSLRPVAPHDSPGPVVRTGTGCTVVGAEPEQPRRHIYSGLRTSLGLNPSGVWILPFHTISASPLPARWPWSGGKRGDYKELFVMALPKDGCLDGAKITEVGGVGYKELLVMALPKDDSIDGAKVAEAIGVKLPDVGGAIRVFDAMIRHRVSDSYVLSQGQVFLLLKC

SEQ ID NO: 189584 - protein, 243 aa, Zea Mays
MLRIIPTQAVELGTFECVKRSMAEAQEKWKEDGCPKIQLGNMKIELPLHLLSPVAIAGAAAGIAATLACHPLEVIKDRLTINREVYPSIGLAFRRIYKTDGIGGFYAGLCPTLIGMIPYTTCYFFMYDTIKTSYCRLHKKSSLSRPELLLIGALSGLTASTISFPLEVARKRLMAGALQGKCPPNMIAALSEVIQEEGVMGLYRGWGASCLKVMPNSGITWVLYEAWKDVLLADRNKPRSLAN

SEQ ID NO: 189585 - protein, 311 aa, Zea Mays
MSKAILAPLETIRYCAYRILSLVVGLTGGINGRTRMIVGVGPRHIFGSLVDIIQQNGWQGLWAGNTINMLRIIPTQAVELGTFECVKRSMAEAQEKWKEDGCPKIQLGNMKIELPLHLLSPVAIAGAAAGIAATLACHPLEVIKDRLTINREVYPSIGLAFRRIYKTDGIGGFYAGLCPTLIGMIPYTTCYFFMYDTIKTSYCRLHKKSSLSRPELLLIGALSGLTASTISFPLEVARKRLMAGALQGKCPPNMIAALSEVIQEEGVMGLYRGWGASCLKVMPNSGITWVLYEAWKDVLLADRNKPRSLAN

SEQ ID NO: 189586 - protein, 278 aa, Zea Mays
MALPKDGCLDGAKITEVGGVGYKELLVMALPKDDSIDGAKVAEAIGVKLPDVGGAIRTILNSREAREFASGALAGAMSKAILAPLETIRTRMIVGVGPRHIFGSLVDIIQQNGWQGLWAGNTINMLRIIPTQAVELGTFECVKRSMAEAQEKWKEDGCPKIQLGNMKIELPLHLLSPVAIAGAAAGIAATLACHPLEVIKDRLTINREVYPSIGLAFRRIYKTDGIGGFYAGLCPTLIGMIPYTTCYFFMSYCKHNQLPSGSSKEAVDGRRPAGEVPA

SEQ ID NO: 189587 - protein, 388 aa, Zea Mays
MSSGGEKMLLFGSFTEDETKLLQGQPLKSPTKSVSKECERTEIQFGTLNLSVLNLEKISTSSVVLPAKSAKGETSAITKENACNNEKKAAGSSLSNGGPVLANGCPPVNVPANNGLFENVKTEAVVPPVIPVKIISNPTPQMTLETHKDGTKPTESRKLNKEREITENGSPIVDKHIVAAPAEEAVTSLNKKASQNMPLLPHGLRNTGNICFLNATLQALLSCSPFVYLLQDLRNRRIPKVGYPTLSAFVELISQLDVPDESVIKKNEKVITVAAKPLNPAMFDAVLRNFTPDVPAGITARPRQEDAQEFLSFAMDRMHDELLKLNGDGLNSKEGMVVSSADDDAWETVGRKNKSAIVRTQSFVPSELSAIFGGQLQSVVKAAAQYQG

SEQ ID NO: 189588 - protein, 435 aa, Zea Mays
MSSGGEKMLLFGSFTEDETKLLQGQPLKSPTKSVSKECERTEIQFGTLNLSVLNLEKISTSSVVLPAKSAKGETSAITKENACNNEKKAAGSSLSNGGPVLANGCPPVNVPANNGLFENVKTEAVVPPVIPVKIISNPTPQMTLETHKDGTKPTESRKLNKEREITENGSPIVDKHIVAAPAEEAVTSLNKKASQNMPLLPHGLRNTGNICFLNATLQALLSCSPFVYLLQDLRNRRIPKVGYPTLSAFVELISQLDVPDESVIKKNEKVITVAAKPLNPAMFDAVLRNFTPDVPAGITARPRQEDAQEFLSFAMDRMHDELLKLNGDGLNSKEGMVVSSADDDAWETVGRKNKSAIVRTQSFVPSELSAIFGGQLQSVVKAAASATVQPFLLLHLDIFPDAVQTLNDALRLFSTPESLEGYRTAAGKVSTLSPL

SEQ ID NO: 189589 - protein, 389 aa, Zea Mays
MSSGGEKMLLFGSFTEDETKLLQGQPLKSPTKSVSKECERTEIQFGTLNLSVLNLEKISTSSVVLPAKSAKGETSAITKENACNNEKKAAGSSLSNGGPVLANGCPPVNVPANNGLFENVKTEAVVPPVIPVKIISNPTPQMTLETHKDGTKPTESRKLNKEREITENGSPIVDKHIVAAPAEEAVTSLNKKASQNMPLLPHGLRNTGNICFLNATLQALLSCSPFVYLLQDLRNRRIPKVGYPTLSAFVELISQLDVPDESVIKKNEKVITVAAKPLNPAMFDAVLRNFTPDVPAGITARPRQEDAQEFLSFAMDRMHDELLKLNGDGLNSKEGMVVSSADDDAWETVGRKNKSAIVRTQSFVPSELSAIFGGQLQSVVKAAGNFVLS

SEQ ID NO: 189590 - protein, 438 aa, Zea Mays
MSSGGEKMLLFGSFTEDETKLLQGQPLKSPTKSVSKECERTEIQFGTLNLSVLNLEKISTSSVVLPAKSAKGETSAITKENACNNEKKAAGSSLSNGGPVLANGCPPVNVPANNGLFENVKTEAVVPPVIPVKIISNPTPQMTLETHKDGTKPTESRKLNKEREITENGSPIVDKHIVAAPAEEAVTSLNKKASQNMPLLPHGLRNTGNICFLNATLQALLSCSPFVYLLQDLRNRRIPKVGYPTLSAFVELISQLDVPDESVIKKNEKVITVAAKPLNPAMFDAVLRNFTPDVPAGITARPRQEDAQEFLSFAMDRMHDELLKLNGDGLNSKEGMVVSSADDDAWETVGRKNKSAIVRTQSFVPSELSAIFGGQLQSVVKAAGNKASATVQPFLLLHLDIFPDAVQTLNDALRLFSTPESLEGYRTAAGKVSTLSPL

SEQ ID NO: 189591 - protein, 149 aa, Zea Mays
MYDVAIARNENASTIGPTIPLLDLSSSKGSETVLLPARSGSVPKITPSHTRNRARGMAVPATIAVRTFDRSPSKFVQRTGTTFWYTNERAIIGILCGAAAKFASRRELHCRFPLATTCVNHIWKVAICAKGVFKLSDDQFVTRAYFMSK

SEQ ID NO: 189592 - protein, 181 aa, Zea Mays
MATSGKKHLNSVTLLFKLPYYTQWGQSLLIAGSEPALGSWNVKQGVSLSPVHQDSELIWCGSVSVVAGFTSEYKYYVVDDKKNVLRWEAGEKRKLVLPEGVKEGDVIEIRDWWQDASEALFFRSAFKNVIFNATEGVKKESQSVSLNKSLDPEDIVVQFVISCPRLVSGSTVSSSLEVTLN

SEQ ID NO: 189593 - protein, 283 aa, Zea Mays
MATSGKKHLNSVTLLFKLPYYTQWGQSLLIAGSEPALGSWNVKQGVSLSPVHQDSELIWCGSVSVVAGFTSEYKYYVVDDKKNVLRWEAGEKRKLVLPEGVKEGDVIEIRDWWQDASEALFFRSAFKNVIFNATEGVKKESQSVSLNKSLDPEDIVVQFVISCPRLVSGSTVIVTGSNPQLGRWQTQDGLKLSYVGDSLWKASCALRKSEFPIKNIVKSVKQETLHWSLAQTGRLMLIYHHPSNPDILCYLMVLLGMHHGGVQVLLYPCFQSDQMRTLALENF

SEQ ID NO: 189594 - protein, 724 aa, Zea Mays
MATSGKKHLNSVTLLFKLPYYTQWGQSLLIAGSEPALGSWNVKQGVSLSPVHQDSELIWCGSVSVVAGFTSEYKYYVVDDKKNVLRWEAGEKRKLVLPEGVKEGDVIEIRDWWQDASEALFFRSAFKNVIFNATEGVKKESQSVSLNKSLDPEDIVVQFVISCPRLVSGSTVIVTGSNPQLGRWQTQDGLKLSYVGDSLWKASCALRKSEFPIKYKYCQISQAGNSTLELGPNREVNVDLSSPKQSRYIVLSDGALRDAPWRGAGVAVPMFSIRSDEDLGVGEFLDLKLLVDWAVNSGFHLVQLLPINDTSVHGMWWDSYPYSSLSVFALHPLYLRVQALSDAIPVDVKEEIQQAKKQLDKKDVDYEAALSTKLSIARKIFNLEKEKVLNSSSFKQFLSENEEWLKPYAAFCFLRDFFETSDHSQWGRFSQFSKDKLDKLICEGTLHHDIIRFHYYVQYHLYIQLSEAATYARKKNVILKGDLPIGVDRNSVDTWVYPTLFRMNTATGAPPDYFDKNGQNWGFPTYNWEEMSKDNYGWWRARLTQMAKYFTAYRIDHILGFFRIWELPDHAATGLVGKFRPSIPLSQEELLSEGLWDFNRMSQPYIRQEILEEKFGSFWTVIAANFLNEYQKQCYEFKEDCNTEKKIIVKIKTSAEKSLWVEKEDNIRRGLFDLLQNIVLIRDPEDSTKFYPRSTWKTHQVLGTLMNTGYARTGVDWIAYPKNA

SEQ ID NO: 189595 - protein, 201 aa, Zea Mays
MQPLCKNAGDASEALFFRSAFKNVIFNATEGVKKESQSVSLNKSLDPEDIVVQFVISCPRLVSGSTVIVTGSNPQLGRWQTQDGLKLSYVGDSLWKASCALRKSEFPIKYKYCQISQAGNSTLELGPNREVNVDLSSPKQSRYIVLSDGALRDAPWRGAGVAVPMFSIRSDEDLGVGEFLDLKLLVDWAVNSGFHLVQLLP

SEQ ID NO: 189596 - protein, 68 aa, Zea Mays
MQGSDIETGSAQIVRPSSLRMLLSKPTHTVHYYWRKFDDALMRPMFGGRGFVPFSPGSPTEQSVHDGR

SEQ ID NO: 189597 - protein, 194 aa, Zea Mays
MEQLTPWPSPELAAITGQYADFGALDADTAWHDDAAAIAAAVVPSTEEEQQAWIAAGCDVGACRTEEKARENDAALAEPCLSSFVEMSEICPASVVVTLSHGGDEGVDSSGKTAPRPQLAAPTPAKGGYDVAYPDRGTVISRYKEKRKNRRFDKQIRYESRKARADGRMRIKGRFAKSGELAARTCRCVLVYVD

SEQ ID NO: 189598 - protein, 405 aa, Zea Mays
MAREILILRRLDHPNVVKLDGLVTSRMSCSLYLVFDYMVHDLAGLAASPDIKFTLPQVKCYVHQLLSGLEHCHNRGVLHRDIKGSNLLLDNNGVLKIADFGLASFFDPNHKQPMTSRVVTLWYRPPELLLGATDYGVGVDLWSAGCILAELLAGKPIMPGRTEVEQLHKIFKLCGSPTEEYWKKSKLPHATIFKPQQPYKRRIADTFKDFPQSALRLIETLLAIDPADRLTATSALNSDFFATEPYACEPSSLPQYPPSKEMDAKRRDEEARRLRAAGGRGNGDGTRKTRTRDRPRAVPAPEANAELQANIDKRRLITHANAKSKSEKFPPPHQDGALGFPLGCSNHMEPSFEPPDPSSFSTVFPFEKSAVPTWSGPLADSAAGNQKRKHKSARSSKQPATARAR

SEQ ID NO: 189599 - protein, 357 aa, Zea Mays
MDKFRFMERWSLGAKVVALALLLSAASHGRELPVKSSDRSFIYNHTLAKTLVEYASAVYMTDLTALFTWTCSRCNDLTQGFEMRSLIVDVENCLQAFVGVDHSLNSIIVAIRGTQENSVQNWIKDLIWKQLDLSYPNMPNAKVHSGFFSSYNNTILRLAITSAVHKARKSYGDINVIVTGHSMGGAMASFCALDLAMKLGGGSVQLMTFGQPRVGNAAFASYFAKYVPNTIRVTHGHDIVPHLPPYFSFLPQLTYHHFPREVWVQDSDGNTTERICDDSGEDPDCCRCISMFGLRIQDHFTYLGVDMEADDWSTCRIITAQRVQQFRLELAGNIMMTKHDIDVSIVEPSVQNRLEQF

SEQ ID NO: 189600 - protein, 249 aa, Zea Mays
MWKWYSSSRTRRGKSQLHASWQVRIVKPVRAHVLHEKTNSFSFTISTALTRKQLLIPSLGIHRSNPDADAGVQQCKNNSGFLRMMPCHQSSLTNYYYPTNPREKDVLFFSLKSGSVPGGLAYRLHFLAQPTGGSEEEKSRPAGHILSSSLRCSLQRSSRSALKEGGFHSSFSPSTRRTSPAPSSSFSHFSLSTPCHSCRLDLPALEGSDLAWVRLQVPVHGEMEPGCQSGSSRTPAVCCFSWKRVACQE

SEQ ID NO: 189601 - protein, 218 aa, Zea Mays
MPPILTNQLLLSNKSTRKGRPFFLSEEWECTRRPGLPPSFLGTTNRGLGRGEEPTSRAYSLFLPPVLSPAVQPQRPERGRLPLFFLPEHPPYVSCTFFQFLPFQFVHSLSFLPPRPPRSGRSNPSPLSFYFCLYLVLESLPAGCCCCTLPPYSVLRPWDCPARFLSKKKRKRSNCSARFQFVWLTSLSESLCFSRFRFSLGASAGSGSWRDGAWVPKW

SEQ ID NO: 189602 - protein, 214 aa, Zea Mays
MWKWYSSSRTRRGKSQLHASWQVRIVKPVRAHVLHEKTNSFSFTISTALTRKQLLIPSLGIHRSNPDADAGVQQCKNNSGFLRMMPCHQSSLTNYYYPTNPREKDVLFFSLKSGSVPGGLAYRLHFLAQPTGGSEEEKSRPAGHILSSSLRCSLQRSSRSALKEGGFHSSFSPSTRRSDLAWVRLQVPVHGEMEPGCQSGSSRTPAVCCFSWKR

SEQ ID NO: 189603 - protein, 1508 aa, Zea Mays
MYTSLSQTTEDTKMVQSLVAVWEELERLRLLEETKYADLGRPLREEVLKDFLHGIKYESALSVLFSQEGPHHKVSTIEESERLERCLKSLTDIIGTVTFSQDNYCGNIDVGNSADVQNDKPDASLCSGSLEQNMQIISPERNSEYPVSSSVHQRTLSQLSDKGEKHLDAEALGLLSWLASSQAAEESTDDELTNEVILSPLFANKSIEVAVESAQLDFDSASQQECQDILDSVDPIRAVEEPNIHTSYLDSVKSNSAASLGNSIPQLDGSSDENPKVSQEYDRSKVTRKSVVSASYTSTKKPSKSASKYSGTEHLWGSLPLSSRKKRQHGDADDSCSAMSPQKDLSASKKSTIDKDYHDTIGSTDSESSSFLGVHDSVCHSVRDLMRRRRSFRREQLEFGCSGAATCTMDKESETVNSGGLEFHDFTSDIPNLALTRMAFVQKPPLKDDACSGLESPSDCEQRGSEKSGLADLLPFFNQNMEENKQNESFQDMESTGDVLGVPTHFQNDGSALYLLTHALSPPSAGAVGHWLTQQSSSSIFSGYTNYDGVAADKEEAHSSTLSRNSPTRFTKENSANKMHGDVMGSALSYKESKHLDEWHDFSQISAGNEKDRLTPLSQIGFRDPASIGGGQQLTILSVEVLTESRGELRPDPRFDAINAVSLAIEDDADNTVDVHVFIRGNNVKSHRRNLDGIAGCNINVFPEEKDVLNNLISAICSIDPDILVGWEIQLGSLGFLAERAAYLGIGLLKRISRTPHELNHPPKIPVDNSSQVLSETSSADDIIDDVSENDWSHTHASGIHVGGRIVLNLWRLMRAEVKLNNYSLEAVADEVLRRKIPLIPSRILNRWFATGPGRGRHRCIEYISNRARINLEIMNQMDLVNRTSELARVFGIDFFSVLSRGSQYRVESMLLRLAHTQNYLAISPGNQQVASQPAMECLPLVMEPESAFYPDPVVVLDFQSLYPSMIIAYNLCYSTCLGKVFPSKSDVLGVSSYSADPHTLVDLKNQLLLTPNGVLYVQPEIRKGVLPRLLEEILSTRIMVKQAMKKLSPSQQVLHRIFNARQLALKLIANVTYGYTAAGFSGRMPCAELADSIVQCGRRTLETAISFVNQHPLWKARVVYGDTDSMFVLLKGRSREEAFRIGKEIASSITAMNPDPVTLKFEKVYQPCFLLTKKRYVGYSYESPEQNEPVFDAKGIETVRRDTCPAVAKILERSIRIMFEEQDLTKVRTYLERQWTHILSGKVSILDFIFAKEVRLGTYSARASTLPPAAIVATKAMLSDPRAEPRYAERVPYVVIHGEPGARLADMVIDPYGLLEVGSPYRLNEQYYITKQIIPALQRVFGLLGADLNKWFNEMPRPIRSTLAKRQFAAAHGSFSRDGSFIRLGLNNKTSAKGGRIDTYYMSSHCSICGDMIQGSESFCNNCLKSEAVVATVVAGRTSKLEREIQHLAAICGHCGGADWIVESGVKCISLACPVFYERRKVQRELVVVSESAGEAGYYPFCCAELF

SEQ ID NO: 189604 - protein, 1761 aa, Zea Mays
MAPPLPGFAFSRSPFLGEEVEEVPVVRIYGSTPAGQKTCLHIHRVLPYFYIPCSEELLCNLEKGDSYITGLLSDLEKALQARGPSKRKHVHGCNLVRAKKLYGYHSSEELFMKIYLYYPHEVSRAASLVLSGAVSNRSFQPYESHIPYLLHFLVDYNLYGMGHIHVKNFKFRPPLPVDFHPKSSLRRKAQSDNLEINSPTVWISSTVSHSSILGSSAPSHHLGGTNLSFAIRQSSSMLEADSRVEGILNEKYKMYTSLSQTTEDTKMVQSLVAVWEELERLRLLEETKYADLGRPLREEVLKDFLHGIKYESALSVLFSQEGPHHKVSTIEESERLERCLKSLTDIIGTVTFSQDNYCGNIDVGNSADVQNDKPDASLCSGSLEQNMQIISPERNSEYPVSSSVHQRTLSQLSDKGEKHLDAEALGLLSWLASSQAAEESTDDELTNEVILSPLFANKSIEVAVESAQLDFDSASQQECQDILDSVDPIRAVEEPNIHTSYLDSVKSNSAASLGNSIPQLDGSSDENPKVSQEYDRSKVTRKSVVSASYTSTKKPSKSASKYSGTEHLWGSLPLSSRKKRQHGDADDSCSAMSPQKDLSASKKSTIDKDYHDTIGSTDSESSSFLGVHDSVCHSVRDLMRRRRSFRREQLEFGCSGAATCTMDKESETVNSGGLEFHDFTSDIPNLALTRMAFVQKPPLKDDACSGLESPSDCEQRGSEKSGLADLLPFFNQNMEENKQNESFQDMESTGDVLGVPTHFQNDGSALYLLTHALSPPSAGAVGHWLTQQSSSSIFSGYTNYDGVAADKEEAHSSTLSRNSPTRFTKENSANKMHGDVMGSALSYKESKHLDEWHDFSQISAGNEKDRLTPLSQIGFRDPASIGGGQQLTILSVEVLTESRGELRPDPRFDAINAVSLAIEDDADNTVDVHVFIRGNNVKSHRRNLDGIAGCNINVFPEEKDVLNNLISAICSIDPDILVGWEIQLGSLGFLAERAAYLGIGLLKRISRTPHELNHPPKIPVDNSSQVLSETSSADDIIDDVSENDWSHTHASGIHVGGRIVLNLWRLMRAEVKLNNYSLEAVADEVLRRKIPLIPSRILNRWFATGPGRGRHRCIEYISNRARINLEIMNQMDLVNRTSELARVFGIDFFSVLSRGSQYRVESMLLRLAHTQNYLAISPGNQQVASQPAMECLPLVMEPESAFYPDPVVVLDFQSLYPSMIIAYNLCYSTCLGKVFPSKSDVLGVSSYSADPHTLVDLKNQLLLTPNGVLYVQPEIRKGVLPRLLEEILSTRIMVKQAMKKLSPSQQVLHRIFNARQLALKLIANVTYGYTAAGFSGRMPCAELADSIVQCGRRTLETAISFVNQHPLWKARVVYGDTDSMFVLLKGRSREEAFRIGKEIASSITAMNPDPVTLKFEKVYQPCFLLTKKRYVGYSYESPEQNEPVFDAKGIETVRRDTCPAVAKILERSIRIMFEEQDLTKVRTYLERQWTHILSGKVSILDFIFAKEVRLGTYSARASTLPPAAIVATKAMLSDPRAEPRYAERVPYVVIHGEPGARLADMVIDPYGLLEVGSPYRLNEQYYITKQIIPALQRVFGLLGADLNKWFNEMPRPIRSTLAKRQFAAAHGSFSRDGSFIRLGLNNKTSAKGGRIDTYYMSSHCSICGDMIQGSESFCNNCLKSEAVVATVVAGRTSKLEREIQHLAAICGHCGGADWIVESGVKCISLACPVFYERRKVQRELVVVSESAGEAGYYPFCCAELF

SEQ ID NO: 189605 - protein, 1323 aa, Zea Mays
MKIYLYYPHEVSRAASLVLSGAVSNRSFQPYESHIPYLLHFLVDYNLYGMGHIHVKNFKFRPPLPVDFHPKSSLRRKAQSDNLEINSPTVWISSTVSHSSILGSSAPSHHLGGTNLSFAIRQSSSMLEADSRVEGILNEKYKMYTSLSQTTEDTKMVQSLVAVWEELERLRLLEETKYADLGRPLREEVLKDFLHGIKYESALSVLFSQEGPHHKVSTIEESERLERCLKSLTDIIGTVTFSQDNYCGNIDVGNSADVQNDKPDASLCSGSLEQNMQIISPERNSEYPVSSSVHQRTLSQLSDKGEKHLDAEALGLLSWLASSQAAEESTDDELTNEVILSPLFANKSIEVAVESAQLDFDSASQQECQDILDSVDPIRAVEEPNIHTSYLDSVKSNSAASLGNSIPQLDGSSDENPKVSQEYDRSKVTRKSVVSASYTSTKKPSKSASKYSGTEHLWGSLPLSSRKKRQHGDADDSCSAMSPQKDLSASKKSTIDKDYHDTIGSTDSESSSFLGVHDSVCHSVRDLMRRRRSFRREQLEFGCSGAATCTMDKESETVNSGGLEFHDFTSDIPNLALTRMAFVQKPPLKDDACSGLESPSDCEQRGCRSPRPLAEKSGLADLLPFFNQNMEENKQNESFQDMESTGDVLGVPTHFQNDGSALYLLTHALSPPSAGAVGHWLTQQSSSSIFSGYTNYDGVAADKEEAHSSTLSRNSPTRFTKENSANKMHGDVLTESRGELRPDPRFDAINAVSLAIEDDADNTVDVHVFIRGNNVKSHRRNLDGIAGCNINVFPEEKDVLNNLISAICSIDPDILVGWEIQLGSLGFLAERAAYLGIGLLKRISRTPHELNHPPKIPVDNSSQVLSETSSADDIIDDVSENDWSHTHASGIHVGGRIVLNLWRLMRAEVKLNNYSLEAVADEVLRRKIPLIPSRILNRWFATGPGRGRHRCIEYISNRARINLEIMNQMDLVNRTSELARVFGIDFFSVLSRGSQYRVESMLLRLAHTQNYLAISPGNQQVASQPAMECLPLVMEPESAFYPDPVVVLDFQSLYPSMIIAYNLCYSTCLGKVFPSKSDVLGVSSYSADPHTLVDLKNQLLLTPNGVLYVQPEIRKGVLPRLLEEILSTRIMVKQAMKKLSPSQQVLHRIFNARQLALKLIANVTYGYTAAGFSGRMPCAELADSIVQCGRRTLETAISFVNQHPLWKARVVYGDTDSMFVLLKGRSREEAFRIGKEIASSITAMNPDPVTLKFEKVYQPCFLLTKKRYVGYSYESPEQNEPVFDAKGIETVRRDTCPAVAKILERSIRIMFEEQDLTKVRGIT

SEQ ID NO: 189606 - protein, 1450 aa, Zea Mays
MYTSLSQTTEDTKMVQSLVAVWEELERLRLLEETKYADLGRPLREEVLKDFLHGIKYESALSVLFSQEGPHHKVSTIEESERLERCLKSLTDIIGTVTFSQDNYCGNIDVGNSADVQNDKPDASLCSGSLEQNMQIISPERNSEYPVSSSVHQRTLSQLSDKGEKHLDAEALGLLSWLASSQAAEESTDDELTNEVILSPLFANKSIEVAVESAQLDFDSASQQECQDILDSVDPIRAVEEPNIHTSYLDSVKSNSAASLGNSIPQLDGSSDENPKVSQEYDRSKVTRKSVVSASYTSTKKPSKSASKYSGTEHLWGSLPLSSRKKRQHGDADDSCSAMSPQKDLSASKKSTIDKDYHDTIGSTDSESSSFLGVHDSVCHSVRDLMRRRRSFRREQLEFGCSGAATCTMDKESETVNSGGLEFHDFTSDIPNLALTRMAFVQKPPLKDDACSGLESPSDCEQRGSEKSGLADLLPFFNQNMEENKQNESFQDMESTGDVLGVPTHFQNDGSALYLLTHALSPPSAGAVGHWLTQQSSSSIFSGYTNYDGVAADKEEAHSSTLSRNSPTRFTKENSANKMHGDVLTESRGELRPDPRFDAINAVSLAIEDDADNTVDVHVFIRGNNVKSHRRNLDGIAGCNINVFPEEKDVLNNLISAICSIDPDILVGWEIQLGSLGFLAERAAYLGIGLLKRISRTPHELNHPPKIPVDNSSQVLSETSSADDIIDDVSENDWSHTHASGIHVGGRIVLNLWRLMRAEVKLNNYSLEAVADEVLRRKIPLIPSRILNRWFATGPGRGRHRCIEYISNRARINLEIMNQMDLVNRTSELARVFGIDFFSVLSRGSQYRVESMLLRLAHTQNYLAISPGNQQVASQPAMECLPLVMEPESAFYPDPVVVLDFQSLYPSMIIAYNLCYSTCLGKVFPSKSDVLGVSSYSADPHTLVDLKNQLLLTPNGVLYVQPEIRKGVLPRLLEEILSTRIMVKQAMKKLSPSQQVLHRIFNARQLALKLIANVTYGYTAAGFSGRMPCAELADSIVQCGRRTLETAISFVNQHPLWKARVVYGDTDSMFVLLKGRSREEAFRIGKEIASSITAMNPDPVTLKFEKVYQPCFLLTKKRYVGYSYESPEQNEPVFDAKGIETVRRDTCPAVAKILERSIRIMFEEQDLTKVRTYLERQWTHILSGKVSILDFIFAKEVRLGTYSARASTLPPAAIVATKAMLSDPRAEPRYAERVPYVVIHGEPGARLADMVIDPYGLLEVGSPYRLNEQYYITKQIIPALQRVFGLLGADLNKWFNEMPRPIRSTLAKRQFAAAHGSFSRDGSFIRLGLNNKTSAKGGRIDTYYMSSHCSICGDMIQGSESFCNNCLKSEAVVATVVAGRTSKLEREIQHLAAICGHCGGADWIVESGVKCISLACPVFYERRKVQRELVVVSESAGEAGYYPFCCAELF

SEQ ID NO: 189607 - protein, 648 aa, Zea Mays
MMHVLVWRALQIVSNVDNMEENKQNESFQDMESTGDVLGVPTHFQNDGSALYLLTHALSPPSAGAVGHWLTQQSSSSIFSGYTNYDGVAADKEEAHSSTLSRNSPTRFTKENSANKMHGDVMGSALSYKESKHLDEWHDFSQISAGNEKDRLTPLSQIGFRDPASIGGGQQLTILSVEVLTESRGELRPDPRFDAINAVSLAIEDDADNTVDVHVFIRGNNVKSHRRNLDGIAGCNINVFPEEKDVLNNLISAICSIDPDILVGWEIQLGSLGFLAERAAYLGIGLLKRISRTPHELNHPPKIPVDNSSQVLSETSSADDIIDDVSENDWSHTHASGIHVGGRIVLNLWRLMRAEVKLNNYSLEAVADEVLRRKIPLIPSRILNRWFATGPGRGRHRCIEYISNRARINLEIMNQMDLVNRTSELARVFGIDFFSVLSRGSQYRVESMLLRLAHTQNYLAISPGNQQVASQPAMECLPLVMEPESAFYPDPVVVLDFQSLYPSMIIAYNLCYSTCLGKVFPSKSDVLGVSSYSADPHTLVDLKNQLLLTPNGVLYVQPEIRKGVLPRLLEEILSTRIMVKQAMKKLSPSQQVLHRLLDSVVECLVQSLQTALFSVAVEHSKQQYHLSTSILCGKLGLCMVILTVCLFS

SEQ ID NO: 189608 - protein, 1046 aa, Zea Mays
MMHVLVWRALQIVSNVDNMEENKQNESFQDMESTGDVLGVPTHFQNDGSALYLLTHALSPPSAGAVGHWLTQQSSSSIFSGYTNYDGVAADKEEAHSSTLSRNSPTRFTKENSANKMHGDVMGSALSYKESKHLDEWHDFSQISAGNEKDRLTPLSQIGFRDPASIGGGQQLTILSVEVLTESRGELRPDPRFDAINAVSLAIEDDADNTVDVHVFIRGNNVKSHRRNLDGIAGCNINVFPEEKDVLNNLISAICSIDPDILVGWEIQLGSLGFLAERAAYLGIGLLKRISRTPHELNHPPKIPVDNSSQVLSETSSADDIIDDVSENDWSHTHASGIHVGGRIVLNLWRLMRAEVKLNNYSLEAVADEVLRRKIPLIPSRILNRWFATGPGRGRHRCIEYISNRARINLEIMNQMDLVNRTSELARVFGIDFFSVLSRGSQYRVESMLLRLAHTQNYLAISPGNQQVASQPAMECLPLVMEPESAFYPDPVVVLDFQSLYPSMIIAYNLCYSTCLGKVFPSKSDVLGVSSYSADPHTLVDLKNQLLLTPNGVLYVQPEIRKGVLPRLLEEILSTRIMVKQAMKKLSPSQQVLHRIFNARQLALKLIANVTYGYTAAGFSGRMPCAELADSIVQCGRRTLETAISFVNQHPLWKARVVYGDTDSMFVLLKGRSREEAFRIGKEIASSITAMNPDPVTLKFEKVYQPCFLLTKKRYVGYSYESPEQNEPVFDAKGIETVRRDTCPAVAKILERSIRIMFEEQDLTKVRTYLERQWTHILSGKVSILDFIFAKEVRLGTYSARASTLPPAAIVATKAMLSDPRAEPRYAERVPYVVIHGEPGARLADMVIDPYGLLEVGSPYRLNEQYYITKQIIPALQRVFGLLGADLNKWFNEMPRPIRSTLAKRQFAAAHGSFSRDGSFIRLGLNNKTSAKGGRIDTYYMSSHCSICGDMIQGSESFCNNCLKSEAVVATVVAGRTSKLEREIQHLAAICGHCGGADWIVESGVKCISLACPVFYERRKVQRELVVVSESAGEAGYYPFCCAELF

SEQ ID NO: 189609 - protein, 1438 aa, Zea Mays
MCYEMLITAKPLCYYVQELERLRLLEETKYADLGRPLREEVLKDFLHGIKYESALSVLFSQEGPHHKVSTIEESERLERCLKSLTDIIGTVTFSQDNYCGNIDVGNSADVQNDKPDASLCSGSLEQNMQIISPERNSEYPVSSSVHQRTLSQLSDKGEKHLDAEALGLLSWLASSQAAEESTDDELTNEVILSPLFANKSIEVAVESAQLDFDSASQQECQDILDSVDPIRAVEEPNIHTSYLDSVKKKRQHGDADDSCSAMSPQKDLSASKKSTIDKDYHDTIGSTDSESSSFLGVHDSVCHSVRDLMRRRRSFRREQLEFGCSGAATCTMDKESETVNSGGLEFHDFTSDIPNLALTRMAFVQKPPLKDDACSGLESPSDCEQRGCRSPRPLAEKSGLADLLPFFNQNMEENKQNESFQDMESTGDVLGVPTHFQNDGSALYLLTHALSPPSAGAVGHWLTQQSSSSIFSGYTNYDGVAADKEEAHSSTLSRNSPTRFTKENSANKMHGDVMGSALSYKESKHLDEWHDFSQISAGNEKDRLTPLSQIGFRDPASIGGGQQLTILSVEVLTESRGELRPDPRFDAINAVSLAIEDDADNTVDVHVFIRGNNVKSHRRNLDGIAGCNINVFPEEKDVLNNLISAICSIDPDILVGWEIQLGSLGFLAERAAYLGIGLLKRISRTPHELNHPPKIPVDNSSQVLSETSSADDIIDDVSENDWSHTHASGIHVGGRIVLNLWRLMRAEVKLNNYSLEAVADEVLRRKIPLIPSRILNRWFATGPGRGRHRCIEYISNRARINLEIMNQMDLVNRTSELARVFGIDFFSVLSRGSQYRVESMLLRLAHTQNYLAISPGNQQVASQPAMECLPLVMEPESAFYPDPVVVLDFQSLYPSMIIAYNLCYSTCLGKVFPSKSDVLGVSSYSADPHTLVDLKNQLLLTPNGVLYVQPEIRKGVLPRLLEEILSTRIMVKQAMKKLSPSQQVLHRIFNARQLALKLIANVTYGYTAAGFSGRMPCAELADSIVQCGRRTLETAISFVNQHPLWKARVVYGDTDSMFVLLKGRSREEAFRIGKEIASSITAMNPDPVTLKFEKVYQPCFLLTKKRYVGYSYESPEQNEPVFDAKGIETVRRDTCPAVAKILERSIRIMFEEQDLTKVRTYLERQWTHILSGKVSILDFIFAKEVRLGTYSARASTLPPAAIVATKAMLSDPRAEPRYAERVPYVVIHGEPGARLADMVIDPYGLLEVGSPYRLNEQYYITKQIIPALQRVFGLLGADLNKWFNEMPRPIRSTLAKRQFAAAHGSFSRDGSFIRLGLNNKTSAKGGRIDTYYMSSHCSICGDMIQGSESFCNNCLKSEAVVATVVAGRTSKLEREIQHLAAICGHCGGADWIVESGVKCISLACPVFYERRKVQRELVVVSESAGEAGYYPFCCAELF

SEQ ID NO: 189610 - protein, 1654 aa, Zea Mays
MKIYLYYPHEVSRAASLVLSGAVSNRSFQPYESHIPYLLHFLVDYNLYGMGHIHVKNFKFRPPLPVDFHPKSSLRRKAQSDNLEINSPTVWISSTVSHSSILGSSAPSHHLGGTNLSFAIRQSSSMLEADSRVEVPPSGILNEKYKMYTSLSQTTEDTKMVQSLVAVWEELERLRLLEETKYADLGRPLREEVLKDFLHGIKYESALSVLFSQEGPHHKVSTIEESERLERCLKSLTDIIGTVTFSQDNYCGNIDVGNSADVQNDKPDASLCSGSLEQNMQIISPERNSEYPVSSSVHQRTLSQLSDKGEKHLDAEALGLLSWLASSQAAEESTDDELTNEVILSPLFANKSIEVAVESAQLDFDSASQQECQDILDSVDPIRAVEEPNIHTSYLDSVKSNSAASLGNSIPQLDGSSDENPKVSQEYDRSKVTRKSVVSASYTSTKKPSKSASKYSGTEHLWGSLPLSSRKKRQHGDADDSCSAMSPQKDLSASKKSTIDKDYHDTIGSTDSESSSFLGVHDSVCHSVRDLMRRRRSFRREQLEFGCSGAATCTMDKESETVNSGGLEFHDFTSDIPNLALTRMAFVQKPPLKDDACSGLESPSDCEQRGSEKSGLADLLPFFNQNMEENKQNESFQDMESTGDVLGVPTHFQNDGSALYLLTHALSPPSAGAVGHWLTQQSSSSIFSGYTNYDGVAADKEEAHSSTLSRNSPTRFTKENSANKMHGDVMGSALSYKESKHLDEWHDFSQISAGNEKDRLTPLSQIGFRDPASIGGGQQLTILSVEVLTESRGELRPDPRFDAINAVSLAIEDDADNTVDVHVFIRGNNVKSHRRNLDGIAGCNINVFPEEKDVLNNLISAICSIDPDILVGWEIQLGSLGFLAERAAYLGIGLLKRISRTPHELNHPPKIPVDNSSQVLSETSSADDIIDDVSENDWSHTHASGIHVGGRIVLNLWRLMRAEVKLNNYSLEAVADEVLRRKIPLIPSRILNRWFATGPGRGRHRCIEYISNRARINLEIMNQMDLVNRTSELARVFGIDFFSVLSRGSQYRVESMLLRLAHTQNYLAISPGNQQVASQPAMECLPLVMEPESAFYPDPVVVLDFQSLYPSMIIAYNLCYSTCLGKVFPSKSDVLGVSSYSADPHTLVDLKNQLLLTPNGVLYVQPEIRKGVLPRLLEEILSTRIMVKQAMKKLSPSQQVLHRIFNARQLALKLIANVTYGYTAAGFSGRMPCAELADSIVQCGRRTLETAISFVNQHPLWKARVVYGDTDSMFVLLKGRSREEAFRIGKEIASSITAMNPDPVTLKFEKVYQPCFLLTKKRYVGYSYESPEQNEPVFDAKGIETVRRDTCPAVAKILERSIRIMFEEQDLTKVRTYLERQWTHILSGKVSILDFIFAKEVRLGTYSARASTLPPAAIVATKAMLSDPRAEPRYAERVPYVVIHGEPGARLADMVIDPYGLLEVGSPYRLNEQYYITKQIIPALQRVFGLLGADLNKWFNEMPRPIRSTLAKRQFAAAHGSFSRDGSFIRLGLNNKTSAKGGRIDTYYMSSHCSICGDMIQGSESFCNNCLKSEAVVATVVAGRTSKLEREIQHLAAICGHCGGADWIVESGVKCISLACPVFYERRKVQRELVVVSESAGEAGYYPFCCAELF

SEQ ID NO: 189611 - protein, 1547 aa, Zea Mays
MGHIHVKNFKFRPPLPVDFHPKSSLRRKAQSDNLEINSPTVWISSTVSHSSILGSSAPSHHLGGTNLSFAIRQSSSMLEADSRVEVPPSGILNEKYKMYTSLSQTTEDTKMVQSLVAVWEELERLRLLEETKYADLGRPLREEVLKDFLHGIKYESALSVLFSQEGPHHKVSTIEESERLERCLKSLTDIIGTVTFSQDNYCGNIDVGNSADVQNDKPDASLCSGSLEQNMQIISPERNSEYPVSSSVHQRTLSQLSDKGEKHLDAEALGLLSWLASSQAAEESTDDELTNEVILSPLFANKSIEVAVESAQLDFDSASQQECQDILDSVDPIRAVEEPNIHTSYLDSVKSNSAASLGNSIPQLDGSSDENPKVSQEYDRSKVTRKSVVSASYTSTKKPSKSASKYSGTEHLWGSLPLSSRKKRQHGDADDSCSAMSPQKDLSASKKSTIDKDYHDTIGSTDSESSSFLGVHDSVCHSVRDLMRRRRSFRREQLEFGCSGAATCTMDKESETVNSGGLEFHDFTSDIPNLALTRMAFVQKPPLKDDACSGLESPSDCEQRGSEKSGLADLLPFFNQNMEENKQNESFQDMESTGDVLGVPTHFQNDGSALYLLTHALSPPSAGAVGHWLTQQSSSSIFSGYTNYDGVAADKEEAHSSTLSRNSPTRFTKENSANKMHGDVLTESRGELRPDPRFDAINAVSLAIEDDADNTVDVHVFIRGNNVKSHRRNLDGIAGCNINVFPEEKDVLNNLISAICSIDPDILVGWEIQLGSLGFLAERAAYLGIGLLKRISRTPHELNHPPKIPVDNSSQVLSETSSADDIIDDVSENDWSHTHASGIHVGGRIVLNLWRLMRAEVKLNNYSLEAVADEVLRRKIPLIPSRILNRWFATGPGRGRHRCIEYISNRARINLEIMNQMDLVNRTSELARVFGIDFFSVLSRGSQYRVESMLLRLAHTQNYLAISPGNQQVASQPAMECLPLVMEPESAFYPDPVVVLDFQSLYPSMIIAYNLCYSTCLGKVFPSKSDVLGVSSYSADPHTLVDLKNQLLLTPNGVLYVQPEIRKGVLPRLLEEILSTRIMVKQAMKKLSPSQQVLHRIFNARQLALKLIANVTYGYTAAGFSGRMPCAELADSIVQCGRRTLETAISFVNQHPLWKARVVYGDTDSMFVLLKGRSREEAFRIGKEIASSITAMNPDPVTLKFEKVYQPCFLLTKKRYVGYSYESPEQNEPVFDAKGIETVRRDTCPAVAKILERSIRIMFEEQDLTKVRTYLERQWTHILSGKVSILDFIFAKEVRLGTYSARASTLPPAAIVATKAMLSDPRAEPRYAERVPYVVIHGEPGARLADMVIDPYGLLEVGSPYRLNEQYYITKQIIPALQRVFGLLGADLNKWFNEMPRPIRSTLAKRQFAAAHGSFSRDGSFIRLGLNNKTSAKGGRIDTYYMSSHCSICGDMIQGSESFCNNCLKSEAVVATVVAGRTSKLEREIQHLAAICGHCGGADWIVESGVKCISLACPVFYERRKVQRELVVVSESAGEAGYYPFCCAELF

SEQ ID NO: 189612 - protein, 1110 aa, Zea Mays
MMSGAVSNRSFQPYESHIPYLLHFLVDYNLYGMGHIHVKNFKFRPPLPVDFHPKSSLRRKAQSDNLEINSPTVWISSTVSHSSILGSSAPSHHLGGTNLSFAIRQSSSMLEADSRVEVPPSGILNEKYKMYTSLSQTTEDTKMVQSLVAVWEELERLRLLEETKYADLGRPLREEVLKDFLHGIKYESALSVLFSQEGPHHKVSTIEESERLERCLKSLTDIIGTVTFSQDNYCGNIDVGNSADVQNDKPDASLCSGSLEQNMQIISPERNSEYPVSSSVHQRTLSQLSDKGEKHLDAEALGLLSWLASSQAAEESTDDELTNEVILSPLFANKSIEVAVESAQLDFDSASQQECQDILDSVDPIRAVEEPNIHTSYLDSVKKKRQHGDADDSCSAMSPQKDLSASKKSTIDKDYHDTIGSTDSESSSFLGVHDSVCHSVRDLMRRRRSFRREQLEFGCSGAATCTMDKESETVNSGGLEFHDFTSDIPNLALTRMAFVQKPPLKDDACSGLESPSDCEQRGSEKSGLADLLPFFNQNMEENKQNESFQDMESTGDVLGVPTHFQNDGSALYLLTHALSPPSAGAVGHWLTQQSSSSIFSGYTNYDGVAADKEEAHSSTLSRNSPTRFTKENSANKMHGDVLTESRGELRPDPRFDAINAVSLAIEDDADNTVDVHVFIRGNNVKSHRRNLDGIAGCNINVFPEEKDVLNNLISAICSIDPDILVGWEIQLGSLGFLAERAAYLGIGLLKRISRTPHELNHPPKIPVDNSSQVLSETSSADDIIDDVSENDWSHTHASGIHVGGRIVLNLWRLMRAEVKLNNYSLEAVADEVLRRKIPLIPSRILNRWFATGPGRGRHRCIEYISNRARINLEIMNQMDLVNRTSELARVFGIDFFSVLSRGSQYRVESMLLRLAHTQNYLAISPGNQQVASQPAMECLPLVMEPESAFYPDPVVVLDFQSLYPSMIIAYNLCYSTCLGKVFPSKSDVLGVSSYSADPHTLVDLKNQLLLTPNGVLYVQPEIRKGVLPRLLEEILSTRIMVKQAMKKLSPSQQVLHRLLDSVVECLVQSLQTALFSVAVEHSKQQYHLSTSILCGKLGLCMVILTVCLFS

SEQ ID NO: 189613 - protein, 1104 aa, Zea Mays
MCYEMLITAKPLCYYVQELERLRLLEETKYADLGRPLREEVLKDFLHGIKYESALSVLFSQEGPHHKVSTIEESERLERCLKSLTDIIGTVTFSQDNYCGNIDVGNSADVQNDKPDASLCSGSLEQNMQIISPERNSEYPVSSSVHQRTLSQLSDKGEKHLDAEALGLLSWLASSQAAEESTDDELTNEVILSPLFANKSIEVAVESAQLDFDSASQQECQDILDSVDPIRAVEEPNIHTSYLDSVKSNSAASLGNSIPQLDGSSDENPKVSQEYDRSKVTRKSVVSASYTSTKKPSKSASKYSGTEHLWGSLPLSSRKKRQHGDADDSCSAMSPQKDLSASKKSTIDKDYHDTIGSTDSESSSFLGVHDSVCHSVRDLMRRRRSFRREQLEFGCSGAATCTMDKESETVNSGGLEFHDFTSDIPNLALTRMAFVQKPPLKDDACSGLESPSDCEQRGSEKSGLADLLPFFNQNMEENKQNESFQDMESTGDVLGVPTHFQNDGSALYLLTHALSPPSAGAVGHWLTQQSSSSIFSGYTNYDGVAADKEEAHSSTLSRNSPTRFTKENSANKMHGDVMGSALSYKESKHLDEWHDFSQISAGNEKDRLTPLSQIGFRDPASIGGGQQLTILSVEVLTESRGELRPDPRFDAINAVSLAIEDDADNTVDVHVFIRGNNVKSHRRNLDGIAGCNINVFPEEKDVLNNLISAICSIDPDILVGWEIQLGSLGFLAERAAYLGIGLLKRISRTPHELNHPPKIPVDNSSQVLSETSSADDIIDDVSENDWSHTHASGIHVGGRIVLNLWRLMRAEVKLNNYSLEAVADEVLRRKIPLIPSRILNRWFATGPGRGRHRCIEYISNRARINLEIMNQMDLVNRTSELARVFGIDFFSVLSRGSQYRVESMLLRLAHTQNYLAISPGNQQVASQPAMECLPLVMEPESAFYPDPVVVLDFQSLYPSMIIAYNLCYSTCLGKVFPSKSDVLGVSSYSADPHTLVDLKNQLLLTPNGVLYVQPEIRKGVLPRLLEEILSTRIMVKQAMKKLSPSQQVLHRLLDSVVECLVQSLQTALFSVAVEHSKQQYHLSTSILCGKLGLCMVILTVCLFS

SEQ ID NO: 189614 - protein, 695 aa, Zea Mays
MRAEVKLNNYSLEAVADEVLRRKIPLIPSRILNRWFATGPGRGRHRCIEYISNRARINLEIMNQMDLVNRTSELARVFGIDFFSVLSRGSQYRVESMLLRLAHTQNYLAISPGNQQVASQPAMECLPLVMEPESAFYPDPVVVLDFQSLYPSMIIAYNLCYSTCLGKVFPSKSDVLGVSSYSADPHTLVDLKNQLLLTPNGVLYVQPEIRKGVLPRLLEEILSTRIMVKQAMKKLSPSQQVLHRIFNARQLALKLIANVTYGYTAAGFSGRMPCAELADSIVQCGRRTLETAISFVNQHPLWKARVVYGDTDSMFVLLKGRSREEAFRIGKEIASSITAMNPDPVTLKFEKVYQPCFLLTKKRYVGYSYESPEQNEPVFDAKGIETVRRDTCPAVAKILERSIRIMFEEQDLTKVRTYLERQWTHILSGKVSILDFIFAKEVRLGTYSARASTLPPAAIVATKAMLSDPRAEPRYAERVPYVVIHGEPGARLADMVIDPYGLLEVGSPYRLNEQYYITKQIIPALQRVFGLLGADLNKWFNEMPRPIRSTLAKRQFAAAHGSFSRDGSFIRLGLNNKTSAKGGRIDTYYMSSHCSICGDMIQGSESFCNNCLKSEAVVATVVAGRTSKLEREIQHLAAICGHCGGADWIVESGVKCISLACPVFYERRKVQRELVVVSESAGEAGYYPFCCAELF

SEQ ID NO: 189615 - protein, 82 aa, Zea Mays
MAGRANIPTNNSALIAIIADEDTVTGFLMAGVGNVDLRKKTNYLLVDNKTTVKQIEDAFKEFTTREDIAIVLISQYINLLNL

SEQ ID NO: 189616 - protein, 125 aa, Zea Mays
MACGWLHPVPAGAATVAALWPCFLSPVRQSFTKELNQFQRWKLPLNAAKSQRESWNLADRSSSGSSEGVAAASRPADAPTAQSALPMTRSVDAVPGAPIVISGYWTGPGVDDGCGSVEAVLQRIA

SEQ ID NO: 189617 - protein, 209 aa, Zea Mays
MAYRALEVTLLSAKDLKRVNLISRMEVYAVVSISGDPLTRQCTQPDPYGGRHPSWNTSFRFNVPPTAATATGCLHVLLRTERALGDRDVGEVIVPLADILATAGGASDPGPRPPQLASYQQAAAGPGRNALPAPASEESNGKLDFGVGLGAGLVSGAIGGMLVASDVMMSDAAAYNSGYRAGLADGGAAAVYRSSYRVPDKVEAKRAAV

SEQ ID NO: 189618 - protein, 119 aa, Zea Mays
MAYRALEVTLLSAKDLKRVNLISRMEVYAVQAAAGPGRNALPAPASEESNGKLDFGVGLGAGLVSGAIGGMLVASDVMMSDAAAYNSGYRAGLADGGAAAVYRSSYRVPDKVEAKRAAV

SEQ ID NO: 189619 - protein, 102 aa, Zea Mays
MFCKEEIWFILPSIPSYDTTNKMNWYIQVSLKPFHFQIRMISCSRETIENYCFPSPPVIDGLDPLIILGASVVWKHRNRVVFGRVSSNLTLILESANEESEK

SEQ ID NO: 189620 - protein, 483 aa, Zea Mays
MRRYLSWDRWSGCACATSRRLRLAWKSSLRQKSFSRAIKVVLRTEAESKAFSLAFQQWKHQVISGKAGERLENGSIIASKSKFDTKIEASSAKMYFHYYGQLLHQQNMLQDFVRTGTYYAAVMENRSDFEGRVVVDVGAGSGILSLFAAQAGARHVYAVEASEMAENAQRLMSGNPSLGQRITVIRGKVEEVELPEKADILISEPMGTLLVNERMLESYVIARDRFLAPDGKMFPTTGRIHMAPFSDEYLYVEIANKALFWQQHNFFGVDLTPLHGSAFQGYFSQPVVDAFDPRLLISPPIYHTLDFTSMKEEELYEIDIPLSFVASVGTRVHGLACWFDVLFNGSTVQRWLTTAPGSPTTHWYQLRCVLSQPLYVMAGQEITGRLHLVAHSAQSYTIYLTMSAKMWGVGAEQGGILQTSTGKLELKEPYYRLSQPQSYMLPQDQQQQQQLSSLQPHGSEQQMQEGLSPGITIDQVDKDYGLN

SEQ ID NO: 189621 - protein, 127 aa, Zea Mays
MIGRADIEGSKSNVAMNAWLPQASYPCGNFSDTSSFKLRRSKGSIGHAFTVRIRTGNQNQTSFYPFVPHKISVLVELILGHLRYLLTDVPPQPNSPPDNVFRPDRPGEAGPWSQKEGRCPASDPRNK

SEQ ID NO: 189622 - protein, 94 aa, Zea Mays
MNMHSFNSWVMSMYLKPKYSPARINVTKVSTVNVFFDFISCISFFIIRNIFAALNPLKKHFATIWSFGHIFEKVFYKDGFVAPFNICMCTKFFQ

SEQ ID NO: 189623 - protein, 157 aa, Zea Mays
MSTSSSSSRTKSNFNAVILKRLFMSKTNRPPLSMRRLVRFMEGKGDQIAVIVGTVTDDKRISEVPAMKVCALRFTETARARIINAGGECLTFDQLALRAPLGQNTVLLRGPKNAREAVRHFGPAPGVPHSHTKPYVRSKGRKFEKARGRRNSRGFKV

SEQ ID NO: 189624 - protein, 93 aa, Zea Mays
MPKDKESVSCTAPPPVLECSADRLLQSIQLVLPSRWRIYLPTPMTHCICLIIIIIIIIIIIIIIIIIIIIIIVIVVVVVVVVVVVVVVVVKAA

SEQ ID NO: 189625 - protein, 246 aa, Zea Mays
MEAAGRLPLLIVSSLLLLLSPERPAEAAPRRIQPLATAALSRLYDTSNYGRLQLNNGLALTPQMGWNSWNFFACNINETVIRETADALVSTGLAALGYNFVNIDDCWSYVKRGKQDQLLPDPKTFPSGIKALADYVHGKGLKLGIYSDAGKFTCQVRPGSLGHENDDAAIFASWGIDYLKYDNCYNLGIKPQKRYPPMRDALNSTGRQIFYSLCEWGQYDPALWAGKVGNSWRTTDDITDTWKRHC

SEQ ID NO: 189626 - protein, 70 aa, Zea Mays
MTPICTSFLLQPLSLRFDQDRWIQDDSTAMIQGYVTTTRAFVFPAAFCSTRVQKSTSCRTVSVMFVFLTE

SEQ ID NO: 189627 - protein, 350 aa, Zea Mays
MVSSQPSSLTAILAQGPNHCPVNILLPTGPPDVVSSDNVEYDFSDVFGSTPVQTPTNLCGFGPESPAPTVESNEEFYSDPVVIINRSHSLVGPTSLVSRSLRLSKLSLGKNEGSSELVKCLSEEKEGDQGQLSDEDLGNAMTEDEGIGLDDLEILKLVGQGAFGKVFQVRKKNTSEIYAMKVMRKDRILEKNHSEYMKAEREILTKVDHPFIVQLRYSFQTKYRLYLVLDFINGGHLFFQLYKQGLFREELARIYTAEIVSAVAHLHANGIMHRDLKPENILLDADGHAMLTDFGLAKEFCENTRSNSMCGTLEYMAPEIVLGRGHDKAADWWSVGILLFEMLTAPICWE

SEQ ID NO: 189628 - protein, 261 aa, Zea Mays
MVSSQPSSLTAILAQGPNHCPVNILLPTGPPDVVSSDNVEYDFSDVFGSTPVQTPTNLCGFGPESPAPTVESNEEFYSDPVVIINRSHSLVGPTSLVSRSLRLSKLSLGKNEGSSELVKCLSEEKEGDQGQLSDEDLGNAMTEDEGIGLDDLEILKLVGQGAFGKVFQVRKKNTSEIYAMKVMRKDRILEKNHSEYMKAEREILTKVDHPFIVQLRYSFQTKYRLYLVLDFINGGHLFFQLYKQGLFRSLQESIQLKLYLL

SEQ ID NO: 189629 - protein, 331 aa, Zea Mays
MVSSQPSSLTAILAQGPNHCPVNILLPTGPPDVVSSDNVEYDFSDVFGSTPVQTPTNLCGFGPESPAPTVESNEEFYSDPVVIINRSHSLVGPTSLVSRSLRLSKLSLGKNEGSSELVKCLSEEKEGDQGQLSDEDLGNAMTEDEGIGLDDLEILKLVGQGAFGKVFQVRKKNTSEIYAMKVMRKDRILEKNHSEYMKAEREILTKVDHPFIVQLRYSFQTKYRLYLVLDFINGGHLFFQLYKQGLFSPKTSFWMLMAMPCSQTLALRRNSVKIPDQTRCVALSSTWPRKLFLAGGMIRLLTGGAWESCCLKCLQASPHLLGIGRKFSRRL

SEQ ID NO: 189630 - protein, 255 aa, Zea Mays
MTTTTSARLRPLAVGVALFVFLPWLSYVLEAAEEGRAAAPWFWPPQIGGDDPYYYCLSWRLMVEAGNAKGWRAVPAQCVGYVRVYMAWGQYHRDVGAVAELAAAGADGLIDAWVLDVDDTCLSNQPYYQVKQFGAYDPVAFRAWASWATCPGIPAMQWLFQTLRGRGFRVFLVTGRDEETLGSSTAANLAAAGFSGSAAYRGQSAVAFKSAVRRKLAEEEGYRIRGNVGDQWSDLQGECAGDRVFKVPNPMYLVP

SEQ ID NO: 189631 - protein, 1009 aa, Zea Mays
MGSGGSLLGQLTGAGRPACWIIFDIYVENAIDGRHLSVISAIRIIKEMTKTMQVLNEASWQETFKALWISALRLVQRAREPLEGPIPHLDARLCMLLALIPLSVAAILQEESDMLGAEGNKILPQRQGLISSLQDLIQYSGLLVPPSSVVNAANAAASKAAIFKANYEAGVGNSSMMDQTDSSMKAAGNMLHLIIEACISRKLIDTSAYLWPGYVVPSGTLKDTALPQESPWLNFMKGSRLSGPLIDALVASPASSVAELDKLYSIALNGSEEEKTAAAKILCGASLVRGWNIQEHVVGMVVKLLSASLPSDSATSTPGSMSNYLAHMSTLNEILLGVSYGDAIHILSLYGMVPDVAVALMPICEAFGSIPPPPNHKSTILGEISVYTVFSCAFLCLLRLWKFYRPPQEYCLAGRGGSVKLELTLDYLLLMHNNHIEFSNSSASNRDSCNDMGSVNEVPAQLIYIDSFPKLRAWYFQNQACIASPLSGLCNKNPVHQVANKILNMICRKMNKGVVSSSTLSSTSSSSVSGSSVSASDDPCQRPAVSGWEFLEAVPFVLEAVLTACAHGQLSSRDLTTSLRDLVDFLPASLAAIVSYFSAEITRGIWKPVPMNGIEWPSPGASLHSIEAEVKEILASAGVQINSCYPRGVPPMLPLPMAALVSLTITFKLDRSLEYIQGVIGQALENCAGGSSWPSMPIIGALWTQKVRRWHDFIVLSCMRSPFGRDKDAVAQLIQSCFSSFLQSSSSGSDIIANRGVGALLGDSITNQGLRLPMAPGFIYLRTCRTFHDTYFVSEVILKQVIEWAHKLANGWCFNGPPQLKSGRTPLSCAASMVQQVALLGGGLLCIAGGPLVVQVLYEETLPTLLLSARDQSLKGPGPVSSTLQGYAMANMLFYCGSLLWGADRTSPVMKLSFLSRRPRVVRTHMDFIAGVLDGHILLGCDPGTWKAYVSQFMFLVVKFVPSWLRDIKLDTLKKIAAGLRSWHEHDLALSLLERGGPQAISVVVETFL

SEQ ID NO: 189632 - protein, 1269 aa, Zea Mays
MAAVKASEARGDPPLLQVVELSRIVAVEGAGTLSSADLARILVSNLCFAHNSPSLWKLLGQAVVSRLLCPLHVLALLTPRVLPQRRAQPEAYRLYLELLKCHVTSSLLSMEAGPNRDNKLIDSIFEDCGFPSAMVEGQESVNAIDGPQPMDLDVKMGSTENQNEHREQLRRKNTLIALDVLHMMTADRKIQSFLRLIFLNMPERFSSLRQRLSSIEAQKVSLETLLPSGHKINELLINFWRVCKTDYQPNNKHILGVLGNMGSGGSLLGQLTGAGRPACWIIFDIYVENAIDGRHLSVISAIRIIKEMTKTMQVLNEASWQETFKALWISALRLVQRAREPLEGPIPHLDARLCMLLALIPLSVAAILQEESDMLGAEGNKILPQRQGLISSLQDLIQYSGLLVPPSSVVNAANAAASKAAIFKANYEAGVGNSSMMDQTDSSMKAAGNMLHLIIEACISRKLIDTSAYLWPGYVVPSGTLKDTALPQESPWLNFMKGSRLSGPLIDALVASPASSVAELDKLYSIALNGSEEEKTAAAKILCGASLVRGWNIQEHVVGMVVKLLSASLPSDSATSTPGSMSNYLAHMSTLNEILLGVSYGDAIHILSLYGMVPDVAVALMPICEAFGSIPPPPNHKSTILGEISVYTVFSCAFLCLLRLWKFYRPPQEYCLAGRGGSVKLELTLDYLLLMHNNHIEFSNSSASNRDSCNDMGSVNEVPAQLIYIDSFPKLRAWYFQNQACIASPLSGLCNKNPVHQVANKILNMICRKMNKGVVSSSTLSSTSSSSVSGSSVSASDDPCQRPAVSGWEFLEAVPFVLEAVLTACAHGQLSSRDLTTSLRDLVDFLPASLAAIVSYFSAEITRGIWKPVPMNGIEWPSPGASLHSIEAEVKEILASAGVQINSCYPRGVPPMLPLPMAALVSLTITFKLDRSLEYIQGVIGQALENCAGGSSWPSMPIIGALWTQKVRRWHDFIVLSCMRSPFGRDKDAVAQLIQSCFSSFLQSSSSGSDIIANRGVGALLGDSITNQGLRLPMAPGFIYLRTCRTFHDTYFVSEVILKQVIEWAHKLANGWCFNGPPQLKSGRTPLSCAASMVQQVALLGGGLLCIAGGPLVVQVLYEETLPTLLLSARDQSLKGPGPVSSTLQGYAMANMLFYCGSLLWGADRTSPVMKLSFLSRRPRVVRTHMDFIAGVLDGHILLGCDPGTWKAYVSQFMFLVVKFVPSWLRDIKLDTLKKIAAGLRSWHEHDLALSLLERGGPQAISVVVETFL

SEQ ID NO: 189633 - protein, 1103 aa, Zea Mays
MAAVKASEARGDPPLLQVVELSRIVAVEGAGTLSSADLARILVSNLCFAHNSPSLWKLLGQAVVSRLLCPLHVLALLTPRVLPQRRAQPEAYRLYLELLKCHVTSSLLSMEAGPNRDKIGKSIAEALQLSKVYGFSGTEFGHVVIMFVLAVVSKLIDSIFEDCGFPSAMVEGQESVNAIDGPQPMDLDVKMGSTENQNEHREQLRRKNTLIALDVLHMMTADRKIQSFLRLIFLNMPERFSSLRQRLSSIEAQKVSLETLLPSGHKINELLINFWRVCKTDYQPNNKHILGVLGNMGSGGSLLGQLTGAGRPACWIIFDIYVENAIDGRHLSVISAIRIIKEMTKTMQVLNEASWQETFKALWISALRLVQRAREPLEGPIPHLDARLCMLLALIPLSVAAILQEESDMLGAEGNKILPQRQGLISSLQDLIQYSGLLVPPSSVVNAANAAASKAAIFKANYEAGVGNSSMMDQTDSSMKAAGNMLHLIIEACISRKLIDTSAYLWPGYVVPSGTLKDTALPQESPWLNFMKGSRLSGPLIDALVASPASSVAELDKLYSIALNGSEEEKTAAAKILCGASLVRGWNIQEHVVGMVVKLLSASLPSDSATSTPGSMSNYLAHMSTLNEILLGVSYGDAIHILSLYGMVPDVAVALMPICEAFGSIPPPPNHKSTILGEISVYTVFSCAFLCLLRLWKFYRPPQEYCLAGRGGSVKLELTLDYLLLMHNNHIEFSNSSASNRDSCNDMGSVNEVPAQLIYIDSFPKLRAWYFQNQACIASPLSGLCNKNPVHQVANKILNMICRKMNKEAVPFVLEAVLTACAHGQLSSRDLTTSLRDLVDFLPASLAAIVSYFSAEITRGIWKPVPMNGIEWPSPGASLHSIEAEVKEILASAGVQINSCYPRGVPPMLPLPMAALVSLTITFKLDRSLEYIQGVIGQALENCAGGSSWPSMPIIGALWTQKVRRWHDFIVLSCMRSPFGRDKDAVAQLIQSCFSSFLQSSSSGSDIIANRGVGALLGDSITNQGLRLPMAPGFIYLRTCRTFHDTYFVSEVILKQVIEWAHKLANGWCFNGPPQLKSGRTPLSCAASMVQQRSEFERPWASF

SEQ ID NO: 189634 - protein, 1246 aa, Zea Mays
MAAVKASEARGDPPLLQVVELSRIVAVEGAGTLSSADLARILVSNLCFAHNSPSLWKLLGQAVVSRLLCPLHVLALLTPRVLPQRRAQPEAYRLYLELLKCHVTSSLLSMEAGPNRDKIGKSIAEALQLSKVYGFSGTEFGHVVIMFVLAVVSKLIDSIFEDCGFPSAMVEGQESVNAIDGPQPMDLDVKMGSTENQNEHREQLRRKNTLIALDVLHMMTADRKIQSFLRLIFLNMPERFSSLRQRLSSIEAQKVSLETLLPSGHKINELLINFWRVCKTDYQPNNKHILGVLGNMGSGGSLLGQLTGAGRPACWIIFDIYVENAIDGRHLSVISAIRIIKEMTKTMQVLNEASWQETFKALWISALRLVQRAREPLEGPIPHLDARLCMLLALIPLSVAAILQEESDMLGAEGNKILPQRQGLISSLQDLIQYSGLLVPPSSVVNAANAAASKAAIFKANYEAGVGNSSMMDQTDSSMKAAGNMLHLIIEACISRKLIDTSAYLWPGYVVPSGTLKDTALPQESPWLNFMKGSRLSGPLIDALVASPASSVAELDKLYSIALNGSEEEKTAAAKILCGASLVRGWNIQVPDVAVALMPICEAFGSIPPPPNHKSTILGEISVYTVFSCAFLCLLRLWKFYRPPQEYCLAGRGGSVKLELTLDYLLLMHNNHIEFSNSSASNRDSCNDMGSVNEVPAQLIYIDSFPKLRAWYFQNQACIASPLSGLCNKNPVHQVANKILNMICRKMNKGVVSSSTLSSTSSSSVSGSSVSASDDPCQRPAVSGWEFLEAVPFVLEAVLTACAHGQLSSRDLTTSLRDLVDFLPASLAAIVSYFSAEITRGIWKPVPMNGIEWPSPGASLHSIEAEVKEILASAGVQINSCYPRGVPPMLPLPMAALVSLTITFKLDRSLEYIQGVIGQALENCAGGSSWPSMPIIGALWTQKVRRWHDFIVLSCMRSPFGRDKDAVAQLIQSCFSSFLQSSSSGSDIIANRGVGALLGDSITNQGLRLPMAPGFIYLRTCRTFHDTYFVSEVILKQVIEWAHKLANGWCFNGPPQLKSGRTPLSCAASMVQQVALLGGGLLCIAGGPLVVQVLYEETLPTLLLSARDQSLKGPGPVSSTLQGYAMANMLFYCGSLLWGADRTSPVMKLSFLSRRPRVVRTHMDFIAGVLDGHILLGCDPGTWKAYVSQFMFLVVKFVPSWLRDIKLDTLKKIAAGLRSWHEHDLALSLLERGGPQAISVVVETFL

SEQ ID NO: 189635 - protein, 667 aa, Zea Mays
MCFICFIIIKVPDVAVALMPICEAFGSIPPPPNHKSTILGEISVYTVFSCAFLCLLRLWKFYRPPQEYCLAGRGGSVKLELTLDYLLLMHNNHIEFSNSSASNRDSCNDMGSVNEVPAQLIYIDSFPKLRAWYFQNQACIASPLSGLCNKNPVHQVANKILNMICRKMNKGVVSSSTLSSTSSSSVSGSSVSASDDPCQRPAVSGWEFLEAVPFVLEAVLTACAHGQLSSRDLTTSLRDLVDFLPASLAAIVSYFSAEITRGIWKPVPMNGIEWPSPGASLHSIEAEVKEILASAGVQINSCYPRGVPPMLPLPMAALVSLTITFKLDRSLEYIQGVIGQALENCAGGSSWPSMPIIGALWTQKVRRWHDFIVLSCMRSPFGRDKDAVAQLIQSCFSSFLQSSSSGSDIIANRGVGALLGDSITNQGLRLPMAPGFIYLRTCRTFHDTYFVSEVILKQVIEWAHKLANGWCFNGPPQLKSGRTPLSCAASMVQQVALLGGGLLCIAGGPLVVQVLYEETLPTLLLSARDQSLKGPGPVSSTLQGYAMANMLFYCGSLLWGADRTSPVMKLSFLSRRPRVVRTHMDFIAGVLDGHILLGCDPGTWKAYVSQFMFLVVKFVPSWLRDIKLDTLKKIAAGLRSWHEHDLALSLLERGGPQAISVVVETFL

SEQ ID NO: 189636 - protein, 568 aa, Zea Mays
MKAQPLLLPALKRRRGPRVAVLALVLCSLLVPLAFLFDRAPSGYVTTEERHRQEVVLPLLDHVAEKRRPSGSGADTRQDALEKKVPGSSAGVIHQQTPDKNISKVIRQQTPEKTISKGSAGVVHQYKQIGSHSTSDGAKPKVSPAPKVEPSDAVSDSTKVARDTSQEGEKADEVEKSKSCQLEFGSYCLWSIEHKEVMKDYTVKRLKDQLFVARSYYPSIAKLQGQEALTQEMKQNIQDHEKILSVSTVDADLPSSINRRMKQMEQTIVRAKSCTVDCRSVDRKLRQILYMTEDEAHFHMQQSAFLYNLGAQTLPKSHHCLSMRFSSPEYRHFVILSRNVLAASVAINSTVSSCKEPGYFAFHILTDAQNFYAMKHCHSHFVIPEIFKYLNKVVVLDDDVVVQRDLSFLWNIDMGDKVNGAVELCGLKLGEMKNVLGKTAYDPKSCAWMSGVNLINLDKWREHNVTENYLRLMKKFEVKDELSLRAAAFPLSLLSFQHLIYPLDEKLTLAGLGYDYGIDEEVARRSASLHYNGNMKPWLELGIPEYKKYWKRFLVRGDRFMDECNVNP

SEQ ID NO: 189637 - protein, 656 aa, Zea Mays
MVHEALVTSGIKTGIYHGQMGSRAREESHRSFIRDEVLVMVATIAFGMGIDKPDVRCVIHYGCPKSLESYYQESGRCGRDGLPSICWLYYQRSDITKADFYCSEAKNETQRKAIMDSFMAAQKYCLLATCRRRFLLQYFGEEWNIDCGNCDNCTAVKNERDLSKEVFLLLSCIKSCGGRWGLNLPIDVLRGSRAKKIVDNNYDKLQMHGRGKDYSSNWWKALGGLLIAHDYLKETVRDTFRFVSVSPKGVKFLSTADKIDGAPLVFQLTAEMIELEEHGSSHHKEGGLNLVPTLESEKFSEDESKLYQRLLNVRMKIAQDIGTAPYAVCGDQTIRNFAKMRPSTGARLANIDGVNQHFISRFSNIFIQNIAELSKELNLPLDNSPFPPPPPTNPAAENIAGIPKPVQNNLPGILGDAKLTAWELWHKQEYSFLKIAYFRRAVPIKEQTVIAYILDAAREGCEMDWSRFCREVGLTPDIATAIRLAISKVGSREKMKPIKEELPENVTYDMIKTFLTIEGCGLSEQVFGNGTADGVSSRIAESPISSCHASEAGGNGVPAAAEASDANPSAKRGQTVCAEEPATKLQRTYEHGAELTGTATATVDSVLDLVASCNGVSLEDVAKHFKGSKRESVLEILEGLESEFTIYKKNGNYMVL

SEQ ID NO: 189638 - protein, 390 aa, Zea Mays
MKDYTVKRLKDQLFVARSYYPSIAKLQGQEALTQEMKQNIQDHEKILSVSTVDADLPSSINRRMKQMEQTIVRAKSCTVDCRSVDRKLRQILYMTEDEAHFHMQQSAFLYNLGAQTLPKSHHCLSMRLTLEYFKSSSLDSDDSPGRFSSPEYRHFVILSRNVLAASVAINSTVSSCKEPGYFAFHILTDAQNFYAMKHCHSHFVIPEIFKYLNKVVVLDDDVVVQRDLSFLWNIDMGDKVNGAVELCGLKLGEMKNVLGKTAYDPKSCAWMSGVNLINLDKWREHNVTENYLRLMKKFEVKDELSLRAAAFPLSLLSFQHLIYPLDEKLTLAGLGYDYGIDEEVARRSASLHYNGNMKPWLELGIPEYKKYWKRFLVRGDRFMDECNVNP

SEQ ID NO: 189639 - protein, 362 aa, Zea Mays
MKAQPLLLPALKRRRGPRVAVLALVLCSLLVPLAFLFDRAPSGYVTTEERHRQEVVLPLLDHVAEKRRPSGSGADTRQDALEKKVPGSSAGVIHQQTPDKNISKVIRQQTPEKTISKGSAGVVHQYKQIGSHSTSDGAKPKVSPAPKVEPSDAVSDSTKVARDTSQEGEKADEVEKSKSCQLEFGSYCLWSIEHKEVMKDYTVKRLKDQLFVARSYYPSIAKLQGQEALTQEMKQNIQDHEKILSVSTVDADLPSSINRRMKQMEQTIVRAKSCTVDCRSVDRKLRQILYMTEDEAHFHMQQSAFLYNLGAQTLPKSHHCLSMRFSSPEYRHFVILSRNVLAASVAINSTVSSCKATLLFIS

SEQ ID NO: 189640 - protein, 277 aa, Zea Mays
MEHRKVTINYLLGNLGKTYADTVGVVDLGGGSVQMAYAIAEKDAEKAPKPSDGEDAYVKKLFLKGTTYYLYVHSYLHYGLLAARAEVLKAGNGNGYSNCMLEGFQGQYKYGDNSFEASASPSGASYSKCKDDAVKALKVDEACTHMKCSFGGIWNGGGGAGQNNLFVASFFFDRAAEAGFVNANAPVAKVKPSDFRQAAERACSLSVKNAEATFPGVQKDNIPYICMDLVYQYTLLVHGFGVDPDHEMTLVKKVPYSGAYVEAAWPLGSAIEVASSS

SEQ ID NO: 189641 - protein, 219 aa, Zea Mays
MAYAIAEKDAEKAPKPSDGEDAYVKKLFLKGTTYYLYVHSYLHYGLLAARAEVLKAGNGNGYSNCMLEGFQGQYKYGDNSFEASASPSGASYSKCKDDAVKALKVDEACTHMKCSFGGIWNGGGGAGQNNLFVASFFFDRAAEAGFVNANAPVAKVKPSDFRQAAERACSLSVKNAEATFPGVQKDNIPYICMDLVYQYTLLVHGFGIDLIEIEQNKSE

SEQ ID NO: 189642 - protein, 269 aa, Zea Mays
MCPQQSQLPEVVYLELWEHVVVEAAAKHGRHRRRQAAGRLRRVVEAGATVEPLGRRRLVLVGSGGALVSWAHVHRHHRLALPACCGGRGRREHHEIGAVVADGQELVEGRVHGERGVVGGHVGRGVQDLRERVLVPQQLGDGGDLGEPRQRRRLLVLLHDDGRRRSSVCSTSSSSTAADGRRGGGVQAGAAAEVVVEEAAGRRSVAVEVLVVGERRHHRRRVAGLLVDPAQHPVVQLHATTTPARACKQGNVIVVVTVMAVAVNAYSQL

SEQ ID NO: 189643 - protein, 156 aa, Zea Mays
MARRYTSSFPHLPPCSTFVASLQAKALWGPFATWGTNQRGRLASARSSWPRDHAVGCTGSTDCPICVLARLVARSYSSRKDVLFASRAFSASGNQTLLSLKLVCCVIEQKEENYRLLQYSWKKYFHCWTMGYLISRISGLLIKYHNVLLGLCFYAA

SEQ ID NO: 189644 - protein, 276 aa, Zea Mays
MADALCNGVVASPCGRDVAGRARGAARAALAESLQVAGHASKTSFSAGRMSVKDSKPRPLSRSLEAAAPGQVGFGSPLQLFVCLSCCLLLGIFLVFAHAVPVFLFHLQDSPIFFRFSSRRENNLALTIFSLSLSLLFAQPLNLFLLAAADEPVVPQSHAVVEEGAAPQHARGRVRAGPGRLAAQRRRQARGRRLLLPRLRRLPRPPPQDRPVRREEPGRAVLAGELRDAQVHVLQPPRPRPPFLQVLPGSRGPGQQLQLHQRNDQQVQGRARQARG

SEQ ID NO: 189645 - protein, 209 aa, Zea Mays
MNLNAMHVATCCCCVVCSGQVTSGIIHPSIGLASDGVSSALGRKWRPHRPRRPNGGHRVSPSETSISADRPTARPPASFSNQQSARSRQHSTERAAATHPLHSSPYCSCHRQTSVQAQVINLLYFSGMKETVRLRPIRSRCVCVKRRHTPPVKSVYQRPIWRLELCWIGGSRALAVTLKAGRRMTQHTLQFSAPGHLSHLQREGTEPRS

SEQ ID NO: 189646 - protein, 161 aa, Zea Mays
METPELAAVHVLLLTMHGIGCYLDRRRRMHAAVPSISVYVFFSECLSALAVRPSGVDQKKEAKNSIPAVCVCLLYRERQTDTHKQIECTYDASTSNIYTKHYPSIHRAGIGRRVERTRPQVATSPPAPAKWRPPRVSFRDLYLCRPTDRPPARQLQQSAIS

SEQ ID NO: 189647 - protein, 523 aa, Zea Mays
MPTFPRAGRWSTSSTWPRKTAGAASTALAAVVFAVLDVADVILCFAYALLDGVLEDSPVRCYCHRSYDDGIREAAAGASVDGGGHEEVSDTLYACGRRSTVRDALLGLVRRVVPRTRRTRAPPDETVAPCKWRSPRWSDCACKSCVAWRCGEEGGGRLHVVVKEPGPKDAAAAGTTTRAPDPENAIFVHGFASSSSFWSETVFRESSCILDGCRLFAVDLLGFGRSPKPANCMYRVRDHVEAIERTLILAGDGESQSLMSSFHLVSHSMGCTIALALAAKHPTRVKSITLVAPRASQVALNRLAEKKLWPPLLFGSAVMSWYEHVGRTVCFLVCKNHLLWEWLFSLLNLNRGVDFRVRDLTKHTHHSAWHTMHNVICGGAALQDANLEAVAAAGIPVQVLHGADDQVVPVECGRHVKAKIPRAKLRVMERRDHSTVVLGRERGFAEELKAFWCASRSPVHVQDAEQQETLDISSPSKDSKIIQHDNTSVPTILARRLRIDLCISSLQQELRAIMQQVLEFPFA

SEQ ID NO: 189648 - protein, 473 aa, Zea Mays
MLLSQSLKACQSWSTNYVQMTPPVSSKPQSSSGNFFQMNSTVIKIIRADVLPRFAEFLSRHGLPQLQMEAAWVLTNIAASDYTLLVAECGAVPRLVELLGSLNANIRHQAIWCLGNIAADLPSCRGILFDHGALTPLLSQFREGMKIPVLRTAMWALSNLCFGKLPAEVQVKPILEIISQLIHSADEKILADACWTVYYICGDKGDAVQDVLDAGVCPQLVNLLMHASANVLLPVIMALARISAGDDKQVEVLIENDILNCLGQLVARNYPKNIKKQACLIVSNIAAGSKDQIQAVIDADIITSLIVLLRTSEPDVKKEAAWAISTAASGGSSDQIQYLVSRGCLEPLCSVLTHNDPDLVYTCLEGLENILHAGEAGKKGEESGTNPYAEFILECGGLEKLEDLQDVDSDRIYELAMKLLQSYWEEEVSESDDPNIPGSNDSSDTVEATSEDAAAAVQPPPVPPPPSAADEAE

SEQ ID NO: 189649 - protein, 254 aa, Zea Mays
MLLSQSLKACQSWSTNYVQMTPPVSSKPQSSSGNFFQMNSTVIKIIRADVLPRFAEFLSRHGLPQLQMEAAWVLTNIAASDYTLLVAECGAVPRLVELLGSLNANIRHQAIWCLGNIAADLPSCRGILFDHGALTPLLSQFREGMKIPVLRTAMWALSNLCFGKLPAEVQVKPILEIISQLIHSADEKILADACWTVYYICGDKGDAVQDVLDAGVCPQLVNLLMHASANVLLPVIMALARISAGDDKQVEVAL

SEQ ID NO: 189650 - protein, 248 aa, Zea Mays
MLLSQSLKACQSWSTNYVQMTPPVSSKPQSKKNSTVIKIIRADVLPRFAEFLSRHGLPQLQMEAAWVLTNIAASDYTLLVAECGAVPRLVELLGSLNANIRHQAIWCLGNIAADLPSCRGILFDHGALTPLLSQFREGMKIPVLRTAMWALSNLCFGKLPAEVQVKPILEIISQLIHSADEKILADACWTVYYICGDKGDAVQDVLDAGVCPQLVNLLMHASANVLLPVIMALARISAGDDKQVEVAL

SEQ ID NO: 189651 - protein, 173 aa, Zea Mays
MPRAPRRQSDEARRGAYKPRVDFSRSRRRREDGLLALRRLNRDTGLFKRRRDEPAPAVPASDLTPTRAEAAPFAGITRPAFTPSSPPDVAAPRDAAESELEGLSELVDKLCSDDTTSQLEATIQFRKLLSDEKNSTVIKIIRADVLPRFAEFLSRHGLPQLQNAVLFQGWWNY

SEQ ID NO: 189652 - protein, 55 aa, Zea Mays
MLLHDSRSEDGIKSFFQEVHELYIKIFLNPLYLPGSRITSSHFDTKVRALARKYL

SEQ ID NO: 189653 - protein, 484 aa, Zea Mays
MTPGKFQSREIDSSKIVSHDKQSEVWEKDVAPNANEASSEVANILPLMWMHPGKHDILLSDCRELWDSRQTINPPVSDEVLCKEKHSERIKFFCLDSGNDQEQTTQEKDNFIRSCPVILLKHAREGIPSLGWSIILPLSWVKPFWLFLVSHGAHAIGLRERRWIAAKLRMPCFPYDYPDSKAYASYMSKEAAGFDKVVERRPVAKRPPRVPVPPLWHCIMTCFRKDYDGILGVLEVDDLVRANMVLPKNSSAHCESGDAEPSQANVASLQLHVPRTTQMLRQYVEEFDRKYLSSSSDMKVDSDEPNLASDNTVGMTRFASELCLTRVLIRAFKEGSFEEGAVVCAPLPAELSAWKIRSKEEEEECVEKWELQLPQSHVSSYFSWFDPSTSSLQLPTDGVAREAFRWPIGFVTSGFIHGSNGQDAVAVAFCEAKLLAALRRQQWTHGNLQSREVCVLVRNARSAAYRRALATTVLEHQESDLAFL

SEQ ID NO: 189654 - protein, 619 aa, Zea Mays
MHSQIVGPVTYMWRPFSRADDKSGIEGDQCTSHCIHDESGNSSRRQLWIWIHPAALDDGISAIQFACERQIQDSGGVVKCCSLEGKIGRLEVNGCKAMQSLKKILHPTSSSKINTISTSDISASTDTLLDSCIAPHLLKASVISNAEILQPGAILSMSEVWEKDVAPNANEASSEVANILPLMWMHPGKHDILLSDCRELWDSRQTINPPVSDEVLCKEKHSERIKFFCLDSGNDQEQTTQEKDNFIRSCPVILLKHAREGIPSLGWSIILPLSWVKPFWLFLVSHGAHAIGLRERRWIAAKLRMPCFPYDYPDSKAYASYMSKEAAGFDKVVERRPVAKRPPRVPVPPLWHCIMTCFRKDYDGILGVLEVDDLVRANMVLPKNSSAHCESGDAEPSQANVASLQLHVPRTTQMLRQYVEEFDRKYLSSSSDMKVDSDEPNLASDNTVGMTRFASELCLTRVLIRAFKEGSFEEGAVVCAPLPAELSAWKIRSKEEEEECVEKWELQLPQSHVSSYFSWFDPSTSSLQLPTDGVAREAFRWPIGFVTSGFIHGSNGQDAVAVAFCEAKLLAALRRQQWTHGNLQSREVCVLVRNARSAAYRRALATTVLEHQESDLAFL

SEQ ID NO: 189655 - protein, 385 aa, Zea Mays
MAGVPPPPRQLDVRRFAAARASELRSLYAAVSSRLDDAGGRHQPRSARRRTTGHLPSKRRRRGAGEVGPGDDDGLPARKQSRRVRRRRELAANPAEGFSVAGDGARRLRTHLWYAKRFSMERRWTFILPVGAQGRGKGSRSVLKRLKNGTTIHDAGYFIPIELDGPEDALLSVLRMVLRPSPAEKTPDLKHLQDQVMRGVCYENAMLWDVRSMHSQIVGPVTYMWRPFSRADDKSGIEGDQCTSHCIHDESGNSSRRQLWIWIHPAALDDGISAIQFACERQIQDSGGVVKCCSLEGKIGRLEVNGCKAMQSLKKILHPTSSSKINTISTSDISASTDTLLDSCIAPHLLKASVISNAEILQPGAILSMVVHDPREVSVKGNRFF

SEQ ID NO: 189656 - protein, 792 aa, Zea Mays
MAGVPPPPRQLDVRRFAAARASELRSLYAAVSSRLDDAGGRHQPRSARRRTTGHLPSKRRRRGAGEVGPGDDDGLPARKQSRRVRRRRELAANPAEGFSVAGDGARRLRTHLWYAKRFSMERRWTFILPVGAQGRGKGSRSVLKRLKNGTTIHDAGYFIPIELDGPELWDVRSMHSQIVGPVTYMWRPFSRADDKSGIEGDQCTSHCIHDESGNSSRRQLWIWIHPAALDDGISAIQFACERQIQDSGGVVKCCSLEGKIGRLEVNGCKAMQSLKKILHPTSSSKINTISTSDISASTDTLLDSCIAPHLLKASVISNAEILQPGAILSMSEVWEKDVAPNANEASSEVANILPLMWMHPGKHDILLSDCRELWDSRQTINPPVSDEVLCKEKHSERIKFFCLDSGNDQEQTTQEKDNFIRSCPVILLKHAREGIPSLGWSIILPLSWVKPFWLFLVSHGAHAIGLRERRWIAAKLRMPCFPYDYPDSKAYASYMSKEAAGFDKVVERRPVAKRPPRVPVPPLWHCIMTCFRKDYDGILGVLEVDDLVRANMVLPKNSSAHCESGDAEPSQANVASLQLHVPRTTQMLRQYVEEFDRKYLSSSSDMKVDSDEPNLASDNTVGMTRFASELCLTRVLIRAFKEGSFEEGAVVCAPLPAELSAWKIRSKEEEEECVEKWELQLPQSHVSSYFSWFDPSTSSLQLPTDGVAREAFRWPIGFVTSGFIHGSNGQDAVAVAFCEAKLLAALRRQQWTHGNLQSREVCVLVRNARSAAYRRALATTVLEHQESDLAFL

SEQ ID NO: 189657 - protein, 315 aa, Zea Mays
MPCFPYDYPDSKAYASYMSKEAAGFDKVVERRPVAKRPPRVPVPPLWHCIMTCFRKDYDGILGVLEVDDLVRANMVLPKNSSAHCESGDAEPSQANVASLQLHVPRTTQMLRQYVEEFDRKYLSSSSDMKVDSDEPNLASDNTVGMTRFASELCLTRVLIRAFKEGSFEEGAVVCAPLPAELSAWKIRSKEEEEECVEKWELQLPQSHVSSYFSWFDPSTSSLQLPTDGVAREAFRWPIGFVTSGFIHGSNGQDAVAVAFCEAKLLAALRRQQWTHGNLQSREVCVLVRNARSAAYRRALATTVLEHQESDLAFL

SEQ ID NO: 189658 - protein, 298 aa, Zea Mays
MSKEAAGFDKVVERRPVAKRPPRVPVPPLWHCIMTCFRKDYDGILGVLEVDDLVRANMVLPKNSSAHCESGDAEPSQANVASLQLHVPRTTQMLRQYVEEFDRKYLSSSSDMKVDSDEPNLASDNTVGMTRFASELCLTRVLIRAFKEGSFEEGAVVCAPLPAELSAWKIRSKEEEEECVEKWELQLPQSHVSSYFSWFDPSTSSLQLPTDGVAREAFRWPIGFVTSGFIHGSNGQDAVAVAFCEAKLLAALRRQQWTHGNLQSREVCVLVRNARSAAYRRALATTVLEHQESDLAFL

SEQ ID NO: 189659 - protein, 744 aa, Zea Mays
MKATSFEVISTLREVLRTSSLWKDHVQTYTQHIGDFNYQRLADFGAAISGANKLLCQEVLEELDVYKRLKLTLELVKKEMEISKLQQSIAKAIEEKISGDQRRYLLNEQLKAIKKELGLETDDKTALSAKFRERIESKKDKCPPHVLQVIEEELTKLQLLEASSSEFSVTRNYLDWLTVLPWGNYSDENFDVHHAQKILDEDHYGLSDVKERILEFIAVGKLRGTSQGKIICLSGPPGVGKTSIGRSIARALNRQFYRFSVGGLADVAEIKGHRRTYVGAMPGKMVQCLKSVGTANPLVLIDEIDKLGKGHSGDPASALLELLDPEQNVNFLDHYLDVPIDLSKVLFVCTANVIEMIPNPLLDRMEIIAIAGYITDEKMHIARDYLEKNTRQACGIKPEQVEVTDTALLALIENYCREAGVRNLQKQIEKIYRKIALQLVRQGVSNEPDHESVSASVTEESGNGDNTTTKDEILKDPAVEDASVTNNVTNPASEEANEENLTSEAAKEDSTSKGNKGTDGAADKAIEKVVVDSSNLGDFVGKPVFQAERIYEHTPVGVVMGLAWTAMGGSTLYIETKKVEEREGKGALVLTGQLGDVMKESAQIAHTVGRAVLLEKEPDNHFFANSKVHLHVPAGSTPKDGPSAGCTMITSMLSLAMGKPVKKDLAMTGEVTLTGRILPIGGVKEKTIAARRSAIKTLIFPAANKRDFDELASNVKEGLEVHFVDTYSEIYDLAFQSDAGTETS

SEQ ID NO: 189660 - protein, 678 aa, Zea Mays
MLRAAAAAAAIFPARFAAAPAVAAAEELRSPLLRVIGTLRDGRGSVLLGRRVRFCSNSSASDTEAAVAEAEAKAEDASAAEGEADSKASSAIVPTSTNIDDCLSVIALPLPHRPLFPGFYMPINVKDQKLLQALIENRKRSAPYAGAFLVKDEEGTDPNIVTGSDSAKSIDDLKGKDLLKRLHEVGTLAQITSIQGDHVVLLGHRRLRITEMVEEDPLTVKVDHLKEKPYNKDDDVMKATSFEVISTLREVLRTSSLWKDHVQTYTQHIGDFNYQRLADFGAAISGANKLLCQEVLEELDVYKRLKLTLELVKKEMEISKLQQSIAKAIEEKISGDQRRYLLNEQLKAIKKELGLETDDKTALSAKFRERIESKKDKCPPHVLQVIEEELTKLQLLEASSSEFSVTRNYLDWLTVLPWGNYSDENFDVHHAQKILDEDHYGLSDVKERILEFIAVGKLRGTSQGKIICLSGPPGVGKTSIGRSIARALNRQFYRFSVGGLADVAEIKGHRRTYVGAMPGKMVQCLKSVGTANPLVLIDEIDKLGKGHSGDPASALLELLDPEQNVNFLDHYLDVPIDLSKVLFVCTANVIEMIPNPLLDRMEIIAIAGYITDEKMHIARDYLEKNTRQACGIKPEQVEVTDTALLALIENYCREAGVRNLQKQIEKIYRKVCKITSAY

SEQ ID NO: 189661 - protein, 127 aa, Zea Mays
MAHANIYHHICLSPFPSLGSIQSRGGRRRRRREEMADGSSNSSASVAMGQEVQAFVENKYGGMVPKKPLISKDQERAYFDSADWVLGKQAANSGTARAATAIEFLKPKLKRTPHHQLPPRKPTCASS

SEQ ID NO: 189662 - protein, 128 aa, Zea Mays
MAHANIYHHICLSPFPSLGSIHRSRGGRRRRRREEMADGSSNSSASVAMGQEVQAFVENKYGGMVPKKPLISKDQERAYFDSADWVLGKQAANSGTARAATAIEFLKPKLKRTPHHQLPPRKPTCASS

SEQ ID NO: 189663 - protein, 91 aa, Zea Mays
MADGSSNSSASVAMGQEVQAFVENKYGGMVPKKPLISKERAYFDSADWVLGKQAANSGTARAATAIEFLKPKLKRTPHHQLPPRKPTCASS

SEQ ID NO: 189664 - protein, 65 aa, Zea Mays
MVPKKPLISKDQERAYFDSADWVLGKQAANSGTARAATAIEFLKPKLKRTPHHQLPPRKPTCASS

SEQ ID NO: 189665 - protein, 638 aa, Zea Mays
MTRCGRCRQCECAGASTTTSHGDARNRDNDAPDAVLEGLAMAGLVDILRQLGDLAELAAEVFDDMQDQVMAASARGRRLAARARKLLAADLDLVLDLDLPPPSTQEHRCLSSAAAATALATSGGAGRLGCRSYLGGAPPMPRVVVQRIERCRGPPRLSLLDKYIWPLIYDTMTCSAAACLISAPKSQLQCPIHAGTVVLRCRFDAAGDGACLKRYTDPSFFFRAHSAKIDEQGTLKQHRRQAEAAAAAGAAGSMFLLMQQTAAHRVEQPNMEQKLQEGSTAQPSPSELERTSSFEAWLSPQARRFPTATAATTHHHLQEPPDDDDGGGGGGATTCSGSISSQVDTTSNAAAVSSSSTVKAVRLNSASLVKGGESNTTRSRYKGKIASRVSSLPRKLFMNTTKHHNDHSRSFRAGSSSLRVTQATDIGDCSPELEAIAVAIPTPDADRCSNSNSSTPETCTAADSKNLLLLLPGSGPVLEPPDNSSAAAAEDAKVHTPLAPIPPMQWLSEKGTPPASPKHRTPCFQQQFGSSGQSDEKPSQEHEASDHSSNLLQESVFFSAAQELAKMSPPPPWVPRPKYPLLDVKAVKLRNGPSPIHPSRNILDSRSAQIKDIAIVSAFSFPASRFKLNCHHAWLWLY

SEQ ID NO: 189666 - protein, 684 aa, Zea Mays
MTRCGRCRQCECAGASTTTSHGDARNRDNDAPDAVLEGLAMAGLVDILRQLGDLAELAAEVFDDMQDQVMAASARGRRLAARARKLLAADLDLVLDLDLPPPSTQEHRCLSSAAAATALATSGGAGRLGCRSYLGGAPPMPRVVVQRIERCRGPPRLSLLDKYIWPLIYDTMTCSAAACLISAPKSQLQCPIHAGTVVLRCRFDAAGDGACLKRYTDPSFFFRAHSAKIDEQGTLKQHRRQAEAAAAAGAAGSMFLLMQQTAAHRVEQPNMEQKLQEGSTAQPSPSELERTSSFEAWLSPQARRFPTATAATTHHHLQEPPDDDDGGGGGGATTCSGSISSQVDTTSNAAAVSSSSTVKAVRLNSASLVKGGESNTTRSRYKGKIASRVSSLPRKLFMNTTKHHNDHSRSFRAGSSSLRVTQATDIGDCSPELEAIAVAIPTPDADRCSNSNSSTPETCTAADSKNLLLLLPGSGPVLEPPDNSSAAAAEDAKVHTPLAPIPPMQWLSEKGTPPASPKHRTPCFQQQFGSSGQSDEKPSQEHEASDHSSNLLQESVFFSAAQELAKMSPPPPWVPRPKYPLLDVKAVKLRNGPSPIHPSRNILDSRSAQIKDIAISSKLKPASRASSHVTGTGSPTNATILNRADGIREPLRLRDFKHRILKYLQTARAWTFTYQLYSYQGLLS

SEQ ID NO: 189667 - protein, 598 aa, Zea Mays
MTRCGRCRQCECAGASTTTSHGDARNRDNDAPDAVLEGLAMAGLVDILRQLGDLAELAAEVFDDMQDQVMAASARGRRLAARARKLLAADLDLVLDLDLPPPSTQEHRCLSSAAAATALATSGGAGRLGCRSYLGGAPPMPRVVVQRIERCRGPPRLSLLDKFDAAGDGACLKRYTDPSFFFRAHSAKIDEQGTLKQHRRQAEAAAAAGAAGSMFLLMQQTAAHRVEQPNMEQKLQEGSTAQPSPSELERTSSFEAWLSPQARRFPTATAATTHHHLQEPPDDDDGGGGGGATTCSGSISSQVDTTSNAAAVSSSSTVKAVRLNSASLVKGGESNTTRSRYKGKIASRVSSLPRKLFMNTTKHHNDHSRSFRAGSSSLRVTQATDIGDCSPELEAIAVAIPTPDADRCSNSNSSTPETCTAADSKNLLLLLPGSGPVLEPPDNSSAAAAEDAKVHTPLAPIPPMQWLSEKGTPPASPKHRTPCFQQQFGSSGQSDEKPSQEHEASDHSSNLLQESVFFSAAQELAKMSPPPPWVPRPKYPLLDVKAVKLRNGPSPIHPSRNILDSRSAQIKDIAIVSAFSFPASRFKLNCHHAWLWLY

SEQ ID NO: 189668 - protein, 340 aa, Zea Mays
MTRCGRCRQCECAGASTTTSHGDARNRDNDAPDAVLEGLAMAGLVDILRQLGDLAELAAEVFDDMQDQVMAASARGRRLAARARKLLAADLDLVLDLDLPPPSTQEHRCLSSAAAATALATSGGAGRLGCRSYLGGAPPMPRVVVQRIERCRGPPRLSLLDKFDAAGDGACLKRYTDPSFFFRAHSAKIDEQGTLKQHRRQAEAAAAAGAAGSMFLLMQQTAAHRVEQPNMEQKLQEGSTAQPSPSELERTSSFEAWLSPQARRFPTATAATTHHHLQEPPDDDDGGGGGGATTCSGSISSQVDTTSNAAAVSSSSTVKAVRLNSASLVKGGESNTTRSR

SEQ ID NO: 189669 - protein, 607 aa, Zea Mays
MTRCGRCRQCECAGASTTTSHGDARNRDNDAPDAVLEGLAMAGLVDILRQLGDLAELAAEVFDDMQDQVMAASARGRRLAARARKLLAADLDLVLDLDLPPPSTQEHRCLSSAAAATALATSGGAGRLGCRSYLGGAPPMPRVVVQRIERCRGPPRLSLLDKFDAAGDGACLKRYTDPSFFFRAHSAKIDEQGTLKQHRRQAEAAAAAGAAGSMFLLMQQTAAHRVEQPNMEQKLQEGSTAQPSPSELERTSSFEAWLSPQARRFPTATAATTHHHLQEPPDDDDGGGGGGATTCSGSISSQVDTTSNAAAVSSSSTVKAVRLNSASLVKGGESNTTRSRYKGKIASRVSSLPRKLFMNTTKHHNDHSRSFRAGSSSLRVTQATDIGDCSPELEAIAVAIPTPAADSKNLLLLLPGSGPVLEPPDNSSAAAAEDAKVHTPLAPIPPMQWLSEKGTPPASPKHRTPCFQQQFGSSGQSDEKPSQEHEASDHSSNLLQESVFFSAAQELAKMSPPPPWVPRPKYPLLDVKAVKLRNGPSPIHPSRNILDSRSAQIKDIAISSKLKPASRASSHVTGTGSPTNATILNRADGIRQVHDDETDQIWSDDTQ

SEQ ID NO: 189670 - protein, 622 aa, Zea Mays
MTRCGRCRQCECAGASTTTSHGDARNRDNDAPDAVLEGLAMAGLVDILRQLGDLAELAAEVFDDMQDQVMAASARGRRLAARARKLLAADLDLVLDLDLPPPSTQEHRCLSSAAAATALATSGGAGRLGCRSYLGGAPPMPRVVVQRIERCRGPPRLSLLDKFDAAGDGACLKRYTDPSFFFRAHSAKIDEQGTLKQHRRQAEAAAAAGAAGSMFLLMQQTAAHRVEQPNMEQKLQEGSTAQPSPSELERTSSFEAWLSPQARRFPTATAATTHHHLQEPPDDDDGGGGGGATTCSGSISSQVDTTSNAAAVSSSSTVKAVRLNSASLVKGGESNTTRSRYKGKIASRVSSLPRKLFMNTTKHHNDHSRSFRAGSSSLRVTQATDIGDCSPELEAIAVAIPTPDADRCSNSNSSTPETCTAADSKNLLLLLPGSGPVLEPPDNSSAAAAEDAKVHTPLAPIPPMQWLSEKGTPPASPKHRTPCFQQQFGSSGQSDEKPSQEHEASDHSSNLLQESVFFSAAQELAKMSPPPPWVPRPKYPLLDVKALRNGPSPIHPSRNILDSRSAQIKDIAISSKLKPASRASSHVTGTGSPTNATILNRADGIRQVHDDETDQIWSDDTQ

SEQ ID NO: 189671 - protein, 595 aa, Zea Mays
MTRCGRCRQCECAGASTTTSHGDARNRDNDAPDAVLEGLAMAGLVDILRQLGDLAELAAEVFDDMQDQVMAASARGRRLAARARKLLAADLDLVLDLDLPPPSTQEHRCLSSAAAATALATSGGAGRLGCRSYLGGAPPMPRVVVQRIERCRGPPRLSLLDKFDAAGDGACLKRYTDPSFFFRAHSAKIDEQGTLKQHRRQAEAAAAAGAAGSMFLLMQQTAAHRVEQPNMEQKLQEGSTAQPSPSELERTSSFEAWLSPQARRFPTATAATTHHHLQEPPDDDDGGGGGGATTCSGSISSQVDTTSNAAAVSSSSTVKAVRLNSASLVKGGESNTTRSRYKGKIASRVSSLPRKLFMNTTKHHNDHSRSFRAGSSSLRVTQATDIGDCSPELEAIAVAIPTPGSGPVLEPPDNSSAAAAEDAKVHTPLAPIPPMQWLSEKGTPPASPKHRTPCFQQQFGSSGQSDEKPSQEHEASDHSSNLLQESVFFSAAQELAKMSPPPPWVPRPKYPLLDVKAVKLRNGPSPIHPSRNILDSRSAQIKDIAISSKLKPASRASSHVTGTGSPTNATILNRADGIRQVHDDETDQIWSDDTQ

SEQ ID NO: 189672 - protein, 652 aa, Zea Mays
MTRCGRCRQCECAGASTTTSHGDARNRDNDAPDAVLEGLAMAGLVDILRQLGDLAELAAEVFDDMQDQVMAASARGRRLAARARKLLAADLDLVLDLDLPPPSTQEHRCLSSAAAATALATSGGAGRLGCRSYLGGAPPMPRVVVQRIERCRGPPRLSLLDKFDAAGDGACLKRYTDPSFFFRAHSAKIDEQGTLKQHRRQAEAAAAAGAAGSMFLLMQQTAAHRVEQPNMEQKLQEGSTAQPSPSELERTSSFEAWLSPQARRFPTATAATTHHHLQEPPDDDDGGGGGGATTCSGSISSQVDTTSNAAAVSSSSTVKAVRLNSASLVKGGESNTTRSRYKGKIASRVSSLPRKLFMNTTKHHNDHSRSFRAGSSSLRVTQATDIGDCSPELEAIAVAIPTPDRCSNSNSSTPETCTAADSKNLLLLLPGSGPVLEPPDNSSAAAAEDAKVHTPLAPIPPMQWLSEKGTPPASPKHRTPCFQQQFGSSGQSDEKPSQEHEASDHSSNLLQESVFFSAAQELAKMSPPPPWVPRPKYPLLDVKAVKLRNGPSPIHPSRNILDSRSAQIKDIAISSKLKPASRASSHVTGTGSPTNATILNRADGIRQRTAEAQRFQTQDFKISSDRTSMDVHLSVIFLSGLVKLEVFLFNFE

SEQ ID NO: 189673 - protein, 532 aa, Zea Mays
MLPSKRSASADGGEPKRAKLGESPSAARVGTSNGTRNGAAPEIDEDLHSRQLAVYGRETMRRLFAADVLVSGLDGLGAEIAKNLALAGVKSVTIHDVKMVEMWDLSGNFFLSEQDIGKNRALACVSKLQELNNAVLVSALTEELTIEHLSKFQAVVFTDISLEKAYEFDDYCHSHQPPISFIKAQVCGLFGSVFCDFGPEFTVLDVDGEDPHTGIIASISNDTPAIVSCVDDERLEFQDGDLVVFSEVQGMTELNDGKPRKVKNARPFSFSVEEDTSSYGVYTKGGIVTQVKEPKVLRFKALRDAMRDPGDFLLSDFSKFEHSPVLHLAFEALDKFKKEHVRYPTAGCEQDAQSFLKFAADINEASVGSKLENIDEKLLRHFASGSRAVLNPMAAMFGGIVGQEVVKACSGKFHPLYQFFYFDSVESLPTYQLDPQDLKPSNSRYDAQISVFGSKLQKKLLDANVFIVGSGALGCEFLKNLALMGVSCSSKGKVTITDDDVIEKSNLSRQFLFRDWNIGRKVQYTNGHSSPY

SEQ ID NO: 189674 - protein, 727 aa, Zea Mays
MLPSKRSASADGGEPKRAKLGESPSAARVGTSNGTRNGAAPEIDEDLHSRQLAVYGRETMRRLFAADVLVSGLDGLGAEIAKNLALAGVKSVTIHDVKMVEMWDLSGNFFLSEQDIGKNRALACVSKLQELNNAVLVSALTEELTIEHLSKFQAVVFTDISLEKAYEFDDYCHSHQPPISFIKAQVCGLFGSVFCDFGPEFTVLDVDGEDPHTGIIASISNDTPAIVSCVDDERLEFQDGDLVVFSEVQGMTELNDGKPRKVKNARPFSFSVEEDTSSYGVYTKGGIVTQVKEPKVLRFKALRDAMRDPGDFLLSDFSKFEHSPVLHLAFEALDKFKKEHVRYPTAGCEQDAQSFLKFAADINEASVGSKLENIDEKLLRHFASGSRAVLNPMAAMFGGIVGQEVVKACSGKFHPLYQFFYFDSVESLPTYQLDPQDLKPSNSRYDAQISVFGSKLQKKLLDANVFIVGSGALGCEFLKNLALMGVSCSSKGKVTITDDDVIEKSNLSRQFLFRDWNIGQAKSTVAAAAAIAINPSLQIDALQNRASPDTENVFHDTFWDGLDVVINALDNVNARMYMDMRCLYFQKPLLESGTLGAKCNTQMVIPHLTENYGASRDPPEKQAPMCTVHSFPHNIDHCLTWARSEFEGLLEKTPNEVNSFLSNPAQYAAVMRKAGDAQARELLERVSECLDKERCNTFEDCITWARLRHSFLVGPKALSPPSAIFSH

SEQ ID NO: 189675 - protein, 1012 aa, Zea Mays
MGRRRRLTRTCTAGSSPCTAGRQCAASLPPMFSSLASMASVLRLNLALAGVKSVTIHDVKMVEMWDLSGNFFLSEQDIGKNRALACVSKLQELNNAVLVSALTEELTIEHLSKFQAVVFTDISLEKAYEFDDYCHSHQPPISFIKAQVCGLFGSVFCDFGPEFTVLDVDGEDPHTGIIASISNDTPAIVSCVDDERLEFQDGDLVVFSEVQGMTELNDGKPRKVKNARPFSFSVEEDTSSYGVYTKGGIVTQVKEPKVLRFKALRDAMRDPGDFLLSDFSKFEHSPVLHLAFEALDKFKKEHVRYPTAGCEQDAQSFLKFAADINEASVGSKLENIDEKLLRHFASGSRAVLNPMAAMFGGIVGQEVVKACSGKFHPLYQFFYFDSVESLPTYQLDPQDLKPSNSRYDAQISVFGSKLQKKLLDANVFIVGSGALGCEFLKNLALMGVSCSSKGKVTITDDDVIEKSNLSRQFLFRDWNIGQAKSTVAAAAAIAINPSLQIDALQNRASPDTENVFHDTFWDGLDVVINALDNVNARMYMDMRCLYFQKPLLESGTLGAKCNTQMVIPHLTENYGASRDPPEKQAPMCTVHSFPHNIDHCLTWARSEFEGLLEKTPNEVNSFLSNPAQYAAVMRKAGDAQARELLERVSECLDKERCNTFEDCITWARLRFEDYFSNRVKQLTFTFPEDAATSTGTPFWSAPKRFPRPLQFSATDSSHINFLMAASILRAESFGIAIPEWAKNTSKLADAVNKVAVPKFEPKKGVNIVTDEKATNLSSASVDDVAVINDLLAKLEEYAKGLPPGFQMKPIQFEKDDDTNFHMDLIAGLANMRARNYSIPEVDKLKAKFIAGRIIPAIATSTAMATGLVCLELYKVIAGEHPMEDYRNTFANLAIPLLSMAEPVGAKLMKHQDMRWTVWDRWTIRGNLTVAELLQWFSDKGLSAYSMSCGTCLLYNSMFARHKERLQRKVVDVAREVAKVEVPEYRRHIDVVVACEDDDGNDIDIPLVSVYFR

SEQ ID NO: 189676 - protein, 521 aa, Zea Mays
MRVLEESCLNGCLLQLQGKDTENVFHDTFWDGLDVVINALDNVNARMYMDMRCLYFQKPLLESGTLGAKCNTQMVIPHLTENYGASRDPPEKQAPMCTVHSFPHNIDHCLTWARSEFEGLLEKTPNEVNSFLSNPAQYAAVMRKAGDAQARELLERVSECLDKERCNTFEDCITWARLRFEDYFSNRVKQLTFTFPEDAATSTGTPFWSAPKRFPRPLQFSATDSSHINFLMAASILRAESFGIAIPEWAKNTSKLADAVNKVAVPKFEPKKGVNIVTDEKATNLSSASVDDVAVINDLLAKLEEYAKGLPPGFQMKPIQFEKDDDTNFHMDLIAGLANMRARNYSIPEVDKLKAKFIAGRIIPAIATSTAMATGLVCLELYKVIAGEHPMEDYRNTFANLAIPLLSMAEPVGAKLMKHQDMRWTVWDRWTIRGNLTVAELLQWFSDKGLSAYSMSCGTCLLYNSMFARHKERLQRKVVDVAREVAKVEVPEYRRHIDVVVACEDDDGNDIDIPLVSVYFR

SEQ ID NO: 189677 - protein, 870 aa, Zea Mays
MLPSKRSASADGGEPKRAKLGESPSAARVGTSNGTRNGAAPEIDEDLHSRQLAVYGRETMRRLFAADVLVSGLDGLGAEIAKNLALAGVKSVTIHDVKMVEMWDLSGNFFLSEQDIGKNRALACVSKLQELNNAVLVSALTEELTIEHLSKFQAVVFTDISLEKAYEFDDYCHSHQPPISFIKAQVCGLFGSVFCDFGPEFTVLDVDGEDPHTGIIASISNDTPAIVSCVDDERLEFQDGDLVVFSEVQGMTELNDGKPRKVKNARPFSFSVEEDTSSYGVYTKGGIVTQVKEPKVLRFKALRDAMRDPGDFLLSDFSKFEHSPVLHLAFEALDKFKKEHVRYPTAGCEQDAQSFLKFAADINEASVGSKLENIDEKLLRHFASGSRAVLNPMAAMFGGIVGQEVVKACSGKFHPLYQFFYFDSVESLPTYQLDPQDLKPSNSRYDAQISVFGSKLQKKLLDANVFIVGSGALGCEFLKNLALMGVSCSSKGKVTITDDDVIEKSNLSRQFLFRDWNIGQAKSTVAAAAAIAINPSLQIDALQNRASPDTENVFHDTFWDGLDVVINALDNVNARMYMDMRCLYFQKPLLESGTLGAKCNTQMVIPHLTENYGASRDPPEKQAPMCTVHSFPHNIDHCLTWARSEFEGLLEKTPNEVNSFLSNPAQYAAVMRKAGDAQARELLERVSECLDKERCNTFEDCITWARLRFEDYFSNRVKQLTFTFPEDAATSTGTPFWSAPKRFPRPLQFSATDSSHINFLMAASILRAESFGIAIPEWAKNTSKLADAVNKVAVPKFEPKKGVNIVTDEKATNLSSASVDDVAVINDLLAKLEEYAKGLPPGFQMKPIQFEKLGLQTCAQGITAFLRLTS

SEQ ID NO: 189678 - protein, 628 aa, Zea Mays
MDSPYALHLAIAALVGASFAAASAYYMHRKTLDQLLRFARDQQRRRNRLLPEGDELEDGEEDPPPHWDHDRRTLPIPPGLPPLHTGREGRPVVSPGSTKRVGPIVRPTTPKSSVPTISAFDRIEDSDDEEDLVPDAKNDTAYLTPNGAIGSDLTDKASQNGELTSAPSTQMIRSHSATGSLHVPQLNPIAADILRKEPEHETFSKINITAVETPSPDEIEAYKVLQKCLELRQRYIFREEVAPWEKEIITDPSTPKPNPNPFSYEHQAKTDHHFEMVDGVIHVYPNKDSKERLYPVADATTFFTDMHYVLRVLAAGDIRTVCHHRLNLLEQKFNLHLMVNTDRELLAQKAAPHRDFYNVRKVDTHVHHSACMNQKHLLRFIKSKLRKEPDEVVIFRDGTYLTLKEVFESLDLTGYDLNVDLLDVHADKSTFHRFDKFNLKYNPCGQSRLREIFLKQDNLIQGRFLAELTKEVFSDLEASKYQMAEYRISIYGRKKSEWDQMASWIVNNELYSENVVWLIQIPRIYNVYREMGTINSFQNLLDNIFLPLYEVTVDPASHPQLHVFLKQVVGLDLVDDESKPERRPTKHMPTPEQWTNIFNPAYAYYVYYCYANLYTLNKVELELGELIV

SEQ ID NO: 189679 - protein, 647 aa, Zea Mays
MDSPYALHLAIAALVGASFAAASAYYMHRKTLDQLLRFARDQQRRRNRLLPEGDELEDGEEDPPPHWDHDRRTLPIPPGLPPLHTGREGRPVVSPGSTKRVGPIVRPTTPKSSVPTISAFDRIEDSDDEEDLVPDAKNDTAYLTPNGAIGSDLTDKASQNGELTSAPSTQMIRSHSATGSLHVPQLNPIAADILRKEPEHETFSKINITAVETPSPDEIEAYKVLQKCLELRQRYIFREEVAPWEKEIITDPSTPKPNPNPFSYEHQAKTDHHFEMVDGVIHVYPNKDSKERLYPVADATTFFTDMHYVLRVLAAGDIRTVCHHRLNLLEQKFNLHLMVNTDRELLAQKAAPHRDFYNVRKVDTHVHHSACMNQKHLLRFIKSKLRKEPDEVVIFRDGTYLTLKEVFESLDLTGYDLNVDLLDVHADKSTFHRFDKFNLKYNPCGQSRLREIFLKQDNLIQGRFLAELTKEVFSDLEASKYQMAEYRISIYGRKKSEWDQMASWIVNNELYSENVVWLIQIPRIYNVYREMGTINSFQNLLDNIFLPLYEVTVDPASHPQLHVFLKQVVGLDLVDDESKPERRPTKHMPTPEQWTNIFNPAYAYYVYYCYANLYTLNKLRESKGMTTIKLRPHCGEHFLLHITLLMG

SEQ ID NO: 189680 - protein, 538 aa, Zea Mays
MVDGVIHVYPNKDSKERLYPVADATTFFTDMHYVLRVLAAGDIRTVCHHRLNLLEQKFNLHLMVNTDRELLAQKAAPHRDFYNVRKVDTHVHHSACMNQKHLLRFIKSKLRKEPDEVVIFRDGTYLTLKEVFESLDLTGYDLNVDLLDVHADKSTFHRFDKFNLKYNPCGQSRLREIFLKQDNLIQGRFLAELTKEVFSDLEASKYQMAEYRISIYGRKKSEWDQMASWIVNNELYSENVVWLIQIPRIYNVYREMGTINSFQNLLDNIFLPLYEVTVDPASHPQLHVFLKQVVGLDLVDDESKPERRPTKHMPTPEQWTNIFNPAYAYYVYYCYANLYTLNKLRESKGMTTIKLRPHCGEAGDIDHLAAAFLTSHNIAHGVNLKKSPVLQYLYYLAQIGLAMSPLSNNSLFIDYHRNPFPTFFLRGLNVSLSTDDPLQIHLTKEPLVEEYSVAASLWKLSSCDLCEIARNSVYQSGFSHRLKSHWIGRNYYRRGPEGNDIHQTNVPHIRVEFRHTIWKEEMELIHFGNVNLPEEVDR

SEQ ID NO: 189681 - protein, 372 aa, Zea Mays
MVDGVIHVYPNKDSKERLYPVADATTFFTDMHYVLRVLAAGDIRTVCHHRLNLLEQKFNLHLMVNTDRELLAQKAAPHRDFYNVRKVDTHVHHSACMNQKHLLRFIKSKLRKEPDEVVIFRDGTYLTLKEVFESLDLTGYDLNVDLLDVHADKSTFHRFDKFNLKYNPCGQSRLREIFLKQDNLIQGRFLAELTKEVFSDLEASKYQMAEYRISIYGRKKSEWDQMASWIVNNELYSENVVWLIQIPRIYNVYREMGTINSFQNLLDNIFLPLYEVTVDPASHPQLHVFLKQVVGLDLVDDESKPERRPTKHMPTPEQWTNIFNPAYAYYVYYCYANLYTLNKLRESKGMTTIKLRPHCGEHFLLHITLLMG

SEQ ID NO: 189682 - protein, 1173 aa, Zea Mays
MEWNSFSFQAMESVELHPSSSSPAVTSCSKERKPNLHQQRPNSYSQARPTRFSSTPMFAKRLFHRALGVGRGGGGGASAPAASPADAIQMDAQISTHCGVPYTASLLAFDPVQRLLAVATLDGRIKIFGGDNIEGLLISPKSVPYKFLQFITNQGLLVAISNENEIQVWNLEFRQLFYSSQWDVNITAFAVIERTFMMYLGDENGLLSVLKYDVDDGKLQIMPYNVHIHSLIERSGVSLQDPQPIVGILIQPDTFGTRLLIAYERGLLVLWDVSEDRAVSVRGYGDLRMKGQINGAQGDSGEDQLNTTIDDSEEEREICSLCWASREGSTVAVGYITGDILLWDMTTKSSRQEKQSDVSSNVVKLQLASGSRRLPVIVLHWSAGSAVHSNKGGHLFVYGGDDMGSEEVLTVLSLESTAGLESVRCMSRTDLKLDGSFADMILIPDTGVPDKSRTSALFILTNPGQLNFYDGGSLFSVQNSKEGTPLPEAQKFPVAIPTLDPNITVTGLYSLTESEFPNISLKKFCARKNAGHFISENMKWPLTGGVPNEMSLDEDHAVERIYIAGYQDGSVRIWDATFPVLMPMFVLDGNVADVNLDGANASVSSLAFCSLSMTLAVGTTSGLVRIYKLREHTGGSSFHFVSEFKQEVHVVHHGKGFHCYVAFLSANSSVLSLLFMASGGLLAAGYQNGQVAMLDPSQLSILFTVDGASGTNSPVVSLGIYSVAASAAKADQSKKDNPQNATLSRDVLLSLTKDARVTVLDCTTGVMINSHIIHQKQSSAISMYVIDAESDETQTQLSEDKIPSQGQTGKDGNDLDKIQTQGIEKHLKNASQLSQNGGSDSLLVVCCEDVLLLLSLASLIQGSSKHLQKTKLAKPCCWSAVFKNMDDKVCGLILAYQTGTIEMRFGPDLAIVAETSLMSLLRWSYKTGMEKSTSSSNGQVTLVNGSEFAIISLMASENDLRIPESLPCLHDKVLAAAAEAAMSFSTDQRRKQNPAAGIIGGFIKGMKGKAEENAKMRESLTLRAPSEQLESIFSKEPFAEPSIPDLDDPMEELSIDDIEIDDEVAVALAQAASSTSQGNKRTAVEEERAKLFEGSNSADKPRMRTQQEILTKYRFGGDAAAAAAHAKDKLMQRQEKLERISQQTAELQNGAENFASLAQELAKTMENKKWWKL

SEQ ID NO: 189683 - protein, 758 aa, Zea Mays
MFAKRLFHRALVHHHQGVGRGGGGGASAPAASPADAIQMDAQISTHCGVPYTASLLAFDPVQRLLAVATLDGRIKIFGGDNIEGLLISPKSVPYKFLQFITNQGLLVAISNENEIQVWNLEFRQLFYSSQWDVNITAFAVIERTFMMYLGDENGLLSVLKYDVDDGKLQIMPYNVHIHSLIERSGVSLQDPQPIVGILIQPDTFGTRLLIAYERGLLVLWDVSEDRAVSVRGYGDLRMKGQINGAQGDSGEDQLNTTIDDSEEEREICSLCWASREGSTVAVGYITGDILLWDMTTKSSRQEKQSDVSSNVVKLQLASGSRRLPVIVLHWSAGSAVHSNKGGHLFVYGGDDMGSEEVLTVLSLESTAGLESVRCMSRTDLKLDGSFADMILIPDTGVPDKSRTSALFILTNPGQLNFYDGGSLFSVQNSKEGTPLPEAQKFPVAIPTLDPNITVTGLYSLTESEFPNISLKKFCARKNAGHFISENMKWPLTGGVPNEMSLDEDHAVERIYIAGYQDGSVRIWDATFPVLMPMFVLDGNVADVNLDGANASVSSLAFCSLSMTLAVGTTSGLVRIYKLREHTGGSSFHFVSEFKQEVHVVHHGKGFHCYVAFLSANSSVLSLLFMASGGLLAAGYQNGQVAMLDPSQLSILFTVDGASGTNSPVVSLGIYSVAASAAKADQSKKDNPQNATLSRDVLLSLTKDARVTVLDCTTGVMINSHIIHQKQSSAISICRVRRDTNPIIRGQNSKSRSDRERWQ

SEQ ID NO: 189684 - protein, 756 aa, Zea Mays
MFAKRLFHRALVHHHQGVGRGGGGGASAPAASPADAIQMDAQISTHCGVPYTASLLAFDPVQRLLAVATLDGRIKIFGGDNIEGLLISPKSVPYKFLQFITNQGLLVAISNENEIQVWNLEFRQLFYSSQWDVNITAFAVIERTFMMYLGDENGLLSVLKYDVDDGKLQIMPYNVHIHSLIERSGVSLQDPQPIVGILIQPDTFGTRLLIAYERGLLVLWDVSEDRAVSVRGYGDLRMKGQINGAQGDSGEDQLNTTIDDSEEEREICSLCWASREGSTVAVGYITGDILLWDMTTKSSRQEKQSDVSSNVVKLQLASGSRRLPVIVLHWSAGSAVHSNKGGHLFVYGGDDMGSEEVLTVLSLESTAGLESVRCMSRTDLKLDGSFADMILIPDTGVPDKSRTSALFILTNPGQLNFYDGGSLFSVQNSKEGTPLPEAQKFPVAIPTLDPNITVTGLYSLTESEFPNISLKKFCARKNAGHFISENMKWPLTGGVPNEMSLDEDHAVERIYIAGYQDGSVRIWDATFPVLMPMFVLDGNVADVNLDGANASVSSLAFCSLSMTLAVGTTSGLVRIYKLREHTGGSSFHFVSEFKQEVHVVHHGKGFHCYVAFLSANSSVLSLLFMASGGLLAAGYQNGQVAMLDPSQLSILFTVDGASGTNSPVVSLGIYSVAASAAKADQSKKDNPQNATLSRDVLLSLTKDARVTVLDCTTGVMINSHIIHQKQSSAISIVRRDTNPIIRGQNSKSRSDRERWQ

SEQ ID NO: 189685 - protein, 1122 aa, Zea Mays
MFAKRLFHRALVHHHQGVGRGGGGGASAPAASPADAIQMDAQISTHCGVPYTASLLAFDPVQRLLAVATLDGRIKIFGGDNIEGLLISPKSVPYKFLQFITNQGLLVAISNENEIQVWNLEFRQLFYSSQWDVNITAFAVIERTFMMYLGDENGLLSVLKYDVDDGKLQIMPYNVHIHSLIERSGVSLQDPQPIVGILIQPDTFGTRLLIAYERGLLVLWDVSEDRAVSVRGYGDLRMKGQINGAQGDSGEDQLNTTIDDSEEEREICSLCWASREGSTVAVGYITGDILLWDMTTKSSRQEKQSDVSSNVVKLQLASGSRRLPVIVLHWSAGSAVHSNKGGHLFVYGGDDMGSEEVLTVLSLESTAGLESVRCMSRTDLKLDGSFADMILIPDTGVPDKSRTSALFILTNPGQLNFYDGGSLFSVQNSKEGTPLPEAQKFPVAIPTLDPNITVTGLYSLTESEFPNISLKKFCARKNAGHFISENMKWPLTGGVPNEMSLDEDHAVERIYIAGYQDGSVRIWDATFPVLMPMFVLDGNVADVNLDGANASVSSLAFCSLSMTLAVGTTSGLVRIYKLREHTGGSSFHFVSEFKQEVHVVHHGKGFHCYVAFLSANSSVLSLLFMASGGLLAAGYQNGQVAMLDPSQLSILFTVDGASGTNSPVVSLGIYSVAASAAKADQSKKDNPQNATLSRDVLLSLTKDARVTVLDCTTGVMINSHIIHQKQSSAISMYVIDAESDETQTQLSEDKIPSQGQTGKDGNDLDKIQTQGIEKHLKNASQLSQNGGSDSLLVVCCEDVLLLLSLASLIQGSSKHLQKTKLAKPCCWSAVFKNMDDKVCGLILAYQTGTIEMRFGPDLAIVAETSLMSLLRWSYKTGMEKSTSSSNGQVTLVNGSEFAIISLMASENDLRIPESLPCLHDKVLAAAAEAAMSFSTDQRRKQNPAAGIIGGFIKGMKGKAEENAKMRESLTLRAPSEQLESIFSKEPFAEPSIPDLDDPMEELSIDDIEIDDEVAVALAQAASSTSQGNKRTAVEEERAKLFEGSNSADKPRMRTQQEILTKYRFGGDAAAAAAHAKDKLMQRQEKLERISQQTAELQNGAENFASLAQELAKTMENKKWWKL

SEQ ID NO: 189686 - protein, 613 aa, Zea Mays
MMYLGDENGLLSVLKYDVDDGKLQIMPYNVHIHSLIERSGVSLQDPQPIVGILIQPDTFGTRLLIAYERGLLVLWDVSEDRAVSVRGYGDLRMKGQINGAQGDSGEDQLNTTIDDSEEEREICSLCWASREGSTVAVGYITGDILLWDMTTKSSRQEKQSDVSSNVVKLQLASGSRRLPVIVLHWSAGSAVHSNKGGHLFVYGGDDMGSEEVLTVLSLESTAGLESVRCMSRTDLKLDGSFADMILIPDTGVPDKSRTSALFILTNPGQLNFYDGGSLFSVQNSKEGTPLPEAQKFPVAIPTLDPNITVTGLYSLTESEFPNISLKKFCARKNAGHFISENMKWPLTGGVPNEMSLDEDHAVERIYIAGYQDGSVRIWDATFPVLMPMFVLDGNVADVNLDGANASVSSLAFCSLSMTLAVGTTSGLVRIYKLREHTGGSSFHFVSEFKQEVHVVHHGKGFHCYVAFLSANSSVLSLLFMASGGLLAAGYQNGQVAMLDPSQLSILFTVDGASGTNSPVVSLGIYSVAASAAKADQSKKDNPQNATLSRDVLLSLTKDARVTVLDCTTGVMINSHIIHQKQSSAISICRVRRDTNPIIRGQNSKSRSDRERWQ

SEQ ID NO: 189687 - protein, 978 aa, Zea Mays
MDAQISTHCGVPYTASLLAFDPVQRLLAVATLDGRIKIFGGDNIEGLLISPKSVPYKFLQFITNQGLLVAISNENEIQVWNLEFRQLFYSSQWDVNITAFAVIERTFMMYLGDENGLLSVLKYDVDDGKLQIMPYNVHIHSLIERSGVSLQDPQPIVGILIQPDTFGTRLLIAYERGLLVLWDVSEDRAVSVRGYGDLRMKGQINGAQGDSGEDQLNTTIDDSEEEREICSLCWASREGSTVAVGYITGDILLWDMTTKSSRQEKQSDVSSNVVKLQLASGSRRLPVIVLHWSAGSAVHSNKGGHLFVYGGDDMGSEEVLTVLSLESTAGLESVRCMSRTDLKLDGSFADMILIPDTGVPDKSRTSALFILTNPGQLNFYDGGSLFSVQNSKEGTPLPEAQKFPVAIPTLDPNITVTGLYSLTESEFPNISLKKFCARKNAGHFISENMKWPLTGGVPNEMSLDEDHAVERIYIAGYQDGSVRIWDATFPVLMPMFVLDGNVADVNLDGANASVSSLAFCSLSMTLAVGTTSGLVRIYKLREHTGGSSFHFVSEFKQEVHVVHHGKGFHCYVAFLSANSSVLSLLFMASGGLLAAGYQNGQVAMLDPSQLSILFTVDGASGTNSPVVSLGIYSVAASAAKADQSKKDNPQNATLSRDVLLSLTKDARVTVLDCTTGVMINSHIIHQKQSSAISMYVIDAESDETQTQLSEDKIPSQGQTGKDGNDLDKIQTQGIEKHLKNASQLSQNGGSDSLLVVCCEDVLLLLSLASLIQGSSKHLQKTKLAKPCCWSAVFKNMDDKVCGLILAYQTGTIEMRFGPDLAIVAETSLMSLLRWSYKTGMEKSTSSSNGQVTLVNGSEFAIISLMASENDLRIPESLPCLHDKVLAAAAEAAMSFSTDQRRKQNPAAGIIGGFIKGMKGKAEENAKMRESLTLRAPSEQLESIFSKEPFAEPSIPDLDDPMEELSIGSLSPSLCIILY

SEQ ID NO: 189688 - protein, 779 aa, Zea Mays
MKGQINGAQGDSGEDQLNTTIDDSEEEREICSLCWASREGSTVAVGYITGDILLWDMTTKSSRQEKQSDVSSNVVKLQLASGSRRLPVIVLHWSAGSAVHSNKGGHLFVYGGDDMGSEEVLTVLSLESTAGLESVRCMSRTDLKLDGSFADMILIPDTGVPDKSRTSALFILTNPGQLNFYDGGSLFSVQNSKEGTPLPEAQKFPVAIPTLDPNITVTGLYSLTESEFPNISLKKFCARKNAGHFISENMKWPLTGGVPNEMSLDEDHAVERIYIAGYQDGSVRIWDATFPVLMPMFVLDGNVADVNLDGANASVSSLAFCSLSMTLAVGTTSGLVRIYKLREHTGGSSFHFVSEFKQEVHVVHHGKGFHCYVAFLSANSSVLSLLFMASGGLLAAGYQNGQVAMLDPSQLSILFTVDGASGTNSPVVSLGIYSVAASAAKADQSKKDNPQNATLSRDVLLSLTKDARVTVLDCTTGVMINSHIIHQKQSSAISMYVIDAESDETQTQLSEDKIPSQGQTGKDGNDLDKIQTQGIEKHLKNASQLSQNGGSDSLLVVCCEDVLLLLSLASLIQGSSKHLQKTKLAKPCCWSAVFKNMDDKVCGLILAYQTGTIEMRFGPDLAIVAETSLMSLLRWSYKTGMEKSTSSSNGQVTLVNGSEFAIISLMASENDLRIPESLPCLHDKVLAAAAEAAMSFSTDQRRKQNPAAGIIGGFIKGMKGKAEENAKMRESLTLRAPSEQLESIFSKEPFAEPSIPDLDDPMEELSIGSLSPSLCIILY

SEQ ID NO: 189689 - protein, 885 aa, Zea Mays
MKGQINGAQGDSGEDQLNTTIDDSEEEREICSLCWASREGSTVAVGYITGDILLWDMTTKSSRQEKQSDVSSNVVKLQLASGSRRLPVIVLHWSAGSAVHSNKGGHLFVYGGDDMGSEEVLTVLSLESTAGLESVRCMSRTDLKLDGSFADMILIPDTGVPDKSRTSALFILTNPGQLNFYDGGSLFSVQNSKEGTPLPEAQKFPVAIPTLDPNITVTGLYSLTESEFPNISLKKFCARKNAGHFISENMKWPLTGGVPNEMSLDEDHAVERIYIAGYQDGSVRIWDATFPVLMPMFVLDGNVADVNLDGANASVSSLAFCSLSMTLAVGTTSGLVRIYKLREHTGGSSFHFVSEFKQEVHVVHHGKGFHCYVAFLSANSSVLSLLFMASGGLLAAGYQNGQVAMLDPSQLSILFTVDGASGTNSPVVSLGIYSVAASAAKADQSKKDNPQNATLSRDVLLSLTKDARVTVLDCTTGVMINSHIIHQKQSSAISMYVIDAESDETQTQLSEDKIPSQGQTGKDGNDLDKIQTQGIEKHLKNASQLSQNGGSDSLLVVCCEDVLLLLSLASLIQGSSKHLQKTKLAKPCCWSAVFKNMDDKVCGLILAYQTGTIEMRFGPDLAIVAETSLMSLLRWSYKTGMEKSTSSSNGQVTLVNGSEFAIISLMASENDLRIPESLPCLHDKVLAAAAEAAMSFSTDQRRKQNPAAGIIGGFIKGMKGKAEENAKMRESLTLRAPSEQLESIFSKEPFAEPSIPDLDDPMEELSIDDIEIDDEVAVALAQAASSTSQGNKRTAVEEERAKLFEGSNSADKPRMRTQQEILTKYRFGGDAAAAAAHAKDKLMQRQEKLERISQQTAELQNGAENFASLAQELAKTMENKKWWKL

SEQ ID NO: 189690 - protein, 1014 aa, Zea Mays
MFAKRLFHRALVHHHQGVGRGGGGGASAPAASPADAIQMDAQISTHCGVPYTASLLAFDPVQRLLAVATLDGRIKIFGGDNIEGLLISPKSVPYKFLQFITNQGLLVAISNENEIQVWNLEFRQLFYSSQWDVNITAFAVIERTFMMYLGDENGLLSVLKYDVDDGKLQIMPYNVHIHSLIERSGVSLQDPQPIVGILIQPDTFGTRLLIAYERGLLVLWDVSEDRAVSVRGYGDLRMKGQINGAQGDSGEDQLNTTIDDSEEEREICSLCWASREGSTVAVGYITGDILLWDMTTKSSRQEKQSDVSSNVVKLQLASGSRRLPVIVLHWSAGSAVHSNKGGHLFVYGGDDMGSEEVLTVLSLESTAGLESVRCMSRTDLKLDGSFADMILIPDTGVPDKSRTSALFILTNPGQLNFYDGGSLFSVQNSKEGTPLPEAQKFPVAIPTLDPNITVTGLYSLTESEFPNISLKKFCARKNAGHFISENMKWPLTGGVPNEMSLDEDHAVERIYIAGYQDGSVRIWDATFPVLMPMFVLDGNVADVNLDGANASVSSLAFCSLSMTLAVGTTSGLVRIYKLREHTGGSSFHFVSEFKQEVHVVHHGKGFHCYVAFLSANSSVLSLLFMASGGLLAAGYQNGQVAMLDPSQLSILFTVDGASGTNSPVVSLGIYSVAASAAKADQSKKDNPQNATLSRDVLLSLTKDARVTVLDCTTGVMINSHIIHQKQSSAISMYVIESDETQTQLSEDKIPSQGQTGKDGNDLDKIQTQGIEKHLKNASQLSQNGGSDSLLVVCCEDVLLLLSLASLIQGSSKHLQKTKLAKPCCWSAVFKNMDDKVCGLILAYQTGTIEMRFGPDLAIVAETSLMSLLRWSYKTGMEKSTSSSNGQVTLVNGSEFAIISLMASENDLRIPESLPCLHDKVLAAAAEAAMSFSTDQRRKQNPAAGIIGGFIKGMKGKAEENAKMRESLTLRAPSEQLESIFSKEPFAEPSIPDLDDPMEELSIGSLSPSLCIILY

SEQ ID NO: 189691 - protein, 603 aa, Zea Mays
MDAQISTHCGVPYTASLLAFDPVQRLLAVATLDGRIKIFGGDNIEGLLISPKSVPYKFLQFITNQGLLVAISNENEIQVWNLEFRQLFYSSQWDVNITAFAVIERTFMMYLGDENGLLSVLKYDVDDGKLQIMPYNVHIHSLIERSGVSLQDPQPIVGILIQPDTFGTRLLIAYERGLLVLWDVSEDRAVSVRGYGDLRMKGQINGAQGDSGEDQLNTTIDDSEEEREICSLCWASREGSTVAVGYITGDILLWDMTTKSSRQEKQSDVSSNVVKLQLASGSRRLPVIVLHWSAGSAVHSNKGGHLFVYGGDDMGSEEVLTVLSLESTAGLESVRCMSRTDLKLDGSFADMILIPDTGVPDKSRTSALFILTNPGQLNFYDGGSLFSVQNSKEGTPLPEAQKFPVAIPTLDPNITVTGLYSLTESEFPNISLKKFCARKNAGHFISENMKWPLTGGVPNEMSLDEDHAVERIYIAGYQDGSVRIWDATFPVLMPMFVLDGNVADVNLDGANASVSSLAFCSLSMTLAVGTTSGLVRIYKLREHTGGSSFHFVSEFKQEVHVVHHGKGFHCYVAFLSANSSVLSLLFMASGGLLAAGYQNGGNA

SEQ ID NO: 189692 - protein, 720 aa, Zea Mays
MDAQISTHCGVPYTASLLAFDPVQRLLAVATLDGRIKIFGGDNIEGLLISPKSVPYKFLQFITNQGLLVAISNENEIQVWNLEFRQLFYSSQWDVNITAFAVIERTFMMYLGDENGLLSVLKYDVDDGKLQIMPYNVHIHSLIERSGVSLQDPQPIVGILIQPDTFGTRLLIAYERGLLVLWDVSEDRAVSVRGYGDLRMKGQINGAQGDSGEDQLNTTIDDSEEEREICSLCWASREGSTVAVGYITGDILLWDMTTKSSRQEKQSDVSSNVVKLQLASGSRRLPVIVLHWSAGSAVHSNKGGHLFVYGGDDMGSEEVLTVLSLESTAGLESVRCMSRTDLKLDGSFADMILIPDTGVPDKSRTSALFILTNPGQLNFYDGGSLFSVQNSKEGTPLPEAQKFPVAIPTLDPNITVTGLYSLTESEFPNISLKKFCARKNAGHFISENMKWPLTGGVPNEMSLDEDHAVERIYIAGYQDGSVRIWDATFPVLMPMFVLDGNVADVNLDGANASVSSLAFCSLSMTLAVGTTSGLVRIYKLREHTGGSSFHFVSEFKQEVHVVHHGKGFHCYVAFLSANSSVLSLLFMASGGLLAAGYQNGQVAMLDPSQLSILFTVDGASGTNSPVVSLGIYSVAASAAKADQSKKDNPQNATLSRDVLLSLTKDARVTVLDCTTGVMINSHIIHQKQSSAISICRVRRDTNPIIRGQNSKSRSDRERWQ

SEQ ID NO: 189693 - protein, 642 aa, Zea Mays
MSRTDLKLDGSFADMILIPDTGVPDKSRTSALFILTNPGQLNFYDGGSLFSVQNSKEGTPLPEAQKFPVAIPTLDPNITVTGLYSLTESEFPNISLKKFCARKNAGHFISENMKWPLTGGVPNEMSLDEDHAVERIYIAGYQDGSVRIWDATFPVLMPMFVLDGNVADVNLDGANASVSSLAFCSLSMTLAVGTTSGLVRIYKLREHTGGSSFHFVSEFKQEVHVVHHGKGFHCYVAFLSANSSVLSLLFMASGGLLAAGYQNGQVAMLDPSQLSILFTVDGASGTNSPVVSLGIYSVAASAAKADQSKKDNPQNATLSRDVLLSLTKDARVTVLDCTTGVMINSHIIHQKQSSAISMYVIDAESDETQTQLSEDKIPSQGQTGKDGNDLDKIQTQGIEKHLKNASQLSQNGGSDSLLVVCCEDVLLLLSLASLIQGSSKHLQKTKLAKPCCWSAVFKNMDDKVCGLILAYQTGTIEMRFGPDLAIVAETSLMSLLRWSYKTGMEKSTSSSNGQVTLVNGSEFAIISLMASENDLRIPESLPCLHDKVLAAAAEAAMSFSTDQRRKQNPAAGIIGGFIKGMKGKAEENAKMRESLTLRAPSEQLESIFSKEPFAEPSIPDLDDPMEELSIGSLSPSLCIILY

SEQ ID NO: 189694 - protein, 407 aa, Zea Mays
MGSEEVLTVLSLESTAGLESVRCMSRTDLKLDGSFADMILIPDTGVPDKSRTSALFILTNPGQLNFYDGGSLFSVQNSKEGTPLPEAQKFPVAIPTLDPNITVTGLYSLTESEFPNISLKKFCARKNAGHFISENMKWPLTGGVPNEMSLDEDHAVERIYIAGYQDGSVRIWDATFPVLMPMFVLDGNVADVNLDGANASVSSLAFCSLSMTLAVGTTSGLVRIYKLREHTGGSSFHFVSEFKQEVHVVHHGKGFHCYVAFLSANSSVLSLLFMASGGLLAAGYQNGQVAMLDPSQLSILFTVDGASGTNSPVVSLGIYSVAASAAKADQSKKDNPQNATLSRDVLLSLTKDARVTVLDCTTGVMINSHIIHQKQSSAISICRVRRDTNPIIRGQNSKSRSDRERWQ

SEQ ID NO: 189695 - protein, 521 aa, Zea Mays
MKGQINGAQGDSGEDQLNTTIDDSEEEREICSLCWASREGSTVAVGYITGDILLWDMTTKSSRQEKQSDVSSNVVKLQLASGSRRLPVIVLHWSAGSAVHSNKGGHLFVYGGDDMGSEEVLTVLSLESTAGLESVRCMSRTDLKLDGSFADMILIPDTGVPDKSRTSALFILTNPGQLNFYDGGSLFSVQNSKEGTPLPEAQKFPVAIPTLDPNITVTGLYSLTESEFPNISLKKFCARKNAGHFISENMKWPLTGGVPNEMSLDEDHAVERIYIAGYQDGSVRIWDATFPVLMPMFVLDGNVADVNLDGANASVSSLAFCSLSMTLAVGTTSGLVRIYKLREHTGGSSFHFVSEFKQEVHVVHHGKGFHCYVAFLSANSSVLSLLFMASGGLLAAGYQNGQVAMLDPSQLSILFTVDGASGTNSPVVSLGIYSVAASAAKADQSKKDNPQNATLSRDVLLSLTKDARVTVLDCTTGVMINSHIIHQKQSSAISICRVRRDTNPIIRGQNSKSRSDRERWQ

SEQ ID NO: 189696 - protein, 289 aa, Zea Mays
MDDKVCGLILAYQTGTIEMRFGPDLAIVAETSLMSLLRWSYKTGMEKSTSSSNGQVTLVNGSEFAIISLMASENDLRIPESLPCLHDKVLAAAAEAAMSFSTDQRRKQNPAAGIIGGFIKGMKGKAEENAKMRESLTLRAPSEQLESIFSKEPFAEPSIPDLDDPMEELSIDDIEIDDEVAVALAQAASSTSQGNKRTAVEEERAKLFEGSNSADKPRMRTQQEILTKYRFGGDAAAAAAHAKDKLMQRQEKLERISQQTAELQNGAENFASLAQELAKTMENKKWWKL

SEQ ID NO: 189697 - protein, 934 aa, Zea Mays
MLAARNPPPPPHDIAARLHHLRDLRRVPLPNRVARIADLHTDEASPVRKLVAEIIGELGSKHMRYLPDMIPCLLHLLNDETPAVVRQAVKTGTNLFAKVLQKLAIQGLFSNGGIDDALKSSWEWLLKFKSGVSHMAFQATGNEGVRLLAIKFVEKTVLMYTPDPDVPSDPPTETTEDMAFNVAWLRGGHPLLNVGDLAMEASQSLGLLLEQLKSPKVKSLSTSMIIVFVTSLSAIAQRRPSFYGRILPVLLSLDPASSIIKLRVPGAFHALKSAFSACLKCTHSSAEPWRARLLEAQNIINQGGSIEDAANAAKNFGDTSNREESWPLMERSTDGSNKRSLAEDMNHVTEDDVHSTKRARQSIDANEHSEEANKTNFESMSVDISSSQPSSIRTGNSEAVYQLIGMFAALAAQGDRAAGSLQILSYSIASDLLAEVVMVNMQHLPISRPEVDQQQLPSTSSGDGLPLSSFSSLLGILLKGANQIDQDEVSPAKEPALVSSVADDRMILPANSPVPSSVNLPIEENSNSPTVPLCIETTEAKVTSAGGNSSIDIPESSEASHASTEPQGTQEHASTFAGPFPADNFSVGFSLAQSSETRSPSSSTLEANHSQLSSLSSQYVLPKLVVNNIDLSDEAKDLLQKEAFVRILESDKKEASGGSIARLPLLAHLGVEFPLEFDPWVILQKHILSDYANNEGHELTICILNRLYHEAEQDHDFLSSRTATSVYESFLLNIAENLRDMFPASDKSLGKLLCEIPYLPEGVLKLLESLCSPGSNERQDKDIQSGDRVTQGLSAVWNLIMLRPSNRDRCLEIALQSSTHHLEEVRMKAIRLVANKLFPMTSISKKIEDFANEKLNSVLEMTPSGDCVTTEMATPEAHKDIGLENLTASVTGMQTLMSLYFALCTKKHSLLRHVFAIYGNLPQAAKQFINKYQF

SEQ ID NO: 189698 - protein, 883 aa, Zea Mays
MLAARNPPPPPHDIAARLHHLRDLRRVPLPNRVARIADLHTDEASPVRKLVAEIIGELGSKHMRYLPDMIPCLLHLLNDETPAVVRQAVKTGTNLFAKVLQKLAIQGLFSNGGIDDALKSSWEWLLKFKSGVSHMAFQATGNEGVRLLAIKFVEKTVLMYTPDPDVPSDPPTETTEDMAFNVAWLRGGHPLLNVGDLAMEASQSLGLLLEQLKSPKVKSLSTSMIIVFVTSLSAIAQRRPSFYGRILPVLLSLDPASSIIKLRVPGAFHALKSAFSACLKCTHSSAEPWRARLLEAQNIINQGGSIEDAANAAKNFGDTSNREESWPLMERSTDGSNKRSLAEDMNHVTEDDVHSTKRARQSIDANEHSEEANKTNFESMSVDISSSQPSSIRTGNSEAVYQLIGMFAALAAQGDRAAGSLQILSYSIASDLLAEVVMVNMQHLPISRPEVDQQQLPSTSSGDGLPLSSFSSLLGILLKGANQIDQDEVSPAKEPALVSSVADDRMILPANSPVPSSVNLPIEENSNSPTVPLCIETTEAKVTSAGGNSSIDIPESSEASHASTEPQGTQEHASTFAGPFPADNFSVGFSLAQSSETRSPSSSTLEANHSQLSSLSSQYVLPKLVVNNIDLSDEAKDLLQKEAFVRILESDKKEASGGSIARLPLLAHLGVEFPLEFDPWVILQKHILSDYANNEGHELTICILNRLYHEAEQDHDFLSSRTATSVYESFLLNIAENLRDMFPASDKSLGKLLCEIPYLPEGVLKLLESLCSPGSNERQDKDIQSGDRVTQGLSAVWNLIMLRPSNRDRCLEIALQSSTHHLEEVRMKAIRLVANKLFPMTSISKKIEDFANEKLNSVLEMTPSGDCVTTEMATPEAHKACRL

SEQ ID NO: 189699 - protein, 913 aa, Zea Mays
MLAARNPPPPPHDIAARLHHLRDLRRVPLPNRVARIADLHTDEASPVRKLVAEIIGELGSKHMRYLPDMIPCLLHLLNDETPAVVRQAVKTGTNLFAKVLQKLAIQGLFSNGGIDDALKSSWEWLLKFKSGVSHMAFQATGNEGVRLLAIKFVEKTVLMYTPDPDVPSDPPTETTEDMAFNVAWLRGGHPLLNVGDLAMEASQSLGLLLEQLKSPKVKSLSTSMIIVFVTSLSAIAQRRPSFYGRILPVLLSLDPASSIIKLRVPGAFHALKSAFSACLKCTHSSAEPWRARLLEAQNIINQGGSIEDAANAAKNFGDTSNREESWPLMERSTDGSNKRSLAEDMNHVTEDDVHSTKRARQSIDANEHSEEANKTNFESMSVDISSSQPSSIRTGNSEAVYQLIGMFAALAAQGDRAAGSLQILSYSIASDLLAEVVMVNMQHLPISRPEVDQQQLPSTSSGDGLPLSSFSSLLGILLKGANQIDQDEVSPAKEPALVSSVADDRMILPANSPVPSSVNLPIEENSNSPTVPLCIETTEAKVTSAGGNSSIDIPESSEASHASTEPQGTQEHASTFAGPFPADNFSVGFSLAQSSETRSPSSSTLEANHSQLSSLSSQYVLPKLVVNNIDLSDEAKDLLQKEAFVRILESDKKEASGGSIARLPLLAHLGVEFPLEFDPWVILQKHILSDYANNEGHELTICILNRLYHEAEQDHDFLSSRTATSVYESFLLNIAENLRDMFPASDKSLGKLLCEIPYLPEGVLKLLESLCSPGSNERQDKDIQSGDRVTQGLSAVWNLIMLRPSNRDRCLEIALQSSTHHLEEVRMKAIRLVANKLFPMTSISKKIEDFANEKLNSVLEMTPSGDCVTTEMATPEAHKDIGLENLTASVTGMQTLMSLYFALCTKTCICNIW

SEQ ID NO: 189700 - protein, 1239 aa, Zea Mays
MLAARNPPPPPHDIAARLHHLRDLRRVPLPNRVARIADLHTDEASPVRKLVAEIIGELGSKHMRYLPDMIPCLLHLLNDETPAVVRQAVKTGTNLFAKVLQKLAIQGLFSNGGIDDALKSSWEWLLKFKSGVSHMAFQATGNEGVRLLAIKFVEKTVLMYTPDPDVPSDPPTETTEDMAFNVAWLRGGHPLLNVGDLAMEASQSLGLLLEQLKSPKVKSLSTSMIIVFVTSLSAIAQRRPSFYGRILPVLLSLDPASSIIKLRVPGAFHALKSAFSACLKCTHSSAEPWRARLLEAQNIINQGGSIEDAANAAKNFGDTSNREESWPLMERSTDGSNKRSLAEDMNHVTEDDVHSTKRARQSIDANEHSEEANKTNFESMSVDISSSQPSSIRTGNSEAVYQLIGMFAALAAQGDRAAGSLQILSYSIASDLLAEVVMVNMQHLPISRPEVDQQQLPSTSSGDGLPLSSFSSLLGILLKGANQIDQDEVSPAKEPALVSSVADDRMILPANSPVPSSVNLPIEENSNSPTVPLCIETTEAKVTSAGGNSSIDIPESSEASHASTEPQGTQEHASTFAGPFPADNFSVGFSLAQSSETRSPSSSTLEANHSQLSSLSSQYVLPKLVVNNIDLSDEAKDLLQKEAFVRILESDKKEASGGSIARLPLLAHLGVEFPLEFDPWVILQKHILSDYANNEGHELTICILNRLYHEAEQDHDFLSSRTATSVYESFLLNIAENLRDMFPASDKSLGKLLCEIPYLPEGVLKLLESLCSPGSNERQDKDIQSGDRVTQGLSAVWNLIMLRPSNRDRCLEIALQSSTHHLEEVRMKAIRLVANKLFPMTSISKKIEDFANEKLNSVLEMTPSGDCVTTEMATPEAHKDIGLENLTASVTGMQTLMSLYFALCTKKHSLLRHVFAIYGNLPQAAKQAVHQQVPILIRTIGSSSDLLGIISDPPADCRDLLMQVLQTLTDAAVPSKDLISSIKILYSKTKDVEFLFAILVHLPKDEVLPVFPSIVNLPIDKFQSAISRILQGSPRNGPSLDPSEILIAIHVIAPDKEGIPLKKVMDACSSCFEQRTIFTQQVLAKALNQLIPLPLLFMRTVMQAIGVFPALVDFVMEIMSRLVSKQIWKYPKLWVGFLKCAILTKPQSYGVLLQLPAPQLENALSKNPTLKTPLAEHAEQPNIRSTLPRSTLVVLGLAEDQPQQPAVTQVQSSQNQAAETSSSAADTATEVTQESSGAS

SEQ ID NO: 189701 - protein, 429 aa, Zea Mays
MILPANSPVPSSVNLPIEENSNSPTVPLCIETTEAKVTSAGGNSSIDIPESSEASHASTEPQGTQEHASTFAGPFPADNFSVGFSLAQSSETRSPSSSTLEANHSQLSSLSSQYVLPKLVVNNIDLSDEAKDLLQKEAFVRILESDKKEASGGSIARLPLLAHLGVEFPLEFDPWVILQKHILSDYANNEGHELTICILNRLYHEAEQDHDFLSSRTATSVYESFLLNIAENLRDMFPASDKSLGKLLCEIPYLPEGVLKLLESLCSPGSNERQDKDIQSGDRVTQGLSAVWNLIMLRPSNRDRCLEIALQSSTHHLEEVRMKAIRLVANKLFPMTSISKKIEDFANEKLNSVLEMTPSGDCVTTEMATPEAHKDIGLENLTASVTGMQTLMSLYFALCTKKHSLLRHVFAIYGNLPQAAKQFINKYQF

SEQ ID NO: 189702 - protein, 720 aa, Zea Mays
MGGACQQLSVDGDARTPANDRDPAGLLQHDDTENQQQQQACWERFLLKETLNVLLVESDDSTRQVVSALLRCCMYQVISAENGQQAWAYLEDKRNNIDLVLTEVFMPGVSGISLLSRIMSHNICKNIPVIMMSSSDAMSTVFKCLSKGAVDFLVKPIRKNELKNLWQHVWRQRCHSNSWTKLAVEIDSPQAMSLDQLADPANSTCAQVIHSKSEICSHRWLPGSSNRNCKKQKYTNDDFKGKDLEIDGPGNLYMDHQSSPNERPIKAADHENNSKESMMGNLGDATVRAADLIGSMAKNMDAQQAARAADTPNFSSEVPEGKDDFKGKDLEIGGPRNLYMDHQSSPNERPIKAADHENNSKESMIENLEEPTVRAADLIGSMAKNMDTQQAARAAEDTPNFSSKVPEGKVNDDEQRNSALRRSNLSAFTRYHTSAASNQGGTGLVGSCSPHDNSSEAVKTDSTYNMKSNSDAAAIKQGSNGSSNNNDMGSTTKDVVTKPSTNNERVMLPSAIKANGYTSTFHPVQQWMVPDNATAGKAKADEVANNAGRNSHPGDVQSNLTQQHRPTLHYVHFENSGSGALQCGSSNVFDPPLEGQATNNYGVKAGSNSGSNKGQNNGSTAGASTAAANAGRTDTEIRAIDKSGPGGGSGSGNDTYVRRLAASMTPRQEQLKKYREKKKDRNFGKKVRYQSRKRLADQRPRVRGQFVKQAVQNQEGDGER

SEQ ID NO: 189703 - protein, 805 aa, Zea Mays
MGGACQQLSVDGDARTPANDRDPAGLLQHDDTENQQQQQACWERFLLKETLNVLLVESDDSTRQVVSALLRCCMYQVISAENGQQAWAYLEDKRNNIDLVLTEVFMPGVSGISLLSRIMSHNICKNIPVIMMSSSDAMSTVFKCLSKGAVDFLVKPIRKNELKNLWQHVWRQRCHSSSGSGSESGIQTQKCTKSKGANESGNNSGSNDDEAGMGLNARDDSDNGSGTQAQNSWTKLAVEIDSPQAMSLDQLADPANSTCAQVIHSKSEICSHRWLPGSSNRNCKKQKYTNDDFKGKDLEIDGPGNLYMDHQSSPNERPIKAADHENNSKESMMGNLGDATVRAADLIGSMAKNMDAQQAARAADTPNFSSEVPEGKDDFKGKDLEIGGPRNLYMDHQSSPNERPIKAADHENNSKESMIENLEEPTVRAADLIGSMAKNMDTQQAARAAEDTPNFSSKVPEGKGKNDQHDNYVLPSLELSLKRSRSCGDGANDTVNDDEQRNSALRRSNLSAFTRYHTSAASNQGGTGLVGSCSPHDNSSEAVKTDSTYNMKSNSDAAAIKQGSNGSSNNNDMGSTTKDVVTKPSTNNERVMLPSAIKANGYTSTFHPVQQWMVPDNATAGKAKADEVANNAGRNSHPGDVQSNLTQQHRPTLHYVHFENSGSGALQCGSSNVFDPPLEGQATNNYGVKAGSNSGSNKGQNNGSTAGASTAAANAGRTDTEIRAIDKSGPGGGSGSGNDTYVRRLAASMTPRQEQLKKYREKKKDRNFGKKVRYQSRKRLADQRPRVRGQFVKQAVQNQEGDGER

SEQ ID NO: 189704 - protein, 663 aa, Zea Mays
MNLRTFGSMCGDNGVTVSPACSKKKKVYLFGTQSSGSGSESGIQTQKCTKSKGANESGNNSGSNDDEAGMGLNARDDSDNGSGTQNSWTKLAVEIDSPQAMSLDQLADPANSTCAQVIHSKSEICSHRWLPGSSNRNCKKQKYTNDDFKGKDLEIDGPGNLYMDHQSSPNERPIKAADHENNSKESMMGNLGDATVRAADLIGSMAKNMDAQQAARAADTPNFSSEVPEGKGKNDDFKGKDLEIGGPRNLYMDHQSSPNERPIKAADHENNSKESMIENLEEPTVRAADLIGSMAKNMDTQQAARAAEDTPNFSSKVPEGKGKNDQHDNYVLPSLELSLKRSRSCGDGANDTVNDDEQRNSALRRSNLSAFTRYHTSAASNQGGTGLVGSCSPHDNSSEAVKTDSTYNMKSNSDAAAIKQGSNGSSNNNDMGSTTKDVVTKPSTNNERVMLPSAIKANGYTSTFHPVQQWMVPDNATAGKAKADEVANNAGRNSHPGDVQSNLTQQHRPTLHYVHFENSGSGALQCGSSNVFDPPLEGQATNNYGVKAGSNSGSNKGQNNGSTAGASTAAANAGRTDTEIRAIDKSGPGGGSGSGNDTYVRRLAASMTPRQEQLKKYREKKKDRNFGKKVRYQSRKRLADQRPRVRGQFVKQAVQNQEGDGER

SEQ ID NO: 189705 - protein, 469 aa, Zea Mays
MGGACQQLSVDGDARTPANDRDPAGLLQHDDTENQQQQQACWERFLLKETLNVLLVESDDSTRQVVSALLRCCMYQVISAENGQQAWAYLEDKRNNIDLVLTEVFMPGVSGISLLSRIMSHNICKNIPVIMMSSSDAMSTVFKCLSKGAVDFLVKPIRKNELKNLWQHVWRQRCHSAQNSWTKLAVEIDSPQAMSLDQLADPANSTCAQVIHSKSEICSHRWLPGSSNRNCKKQKYTNDDFKGKDLEIDGPGNLYMDHQSSPNERPIKAADHENNSKESMMGNLGDATVRAADLIGSMAKNMDAQQAARAADTPNFSSEVPEGKGKNDDFKGKDLEIGGPRNLYMDHQSSPNERPIKAADHENNSKESMIENLEEPTVRAADLIGSMAKNMDTQQAARAAEDTPNFSSKVPEGKGKNDQHDNYVLPSLELSLKRSRSCGDGANDTVNDDEQRNSALRRSNLSAFTRCKT

SEQ ID NO: 189706 - protein, 555 aa, Zea Mays
MRGRLRMTAIRPACSSMMIRKTSSSSRPAGSASSSRRLSTSCLWRVMIQPGRSSVPCFVAACTKAQNSWTKLAVEIDSPQAMSLDQLADPANSTCAQVIHSKSEICSHRWLPGSSNRNCKKQKYTNDDFKGKDLEIGGPRNLYMDHQSSPNERPIKAADHENNSKESMIENLEEPTVRAADLIGSMAKNMDTQQAARAAEDTPNFSSKVPEGKGKNDQHDNYVLPSLELSLKRSRSCGDGANDTVNDDEQRNSALRRSNLSAFTRYHTSAASNQGGTGLVGSCSPHDNSSEAVKTDSTYNMKSNSDAAAIKQGSNGSSNNNDMGSTTKDVVTKPSTNNERVMLPSAIKANGYTSTFHPVQQWMVPDNATAGKAKADEVANNAGRNSHPGDVQSNLTQQHRPTLHYVHFENSGSGALQCGSSNVFDPPLEGQATNNYGVKAGSNSGSNKGQNNGSTAGASTAAANAGRTDTEIRAIDKSGPGGGSGSGNDTYVRRLAASMTPRQEQLKKYREKKKDRNFGKKVRYQSRKRLADQRPRVRGQFVKQAVQNQEGDGER

SEQ ID NO: 189707 - protein, 642 aa, Zea Mays
MRGRLRMTAIRPACSSMMIRKTSSSSRPAGSASSSRRLSTSCLWRVMIQPGRSSVPCFVAACTKNSWTKLAVEIDSPQAMSLDQLADPANSTCAQVIHSKSEICSHRWLPGSSNRNCKKQKYTNDDFKGKDLEIDGPGNLYMDHQSSPNERPIKAADHENNSKESMMGNLGDATVRAADLIGSMAKNMDAQQAARAADTPNFSSEVPEGKGKNDDFKGKDLEIGGPRNLYMDHQSSPNERPIKAADHENNSKESMIENLEEPTVRAADLIGSMAKNMDTQQAARAAEDTPNFSSKVPEGKGKNDQHDNYVLPSLELSLKRSRSCGDGANDTVNDDEQRNSALRRSNLSAFTRYHTSAASNQGGTGLVGSCSPHDNSSEAVKTDSTYNMKSNSDAAAIKQGSNGSSNNNDMGSTTKDVVTKPSTNNERVMLPSAIKANGYTSTFHPVQQWMVPDNATAGKAKADEVANNAGRNSHPGDVQSNLTQQHRPTLHYVHFENSGSGALQCGSSNVFDPPLEGQATNNYGVKAGSNSGSNKGQNNGSTAGASTAAANAGRTDTEIRAIDKSGPGGGSGSGNDTYVRRLAASMTPRQEQLKKYREKKKDRNFGKKVRYQSRKRLADQRPRVRGQFVKQAVQNQEGDGER

SEQ ID NO: 189708 - protein, 647 aa, Zea Mays
MNLRTFGSMCGDNGVTVGSGSESGIQTQKCTKSKGANESGNNSGSNDDEAGMGLNARDDSDNGSGTQAQNSWTKLAVEIDSPQAMSLDQLADPANSTCAQVIHSKSEICSHRWLPGSSNRNCKKQKYTNDDFKGKDLEIDGPGNLYMDHQSSPNERPIKAADHENNSKESMMGNLGDATVRAADLIGSMAKNMDAQQAARAADTPNFSSEVPEGKGKNDDFKGKDLEIGGPRNLYMDHQSSPNERPIKAADHENNSKESMIENLEEPTVRAADLIGSMAKNMDTQQAARAAEDTPNFSSKVPEGKGKNDQHDNYVLPSLELSLKRSRSCGDGANDTVNDDEQRNSALRRSNLSAFTRYHTSAASNQGGTGLVGSCSPHDNSSEAVKTDSTYNMKSNSDAAAIKQGSNGSSNNNDMGSTTKDVVTKPSTNNERVMLPSAIKANGYTSTFHPVQQWMVPDNATAGKAKADEVANNAGRNSHPGDVQSNLTQQHRPTLHYVHFENSGSGALQCGSSNVFDPPLEGQATNNYGVKAGSNSGSNKGQNNGSTAGASTAAANAGRTDTEIRAIDKSGPGGGSGSGNDTYVRRLAASMTPRQEQLKKYREKKKDRNFGKKVRYQSRKRLADQRPRVRGQFVKQAVQNQEGDGER

SEQ ID NO: 189709 - protein, 563 aa, Zea Mays
MSSSDAMSTVFKCLSKGAVDFLVKPIRKNELKNLWQHVWRQRCHSSSGSGSESGIQTQKCTKSKGANESGNNSGSNDDEAGMGLNARDDSDNGSGTQAQNSWTKLAVEIDSPQAMSLDQLADPANSTCAQVIHSKSEICSHRWLPGSSNRNCKKQKYTNDDFKGKDLEIGGPRNLYMDHQSSPNERPIKAADHENNSKESMIENLEEPTVRAADLIGSMAKNMDTQQAARAAEDTPNFSSKVPEGKDGANDTVNDDEQRNSALRRSNLSAFTRYHTSAASNQGGTGLVGSCSPHDNSSEAVKTDSTYNMKSNSDAAAIKQGSNGSSNNNDMGSTTKDVVTKPSTNNERVMLPSAIKANGYTSTFHPVQQWMVPDNATAGKAKADEVANNAGRNSHPGDVQSNLTQQHRPTLHYVHFENSGSGALQCGSSNVFDPPLEGQATNNYGVKAGSNSGSNKGQNNGSTAGASTAAANAGRTDTEIRAIDKSGPGGGSGSGNDTYVRRLAASMTPRQEQLKKYREKKKDRNFGKKVRYQSRKRLADQRPRVRGQFVKQAVQNQEGDGER

SEQ ID NO: 189710 - protein, 806 aa, Zea Mays
MGGACQQLSVDGDARTPANDRDPAGLLQHDDTENQQQQQACWERFLLKETLNVLLVESDDSTRQVVSALLRCCMYQVISAENGQQAWAYLEDKRNNIDLVLTEVFMPGVSGISLLSRIMSHNICKNIPVIMMSSSDAMSTVFKCLSKGAVDFLVKPIRKNELKNLWQHVWRQRCHSSSGSGSESGIQTQKCTKSKGANESGNNSGSNDDEAGMGLNARDDSDNGSGTQNSWTKLAVEIDSPQAMSLDQLADPANSTCAQVIHSKSEICSHRWLPGSSNRNCKKQKYTNDDFKGKDLEIDGPGNLYMDHQSSPNERPIKAADHENNSKESMMGNLGDATVRAADLIGSMAKNMDAQQAARAADTPNFSSEVPEGKGKNDDFKGKDLEIGGPRNLYMDHQSSPNERPIKAADHENNSKESMIENLEEPTVRAADLIGSMAKNMDTQQAARAAEDTPNFSSKVPEGKGKNDQHDNYVLPSLELSLKRSRSCGDGANDTVNDDEQRNSALRRSNLSAFTRYHTSAASNQGGTGLVGSCSPHDNSSEAVKTDSTYNMKSNSDAAAIKQGSNGSSNNNDMGSTTKDVVTKPSTNNERVMLPSAIKANGYTSTFHPVQQWMVPDNATAGKAKADEVANNAGRNSHPGDVQSNLTQQHRPTLHYVHFENSGSGALQCGSSNVFDPPLEGQATNNYGVKAGSNSGSNKGQNNGSTAGASTAAANAGRTDTEIRAIDKSGPGGGSGSGNDTYVRRLAASMTPRQEQLKKYREKKKDRNFGKKVRYQSRKRLADQRPRVRGQFVKQAVQNQEGDGER

SEQ ID NO: 189711 - protein, 677 aa, Zea Mays
MSSSDAMSTVFKCLSKGAVDFLVKPIRKNELKNLWQHVWRQRCHSSSGSGSESGIQTQKCTKSKGANESGNNSGSNDDEAGMGLNARDDSDNGSGTQAQNSWTKLAVEIDSPQAMSLDQLADPANSTCAQVIHSKSEICSHRWLPGSSNRNCKKQKYTNDDFKGKDLEIDGPGNLYMDHQSSPNERPIKAADHENNSKESMMGNLGDATVRAADLIGSMAKNMDAQQAARAADTPNFSSEVPEGKGKNDDFKGKDLEIGGPRNLYMDHQSSPNERPIKAADHENNSKESMIENLEEPTVRAADLIGSMAKNMDTQQAARAAEDTPNFSSKVPEGKGKNDQHDNYVLPSLELSLKRSRSCGDGANDTVNDDEQRNSALRRSNLSAFTRYHTSAASNQGGTGLVGSCSPHDNSSEAVKTDSTYNMKSNSDAAAIKQGSNGSSNNNDMGSTTKDVVTKPSTNNERVMLPSAIKANGYTSTFHPVQQWMVPDNATAGKAKADEVANNAGRNSHPGDVQSNLTQQHRPTLHYVHFENSGSGALQCGSSNVFDPPLEGQATNNYGVKAGSNSGSNKGQNNGSTAGASTAAANAGRTDTEIRAIDKSGPGGGSGSGNDTYVRRLAASMTPRQEQLKKYREKKKDRNFGKKVRYQSRKRLADQRPRVRGQFVKQAVQNQEGDGER

SEQ ID NO: 189712 - protein, 644 aa, Zea Mays
MRGRLRMTAIRPACSSMMIRKTSSSSRPAGSASSSRRLSTSCLWRVMIQPGRSSVPCFVAACTKAQNSWTKLAVEIDSPQAMSLDQLADPANSTCAQVIHSKSEICSHRWLPGSSNRNCKKQKYTNDDFKGKDLEIDGPGNLYMDHQSSPNERPIKAADHENNSKESMMGNLGDATVRAADLIGSMAKNMDAQQAARAADTPNFSSEVPEGKGKNDDFKGKDLEIGGPRNLYMDHQSSPNERPIKAADHENNSKESMIENLEEPTVRAADLIGSMAKNMDTQQAARAAEDTPNFSSKVPEGKGKNDQHDNYVLPSLELSLKRSRSCGDGANDTVNDDEQRNSALRRSNLSAFTRYHTSAASNQGGTGLVGSCSPHDNSSEAVKTDSTYNMKSNSDAAAIKQGSNGSSNNNDMGSTTKDVVTKPSTNNERVMLPSAIKANGYTSTFHPVQQWMVPDNATAGKAKADEVANNAGRNSHPGDVQSNLTQQHRPTLHYVHFENSGSGALQCGSSNVFDPPLEGQATNNYGVKAGSNSGSNKGQNNGSTAGASTAAANAGRTDTEIRAIDKSGPGGGSGSGNDTYVRRLAASMTPRQEQLKKYREKKKDRNFGKKVRYQSRKRLADQRPRVRGQFVKQAVQNQEGDGER

SEQ ID NO: 189713 - protein, 536 aa, Zea Mays
MSSSDAMSTVFKCLSKGAVDFLVKPIRKNELKNLWQHVWRQRCHSAQNSWTKLAVEIDSPQAMSLDQLADPANSTCAQVIHSKSEICSHRWLPGSSNRNCKKQKYTNDDFKGKDLEIGGPRNLYMDHQSSPNERPIKAADHENNSKESMIENLEEPTVRAADLIGSMAKNMDTQQAARAAEDTPNFSSKVPEGKGKNDQHDNYVLPSLELSLKRSRSCGDGANDTVNDDEQRNSALRRSNLSAFTRYHTSAASNQGGTGLVGSCSPHDNSSEAVKTDSTYNMKSNSDAAAIKQGSNGSSNNNDMGSTTKDVVTKPSTNNERVMLPSAIKANGYTSTFHPVQQWMVPDNATAGKAKADEVANNAGRNSHPGDVQSNLTQQHRPTLHYVHFENSGSGALQCGSSNVFDPPLEGQATNNYGVKAGSNSGSNKGQNNGSTAGASTAAANAGRTDTEIRAIDKSGPGGGSGSGNDTYVRRLAASMTPRQEQLKKYREKKKDRNFGKKVRYQSRKRLADQRPRVRGQFVKQAVQNQEGDGER

SEQ ID NO: 189714 - protein, 662 aa, Zea Mays
MNLRTFGSMCGDNGVTVSPACSKKKKVYLFGTQSSGSGSESGIQTQKCTKSKGANESGNNSGSNDDEAGMGLNARDDSDNGSGTQAQNSWTKLAVEIDSPQAMSLDQLADPANSTCAQVIHSKSEICSHRWLPGSSNRNCKKQKYTNDDFKGKDLEIDGPGNLYMDHQSSPNERPIKAADHENNSKESMMGNLGDATVRAADLIGSMAKNMDAQQAARAADTPNFSSEVPEGKDDFKGKDLEIGGPRNLYMDHQSSPNERPIKAADHENNSKESMIENLEEPTVRAADLIGSMAKNMDTQQAARAAEDTPNFSSKVPEGKGKNDQHDNYVLPSLELSLKRSRSCGDGANDTVNDDEQRNSALRRSNLSAFTRYHTSAASNQGGTGLVGSCSPHDNSSEAVKTDSTYNMKSNSDAAAIKQGSNGSSNNNDMGSTTKDVVTKPSTNNERVMLPSAIKANGYTSTFHPVQQWMVPDNATAGKAKADEVANNAGRNSHPGDVQSNLTQQHRPTLHYVHFENSGSGALQCGSSNVFDPPLEGQATNNYGVKAGSNSGSNKGQNNGSTAGASTAAANAGRTDTEIRAIDKSGPGGGSGSGNDTYVRRLAASMTPRQEQLKKYREKKKDRNFGKKVRYQSRKRLADQRPRVRGQFVKQAVQNQEGDGER

SEQ ID NO: 189715 - protein, 665 aa, Zea Mays
MGGACQQLSVDGDARTPANDRDPAGLLQHDDTENQQQQQACWERFLLKETLNVLLVESDDSTRQVVSALLRCCMYQVISAENGQQAWAYLEDKRNNIDLVLTEVFMPGVSGISLLSRIMSHNICKNIPVIMMSSSDAMSTVFKCLSKGAVDFLVKPIRKNELKNLWQHVWRQRCHSNSWTKLAVEIDSPQAMSLDQLADPANSTCAQVIHSKSEICSHRWLPGSSNRNCKKQKYTNDDFKGKDLEIGGPRNLYMDHQSSPNERPIKAADHENNSKESMIENLEEPTVRAADLIGSMAKNMDTQQAARAAEDTPNFSSKVPEGKGKNDQHDNYVLPSLELSLKRSRSCGDGANDTVNDDEQRNSALRRSNLSAFTRYHTSAASNQGGTGLVGSCSPHDNSSEAVKTDSTYNMKSNSDAAAIKQGSNGSSNNNDMGSTTKDVVTKPSTNNERVMLPSAIKANGYTSTFHPVQQWMVPDNATAGKAKADEVANNAGRNSHPGDVQSNLTQQHRPTLHYVHFENSGSGALQCGSSNVFDPPLEGQATNNYGVKAGSNSGSNKGQNNGSTAGASTAAANAGRTDTEIRAIDKSGPGGGSGSGNDTYVRRLAASMTPRQEQLKKYREKKKDRNFGKKVRYQSRKRLADQRPRVRGQFVKQAVQNQEGDGER

SEQ ID NO: 189716 - protein, 570 aa, Zea Mays
MVLNGSSRVGWCSENAQNSWTKLAVEIDSPQAMSLDQLADPANSTCAQVIHSKSEICSHRWLPGSSNRNCKKQKYTNDDFKGKDLEIDGPGNLYMDHQSSPNERPIKAADHENNSKESMMGNLGDATVRAADLIGSMAKNMDAQQAARAADTPNFSSEVPEGKGKNDDFKGKDLEIGGPRNLYMDHQSSPNERPIKAADHENNSKESMIENLEEPTVRAADLIGSMAKNMDTQQAARAAEDTPNFSSKVPEGKDGANDTVNDDEQRNSALRRSNLSAFTRYHTSAASNQGGTGLVGSCSPHDNSSEAVKTDSTYNMKSNSDAAAIKQGSNGSSNNNDMGSTTKDVVTKPSTNNERVMLPSAIKANGYTSTFHPVQQWMVPDNATAGKAKADEVANNAGRNSHPGDVQSNLTQQHRPTLHYVHFENSGSGALQCGSSNVFDPPLEGQATNNYGVKAGSNSGSNKGQNNGSTAGASTAAANAGRTDTEIRAIDKSGPGGGSGSGNDTYVRRLAASMTPRQEQLKKYREKKKDRNFGKKVRYQSRKRLADQRPRVRGQFVKQAVQNQEGDGER

SEQ ID NO: 189717 - protein, 506 aa, Zea Mays
MVLNGSSRVGWCSENAQNSWTKLAVEIDSPQAMSLDQLADPANSTCAQVIHSKSEICSHRWLPGSSNRNCKKQKYTNDDFKGKDLEIGGPRNLYMDHQSSPNERPIKAADHENNSKESMIENLEEPTVRAADLIGSMAKNMDTQQAARAAEDTPNFSSKVPEGKGKNDQHDNYVLPSLELSLKRSRSCGDGANDTVNDDEQRNSALRRSNLSAFTRYHTSAASNQGGTGLVGSCSPHDNSSEAVKTDSTYNMKSNSDAAAIKQGSNGSSNNNDMGSTTKDVVTKPSTNNERVMLPSAIKANGYTSTFHPVQQWMVPDNATAGKAKADEVANNAGRNSHPGDVQSNLTQQHRPTLHYVHFENSGSGALQCGSSNVFDPPLEGQATNNYGVKAGSNSGSNKGQNNGSTAGASTAAANAGRTDTEIRAIDKSGPGGGSGSGNDTYVRRLAASMTPRQEQLKKYREKKKDRNFGKKVRYQSRKRLADQRPRVRGQFVKQAVQNQEGDGER

SEQ ID NO: 189718 - protein, 506 aa, Zea Mays
MAPWVWVALQAAAVAASAAEALSLDVHHRYSATVREWAGHRAPPAGTAEYYAALAGHDLRRRSLAGGGEVAFADGNDTYRLNELGFLHYAVVALGTPNVTFLVALDTGSDLFWVPCDCINCAPLVSPNYRDLKFDTYSPQKSSTSRKVPCSSNLCDEQSACRSASSSCPYSIQYLSDNTSSTGVLVEDVLYLVTEYGRQPKIVTAPITFGCGRTQTGSFLGTAAPNGLLGLGMDTISVPSLLASQGVAAANSFSMCFAQDGHGRINFGDTGSSDQQETPLNIPYYNISITGATVGSKSIHTKFNAIVDSGTSFTALSDPMYTQITSSFNSQVQDKPSQLDSSLPFEFCYSISPKASTNPPNISFTAEGGSVFPVNDPIITITDSVSNPMAYCLAVMKSEGVNLIGENFMSGLKVVFDRERKVLGWKNFDCYSVGNSRSNLPVNPNPSGVPPKPALGPNSYTPEATKGASPNGTQVNVLQPSASFSPKLRCNRNVLVAAALLFLVIL

SEQ ID NO: 189719 - protein, 132 aa, Zea Mays
MSPAAGGPAPAPAPAQSAAAVPQAIAVPPESGRSAPEASRRDPPAHPEGADPTNAAARKTTWSVLAQTPAAAAEATPEGGGIIGGDASWPALVESTRACPKSGSSDSLNALSDVSGPPPQLMCNLILSTSHQ

SEQ ID NO: 189720 - protein, 66 aa, Zea Mays
MAAREGTLFKGKIILLRASKCFYGSLYSCPKRSDHPAFSLWIIIIIRCPVERFGDRLLCFSWIKVT

SEQ ID NO: 189721 - protein, 448 aa, Zea Mays
MRRTIAAAKQSKSDITLVAEFQQDTRTHSRNPKATGTPPLALVQRLKSLCVYRCSAFSCPTTPPSQPTERHLTYPNQPATVARMEPYLQWLGIQLMELGGTAMSLLLLLVLAASPLQQARAVGGGRPRVPAILVFGDSIVDTGNNNAVLTLTKSNFRPYGKDLNGGVPTGRFSNGRIPTDFVASRLGLKDLVPAYLGTDLSDDDLCTGVSFASGGTGYDPLTSTLVEELNMFAEYKERLAGVVGDEAAAAGIVAESLFLVCAGSDDIANNYYLAPVRPLQYDISAYVDFLVEQACDFIRQLYQQGARRIAVLGMPPVGCVPSQRTLAGGLARDCDPARNHAAQLYNSRLKEEVVLLQKELACQRIGYVDIYDVLQDMITNPCKYGFEVSTRGCCGTGDLEVSLLCNQLTAPTCPDDRKYVFWDSFHPTEKAYEIIVDYLFPRYIENLL

SEQ ID NO: 189722 - protein, 454 aa, Zea Mays
MRRTIAAAKQSKSDITLVAEFQQDTRTHSRNPKATGTPPLALVQRLKSLCVYRCSAFSCPTTPPSQPTERHLTYPNQPATVARMEPYLQWLGIQLMELGGTAMSLLLLLVLAASPLQQARAVGGGRPRVPAILVFGDSIVDTGNNNAVLTLTKSNFRPYGKDLNGGVPTGRFSNGRIPTDFVASRLGLKDLVPAYLGTDLSDDDLCTGVSFASGGTGYDPLTSTLVAVLPMQEELNMFAEYKERLAGVVGDEAAAAGIVAESLFLVCAGSDDIANNYYLAPVRPLQYDISAYVDFLVEQACDFIRQLYQQGARRIAVLGMPPVGCVPSQRTLAGGLARDCDPARNHAAQLYNSRLKEEVVLLQKELACQRIGYVDIYDVLQDMITNPCKYGFEVSTRGCCGTGDLEVSLLCNQLTAPTCPDDRKYVFWDSFHPTEKAYEIIVDYLFPRYIENLL

SEQ ID NO: 189723 - protein, 357 aa, Zea Mays
MVGKGSPRFNIGGSPKLRRFIPTTSATKKKASPKCSGAKKSGSSPRVVKQRADWNPGIERSLVDILHEFKESGYRGDNGWNSEGWNRMVKEFHDEEGQLKRDYKMLKAAKQQSGSTWNEKRNMVEGPPALWENLMVTFPKIKKFNNNKATFPLFDALGELYDGHLAEGTWNCTSLEAPQEEEPNEQLQDAEDGPQGFDLNVVHDVDDEVDDALTERNEDMLEGRANTLSRDEESGQRRPVASRNKQEKEPKKPRKTDNIENMMNKYLEMRSKQVEDEVAREKEAREKETREKEAAQSEDFSIKRCISVLNTMEEVTKLEKAKAYSVFTKSKENRETFICACEADQESALIWLRNEMA

SEQ ID NO: 189724 - protein, 230 aa, Zea Mays
MAASASSLLAAPASSSCGAISPQLPRGAPAAASVASPSRHSCYLLRASPSRRHRSRFVANAAPTMQPPAESRVSTVVDVDLGDRSYPIYIGAGLLDEPDLLQRHVHGKRVLVVTNTTVAPLYLDKVTWALTHNNLNVSVESVILPDGEKYKNMDTLMKVFDKAVESRFDRRCTFVALGGGVIGDMCGFAAAAFLRGVNFIQIPTTLMAQGASFRHCRGSKVWAHKGCTIL

SEQ ID NO: 189725 - protein, 404 aa, Zea Mays
MAASASSLLAAPASSSCGAISPQLPRGAPAAASVASPSRHSCYLLRASPSRRHRSRFVANAAPTMQPPAESRVSTVVDVDLGDRSYPIYIGAGLLDEPDLLQRHVHGKRVLVVTNTTVAPLYLDKVTWALTHNNLNVSVESVILPDGEKYKNMDTLMKVFDKAVESRFDRRCTFVALGGGVIGDMCGFAAAAFLRGVNFIQIPTTLMAQVDSSVGGKTGINHPLGKNLIGAFYQPQCVLIDTNTLNTLPDRELASGIAEVVKYGLIRDAPFFEWQEKNMPKLLAREPNALAYAIKRSCENKAEVVAQDEKESGLRATLNLGHTFGHAIETGTGYGAWLHGEAVAAGTVMATDMSHRLGWIDDSIRKRVVDILKQAKLPIAPPETMTVEKFKNIMAICRRTKCRS

SEQ ID NO: 189726 - protein, 370 aa, Zea Mays
MGVISTVLGFFGFGFGLSAGIVIGYFFFIYVQPTDVKDVKVRPLVEYDSKSLEGILPEIPLTAQDIAKPIIAENTAKYNIDTVEFETLTLGSLPPTFQGMKVYITEEQELIMEPSLKWAANPNITVVVKAYGLKATIQIVDLQVFASPRITLKPLVPTFPCFAKILVSLMEKPHVDFGLKLLGADVMAIPGLYIFVQTMDPNDVQNEKSRGELTLELIYKPFKEEDIEKEDTESADVIEKAPDGTPAGGGLLYVIVHEAQDLEGKHHTNPYAKIIFKGEEKKTKVIKKNRDPRWEDEFEFVCEEPPVNDKLHVDVLSKASKKGLIHGKETLGYIDISLADVISNKRINEKYHLIDSKNGQIQIELQWRTS

SEQ ID NO: 189727 - protein, 348 aa, Zea Mays
MGNAANNDSAVVAIDFAEETRKSYEGYKQEHDKKVSLLRKQEVKGVDYLKMEKNKMEIESLESKMLVANQSIETTTSEIIRLRESELFPQLLELIAGLMSMWRGMYECHQVQTHIVQQLEYLNNARNTNPTSNVHRQAALQLEIEVDRWYSAFCSLVKSQRDYVYSLTGWLRLSLFCHHDPLTKAQNSDIYGLCEEWQLAIDRIPDKVASEGIKTLLTVIHAVVIQQAEEHKQKKRSESAFKEFEKKAEELRALESKYVGAEGYREMSRKSSVADKRAKVEALRSRADEEKIKYEKSIGVTRAMTLNNLQTGFPNVFQAMTGFASVCMEAFESVYNFKRSSDPKRLLT

SEQ ID NO: 189728 - protein, 250 aa, Zea Mays
MSMWRGMYECHQVQTHIVQQLEYLNNARNTNPTSNVHRQAALQLEIEVDRWYSAFCSLVKSQRDYVYSLTGWLRLSLFCHHDPLTKAQNSDIYGLCEEWQLAIDRIPDKVASEGIKTLLTVIHAVVIQQAEEHKQKKRSESAFKEFEKKAEELRALESKYVGAEGYREMSRKSSVADKRAKVEALRSRADEEKIKYEKSIGVTRAMTLNNLQTGFPNVFQAMTGFASVCMEAFESVYNFKRSSDPKRLLT

SEQ ID NO: 189729 - protein, 262 aa, Zea Mays
MNEPNPSISSVTKSGTELPRSSQVPYKIQPRLASPTLGLAVAATMGRSPCCEKAHTNKGAWTKEEDDRLVAYIKAHGEGCWRSLPKAAGLVRCGKSCRLRWINYLRPDLKRGNFTEEEDELIIKLHSLLGNKWSLIAGRLPGRTDNEIKNYWNTHIRRKLLSRGIDPVTHRPINEHTSNITISFEDWGQGKALKCPDLNLDLCISPPCQEEEEAMLLRPVKREEAGLCFSCSLGLPKSADCKCSNFLGLRTAMLDFRRLEMK

SEQ ID NO: 189730 - protein, 529 aa, Zea Mays
MAGTRWGRWLGLVTAVWVQCISGNNYTFSNYSHALKTLMGLTQLQLNGLSVAKDVGKAFGLLAGLASDRVPTWLLLAVGSLEGLLGYGAQWMVVSGAVAPLPYWQMCVFLCLGGNSTTWMNTAVLVTCIRNFRRSRGPVSGLLKGYVGLSTAIFTDTCSALFADDPASFLVMLAVVPAAVCALAMVFLREGAAAADEDDDGRCFAAINSLAVAIALYLLAADLTGLGGGGGVVFVAVLLVLLASPAAVPAILAWKSWAETRKAANADLEEADSLAAAAPLLLVAKEARAPGERPRLGEEHTIAQTLTSLDFWLMFASFLMGVGTGLAVMNNLGQMGVAMGYVDVSLFVSMTSIWGFFGRIASGTISEHFIKTRGIPRPLWNAASQVLMAVGYIVMALAMPGSLFIGSVVVGICYGVRLAVTVPTASELFGLKYYGLVYNVLILNLPLGSFLFSGLLAGLLYDAEATAVPGGGNTCVGAHCYRLVFLIMALACVVGFGLDVLLCVRTKRVYAKIHESKRLSRSAVAERVG

SEQ ID NO: 189731 - protein, 134 aa, Zea Mays
MFHYMALADDRQRIMPMPNDRLPPRGQPLAYPEAVLLVDPINPELRGEMSLSAHYAGDDLSPKFTNGEYWKKVHGPIFMYLNSSWDASDPTMLWEDAKVQVIIFLTRKCSRIVQPEPASNYCGAAYLYACHEYY

SEQ ID NO: 189732 - protein, 66 aa, Zea Mays
MIATILTKYGGTLYFGILCTKTSVFYDHRDLCIFKRNFMALLVVFYASTKKQSYCVLHQIYDTFDV

SEQ ID NO: 189733 - protein, 91 aa, Zea Mays
MYTRFASWGSSIFGPPSLATGGGWPFWEGARRWTFRCCCTGKILLGISNLFIFSLDQSRIKPIDLHANIVATNVTYEYTICKSTSDFAARL

SEQ ID NO: 189734 - protein, 623 aa, Zea Mays
MHEILAGMSTHIIQLLQGLCSDGLWRYGVFWSFKSETNGWILTWGDGYVNKMIEDWQMGDLSASPTVRKNQTIPSSWCKKSYPFCPIEAALMRMPSHLYPLGEGIIGKVALTGQHCWISANELCSTAMHKYQEDWQLQFAAGIKTVLLVPVVPHGVLQLGSLDTVFESAVLVALIKDMFHKICDASVSHASLSTGSAYSNNLSLPTATLSINHPDVNLIYSSAQIVNADHHSLTHPFSTSEIPILEDITIGSYRTIPTGWPNGLLGDNGTIGHEYFEGFSLTDMAHWNQENTHGSTIVVNDGAMLSNTSIHSEFHGDVMVMSREEHELFTWRCRLKQEPTSPALPQLNDNSADLYVQLETNNYAELLLDTIIYQTGHTSNIESAPSAESPISCKTQVKKDHSLRVDESPISDIPGRQDLSPISINEGFISCAMTDGRVEINKTIPEECLVENTHRINSAEIKRRCRKVELQRPRPRDRQLIQDRMKGLRELIPNASKCSIDALLDKTIAYMLFLQSVSEKAEKIQNTLEDKESHDETKKQLERCPLRVEELNQPGHLLIEMLCEDYEVFLEMAHVLKGLKVSILKGVLEYRSDKFCARFVIEGSDGFNQMQILCPLMHLLRRR

SEQ ID NO: 189735 - protein, 662 aa, Zea Mays
MAMWLLMKEDVLCTCENGCHLQFNRKVKGLKAAHAQAVHHILVSAGMSTHIIQLLQGLCSDGLWRYGVFWSFKSETNGWILTWGDGYVNKMIEDWQMGDLSASPTVRKNQTIPSSWCKKSYPFCPIEAALMRMPSHLYPLGEGIIGKVALTGQHCWISANELCSTAMHKYQEDWQLQFAAGIKTVLLVPVVPHGVLQLGSLDTVFESAVLVALIKDMFHKICDASVSHASLSTGSAYSNNLSLPTATLSINHPDVNLIYSSAQIVNADHHSLTHPFSTSEIPILEDITIGSYRTIPTGWPNGLLGDNGTIGHEYFEGFSLTDMAHWNQENTHGSTIVVNDGAMLSNTSIHSEFHGDVMVMSREEHELFTWRCRLKQEPTSPALPQLNDNSADLYVQLETNNYAELLLDTIIYQTGHTSNIESAPSAESPISCKTQVKKDHSLRVDESPISDIPGRQDLSPISINEGFISCAMTDGRVEINKTIPEECLVENTHRINSAEIKRRCRKVELQRPRPRDRQLIQDRMKGLRELIPNASKCSIDALLDKTIAYMLFLQSVSEKAEKIQNTLEDKESHDETKKQLERCPLRVEELNQPGHLLIEMLCEDYEVFLEMAHVLKGLKVSILKGVLEYRSDKFCARFVIEGSDGFNQMQILCPLMHLLRRR

SEQ ID NO: 189736 - protein, 639 aa, Zea Mays
MHEILAGMSTHIIQLLQGLCSDGLWRYGVFWSFKSETNGWILTWGDGYVNKMIEDWQMGDLSASPTVRKNQTIPSSWCKKSYPFCPIEAALMRMPSHLYPLGEGIIGKVALTGQHCWISANELCSTAMHKYQEDWQLQFAAGIKTVLLVPVVPHGVLQLGSLDTVFESAVLVALIKDMFHKICDASVSHASLSTGSAYSNNLSLPTATLSINHPDVNLIYSSAQIVNADHHSLTHPFSTSEIPILEDITIGSYRTIPTGWPNGLLGDNGTIGHEYFEGFSLTDMAHWNQENTHGSTIVVNDGAMLSNTSIHSEFHGDVMVMSREEHELFTWRCRLKQEPTSPALPQLNDNSADLYVQLETNNYAELLLDTIIYQTGHTSNIESAPSAESPISCKTQVKKDHSLRVDESPISDIPGRQDLSPISINEGFISCAMTDGRVEINKTIPEECLVENTHRINSAEIKRRCRKVELQRPRPRDRQLIQDRMKGLRELIPNASKCSIDALLDKTIAYMLFLQSVSEKAEKRRCPMPYFCFAVTLRQIQNTLEDKESHDETKKQLERCPLRVEELNQPGHLLIEMLCEDYEVFLEMAHVLKGLKVSILKGVLEYRSDKFCARFVIEGSDGFNQMQILCPLMHLLRRR

SEQ ID NO: 189737 - protein, 537 aa, Zea Mays
MAMWLLMKEDVLCTCENGCHLQFNRKVKGLKAAHAQAVHHILVSAGMSTHIIQLLQGLCSDGLWRYGVFWSFKSETNGWILTWGDGYVNKMIEDWQMGDLSASPTVRKNQTIPSSWCKKSYPFCPIEAALMRMPSHLYPLGEGIIGKVALTGQHCWISANELCSTAMHKYQEDWQLQFAAGIKTVLLVPVVPHGVLQLGSLDTVFESAVLVALIKDMFHKICDASVSHASLSTGSAYSNNLSLPTATLSINHPDVNLIYSSAQIVNADHHSLTHPFSTSEIPILEDITIGSYRTIPTGWPNGLLGDNGTIGHEYFEGFSLTDMAHWNQENTHGSTIVVNDGAMLSNTSIHSEFHGDVMVMSREEHELFTWRCRLKQEPTSPALPQLNDNSADLYVQLETNNYAELLLDTIIYQTGHTSNIESAPSAESPISCKTQVKKDHSLRVDESPISDIPGRQDLSPISINEGFISCAMTDGRVEINKTIPEECLVENTHRINSAEIKRRCRKVELQRPRPRDRQLIQDRMKGLRELIPNASKH

SEQ ID NO: 189738 - protein, 115 aa, Zea Mays
MEKLSVLGTTRLVLVWVYQHIIFLEREVDQMNQLQVGINMINMFQTDREKKSFNFIDVFQDLPGQLSLLIRLCQLIPISLCNARRKDKRLSKEESTILYSQPTITTHLTYVCLYQ

SEQ ID NO: 189739 - protein, 188 aa, Zea Mays
MEKALWFQFTIGSLPLYAVVFVGYWAYGSSTSGYLLNSVTGPVWVKAVANLSAFFQTVIALHIFASPMYEFLDTKYGSGRGGPFEIHNVAFRVAVRGGYLTVNTLVAAVLPFLGDFMSLTGALSTFPLTFVLANHMYLMVKGPKLGAIQKSWHWLNVLGFTALAVAAAVSAIRLIMRDSSTYHFFADL

SEQ ID NO: 189740 - protein, 341 aa, Zea Mays
MDAASASSSWQDLPPRLQSYDNRAPLLLPVKIMDAAADDKPEISDDTAHQISVDPWYQVGFVLTTGVNSAYVLGYSGSIMVPLGWIGGTCGLLLAAAISMYANALLARLHEVGGKRHIRYRDLAGHIYGPKIYGLTWALQYINLFMINTGFIILAGQALKATYGLFSDDGVLKLPYCIAISGFVCALFAIGIPYLSALRIWLGFSTLFSLMYIVIAVVLSSRDGITAPARDYSIPKSSQSTRVFTTIGSIADLVFAYNTGMLPEIQATIRPPVVKNMEKALWFQFTIGSLPLYAVVFVGYWAYGSSTSGYLLNSVTGPVWVKAVANLSAFFQTVIALHPHV

SEQ ID NO: 189741 - protein, 267 aa, Zea Mays
MAAAVLAPKPPPPLPTRAFPSSSPSRFAPAFISPRHPLRRLLLRPIPCASSPSSVLMPNPDLETEPAHDGDGDGDEAPPESRPRRIALFVEPSPFAYVSGYKNRFQNFIKYLREMGDEVIVVTTHEGVPQEFHGAKLIGSWSFPCPWYQKVPLSLALSPRIIAEVARFKPDIIHASSPGIMVFGALIIAKLLCVPLVMSYHTHVPIYIPRYTFSWLVKPMWLIIKFLHRAADLTLVPSVAIGRDLQAARVTAGMVNQKSHLYFMLDA

SEQ ID NO: 189742 - protein, 86 aa, Zea Mays
MQHAYPPSRIIEMTAYRSAHKFFSSIFFFHSQFVSGRTIFLYFSHHQVINKLGMNIQYIKYLFDILHLCNFFYFLFFFWVNSRCML

SEQ ID NO: 189743 - protein, 968 aa, Zea Mays
MASPLSSSSSSTSTSTSTLLRLICLCTALPVALQAAAARPPNVTVGALFTFDSVIGRSARTAIQLAVDDVNRDPAVLRDTNLSVIFQDTKCSGFVGTIQALELMERHVVAVVGPQSSGIAHVVSHVANQLRVPLLSFAATDPALASSQYPYFVRATHDDRFQMAAVADVVAHHGWREVTAVYVDNDYGRGGVVALGDALEALRARVSYRAAFPPGADRAALADLLVRANMMESRVFVVHASPDSGLDVFAAARSLDMMATGYVWIATDWLAAAIDAAGAGAAAAAGNIQGVLMLRQYTPDSDAKASLVSRFAAKQYINAYGLFAYDSVWMAARAIDQFLDDNASGGNVSFSADRNIRDANGSALGLSALRVFDQGEQLLRKVMLANFTGVTGSVRFQLDADGSGGATLINPAYEILNVGGTGVRRVAYWSNYTRLSVEAPRLLADGGPPPNSNNTTTQQQQQMYSVIWPGDTTAKPRGWVFPNNGKPLRIGVPYRTTYKQFVSKDRSSPDGVSGYCVDVFNAAVALLPYPVPASFVLFGDGVKNPSYNDLVQRVADGFFDAAVGDISIVTNRTRVVDFTQPYVESGLVIVSTVKAKNSNEWAFLKPFTPGMWAIIGAFFLFVGAVVWILEHRFNPEFRGSPRRQMVTIFWREHREHSWPLRPHHLALRGAHHQLQLHGQPDVHPDGAAAVHGHPGPGQPPLQQRPHRLPGRLLRPELHDGRAGRPSVAPPGAGHRRLRRQPAARAQQRRRGGHRRRAAVRGALPLHQLPVQDGGPGVHQERMGIRVPARLPPGGGPVDGHPDAVRERRPAADPRQVAQPRDVRVAEHRRRGRRQAQSGQLLGPLPHLRRRLLRRPPHLLRQDTLPVLQVPRPRDHRRCRPVPRPGEEPAAARQAHQHPGPHVLCRHEGGRGEEGHPEQVRQATRRVHGRQELHLRRAVLVTAVLHVAGVRRAGGVLLQDTFFVCADLT

SEQ ID NO: 189744 - protein, 458 aa, Zea Mays
MSARGVRPGVLHHKENNPADAQPGKRQRTAAGAGRQPLAAAPPPQEEPMVFSGREDVDALLNEKMKGKNKMDYKGKSEQMMEYIKKLRACTKWLLEREDANLVEIERITGQLDATHKQHSEIVAVLKNTIEETKSICEELQKQCASLQEALKTVEAEKMDALRSLGDEREARMGVESLRNGLLEDLNRAKLEEKRLNDQIKMLQDTNKRLQEYNTSLQQYNCNLQADATKNAETIVKLQKEKNTMVETMNGLKDHANSVKMQLDIARSLQNEATKQKTDLLKEVESIRMELQRAREDRDTKSAQVDSLLVDIGTYKEMTGKSVIELDSAMAKTSALEETCSSQRKMIETLEIKLAAANEKLKRSNMTASETMTEYENMKKMLESVQSRLEEAEQTILEGENLRKKLHNTILELKGNIRVFCRVRPLLPNESGAVSYPKNGENLGRGIELLHNGIFVYF

SEQ ID NO: 189745 - protein, 611 aa, Zea Mays
MSARGVRPGVLHHKENNPADAQPGKRQRTAAGAGRQPLAAAPPPQEEPMVFSGREDVDALLNEKMKGKNKMDYKGKSEQMMEYIKKLRACTKWLLEREDANLVEIERITGQLDATHKQHSEIVAVLKNTIEETKSICEELQKQCASLQEALKTVEAEKMDALRSLGDEREARMGVESLRNGLLEDLNRAKLEEKRLNDQIKMLQDTNKRLQEYNTSLQQYNCNLQADATKNAETIVKLQKEKNTMVETMNGLKDHANSVKMQLDIARSLQNEATKQKTDLLKEVESIRMELQRAREDRDTKSAQVDSLLVDIGTYKEMTGKSVIELDSAMAKTSALEETCSSQRKMIETLEIKLAAANEKLKRSNMTASETMTEYENMKKMLESVQSRLEEAEQTILEGENLRKKLHNTILELKGNIRVFCRVRPLLPNESGAVSYPKNGENLGRGIELLHNAQGYSFTFDKVFDHSASQEHVFIEISQLVQSALDGYKVCIFAYGQTGSGKTYTMMGNPELEDQKGMIPRSLEQIFQASQTLNSQGWRYKMQASMLEIYNETIRDLLATNRMAVQDVGASKYSIKHDTNGNTNVSDLTIIDVTSINEVSSLLRRAAQSSW

SEQ ID NO: 189746 - protein, 282 aa, Zea Mays
MFRKYFRWALTHPSTDLEDEKLKRHMKPDFLDMVPWYSGTSADLFKTAFDLMVSVTLFVGRFDMRMMQAAMKGPTGNTPNDDLLYDHFNEREDLWFDFVADTGDGGNSSYTVARLLAQPSIRTVIGGSMHTLPRGNLLIIGGDLAYPNPSSFTYERRFFRPFEYALQPPPWYRDEHIALDKPELPPGVSKMTEYDGPQCFIIPGNHDWFDGLHTFMRYICHKSWLGGWFLPQKKSYFALHLPKGWWIFGLDLSLHGDVDVYQFKFFADVCQNKLCRLERMIL

SEQ ID NO: 189747 - protein, 627 aa, Zea Mays
MGSDKQIGSPRQLLETLKMGRVRTILTHTYPYPHEHSRHIMTAVIIACLFFISSDNMHTLIHKLDNNIKWWSMYVCLIGFFYFFSSPFLGRTIQPSYSNFNRWYVAWICFASLYHLPSFQSMGVDMRMNLSLFLTIYFSSVLFIIAFHIIFIGLWYIGLVARLAGTRPGVWTILQNCTVISIACCVFYSHCGNLAVHKSKSFGSSSDPNLLAFLKNENGSTWISNFLRMNQLKDEICSSWFAPVGSASDYPILAKWVIYGELVCSGSCAGPSDEISPLYSLWATFVGLYIANFVVERSTGWALTHPSTDLEDEKLKRHMKPDFLDMVPWYSGTSADLFKTAFDLMVSVTLFVGRFDMRMMQAAMKGPTGNTPNDDLLYDHFNEREDLWFDFVADTGDGGNSSYTVARLLAQPSIRTVIGGSMHTLPRGNLLIIGGDLAYPNPSSFTYERRFFRPFEYALQPPPWYRDEHIALDKPELPPGVSKMTEYDGPQCFIIPGNHDWFDGLHTFMRYICHKSWLGGWFLPQKKSYFALHLPKGWWIFGLDLSLHGDVDVYQFKFFADVCQNKVHFLRLLIFFFFKLLSFPYFWFHVGQHALVIASSVQPCMPVIIFIYSKHKKSCCIFFVVLG

SEQ ID NO: 189748 - protein, 575 aa, Zea Mays
MGSDKQIGSPRQLLETLKMGRVRTILTHTYPYPHEHSRHIMTAVIIACLFFISSDNMHTLIHKLDNNIKWWSMYVCLIGFFYFFSSPFLGRTIQPSYSNFNRWYVAWICFASLYHLPSFQSMGVDMRMNLSLFLTIYFSSVLFIIAFHIIFIGLWYIGLVARLAGTRPGVWTILQNCTVISIACCVFYSHCGNLAVHKSKSFGSSSDPNLLAFLKNENGSTWISNFLRMNQLKDEICSSWFAPVGSASDYPILAKWVIYGELVCSGSCAGPSDEISPLYSLWATFVGLYIANFVVERSTGWALTHPSTDLEDEKLKRHMKPDFLDMVPWYSGTSADLFKTAFDLMVSVTLFVGRFDMRMMQAAMKGPTGNTPNDDLLYDHFNEREDLWFDFVADTGDGGNSSYTVARLLAQPSIRTVIGGSMHTLPRGNLLIIGGDLAYPNPSSFTYERRFFRPFEYALQPPPWYRDEHIALDKPELPPGVSKMTEYDGPQCFIIPGNHDWFDGLHTFMRYICHKSWLGGWFLPQKKSYFALHLPKGWWIFGLDLSLHGDVDVYQFKFFADVCQNKLCRLERMIL

SEQ ID NO: 189749 - protein, 645 aa, Zea Mays
MGYLRGVCSGSCAGPSDEISPLYSLWATFVGLYIANFVVERSTGWALTHPSTDLEDEKLKRHMKPDFLDMVPWYSGTSADLFKTAFDLMVSVTLFVGRFDMRMMQAAMKGPTGNTPNDDLLYDHFNEREDLWFDFVADTGDGGNSSYTVARLLAQPSIRTVIGGSMHTLPRGNLLIIGGDLAYPNPSSFTYERRFFRPFEYALQPPPWYRDEHIALDKPELPPGVSKMTEYDGPQCFIIPGNHDWFDGLHTFMRYICHKSWLGGWFLPQKKSYFALHLPKGWWIFGLDLSLHGDVDVYQFKFFADVCQNKVGENDSVIVVTHEPNWLLDWYWNETTGKNVSHLIQEYLKGRCKLRMAGDLHHFMRHSATRSEKNNFVQHLLVNGCGGAFLHPTHVFRNFERFSGTTYECKAAYPSYDESTGIALGNILKFRKKNWQFDIIGGFIYFILVFSMFPQCNLVRILNEETWSGRLKSFSGTIWSALLYIFEHSYVSSVGSLTLLTASYSFVPSKLSRRRRAIIGGLHVLAHLTAALLLMLLLELGIEICIRNHLLATSGYHTLYEWYRSMESEHFPDPTGLRARLEQWTLGLYPACIKYLMAAFDVPEVMAVTRINICKNGMMSLSRSVLIILLVAAHRKLQILHKVPC

SEQ ID NO: 189750 - protein, 273 aa, Zea Mays
MSCHQPQPASAPPRTVHNKLTVHSVRSHKASLFPFPSRGKRRPAFRRHGHHHRARPPRLPRCHCHVRRPLIPHPDDGGGRGQRHHPPELLHARHHVGRQPDRGEGDQGARRGVHPDGAGAGHDVRRHHGDRRPADGGGVARVRRAGPHAGLLHAGVPDRGGAYGVRQPAAHVGGPQREHARRAGPRRHRPGRPGDPRRRRHRDVPDGHGLRAVEDAGWDQRHRRHRPAGCLRHHGRQRHHGRRRRRRRRRIPVRRVRVVGVVGRLQVHLRCRE

SEQ ID NO: 189751 - protein, 217 aa, Zea Mays
MAASPQTLSAPPPAAAAVPNLGGKRKRQPKGKKNKKNKLARSDQDDSVRRRRNKPSAKFLKLLRKRARDYNSDDEDEAGDDRQQEHLPNPQRRVDEDDDEALSHSEPEEGEDEDEEEGASSSAVTRFEQGCRAFRVAFLKIMAKKLPDDPLGPILSAHKTLVAAKLAEEVEEHKPKREARKEKRVRRGMSYLKTTWTAKRRSSSRLQPRGLSGFSMR

SEQ ID NO: 189752 - protein, 159 aa, Zea Mays
MAKKLPDDPLGPILSAHKTLVAAKLAEEVEEHKPKREARKEKRVAAEKGHVIPKDHLDSKEKELIKVATKGVVRLFNAVSKAQKSRKDLNPSRTKDATVIAKERKNTFLSELEMPSHQDKKRNTSSNFSKLKEHTTHFPHRHILIDAWEIFISSWHESQ

SEQ ID NO: 189753 - protein, 200 aa, Zea Mays
MPASPSLSLFHPLLTPPQRHCSFGLVEERYIHPGLDWLVLVLLLNGRICSMDFHSKATNYLVTASDDESIRLYDTQDAVCLNTINSKKYGVGLVCFTDNPSIVLYSSNNGWDESLRLLSMNDNRFIRYYKGHLDRVVCIALCSGKENFLSCSLDRTILLWDHRAEKPQGLLRAQRRPTVSYDAQGMPMSYSSAVMAGGFC

SEQ ID NO: 189754 - protein, 167 aa, Zea Mays
MVFAVAYGGRIKMFDIRKFGMGPFATFSVGTDDSEAHVVQFSGDGRRILLTTKAGRVHVLDSFEGNSIASFRAKPILTNSTLEASFCPEGNHIVSGSGDGSVYAWNVESGKVACWESTDVKPPRVRWSPGSLMFVTGTSELSCWVPDLSKLESFTISHTNTRSSSSL

SEQ ID NO: 189755 - protein, 314 aa, Zea Mays
MTSPPRNGRICSMDFHSKATNYLVTASDDESIRLYDTQDAVCLNTINSKKYGVGLVCFTDNPSIVLYSSNNGWDESLRLLSMNDNRFIRYYKGHLDRVVCIALCSGKENFLSCSLDRTILLWDHRAEKPQGLLRAQRRPTVSYDAQGMVFAVAYGGRIKMFDIRKFGMGPFATFSVGTDDSEAHVVQFSGDGRRILLTTKAGRVHVLDSFEGNSIASFRAKPILTNSTLEASFCPEGNHIVSGSGDGSVYAWNVESGKVACWESTDVKPPRVRWSPGSLMFVTGTSELSCWVPDLSKLESFTISHTNTRSSSSL

SEQ ID NO: 189756 - protein, 329 aa, Zea Mays
MTSPPRVSMEITDEVVKSMKIGLVFQGYNGRICSMDFHSKATNYLVTASDDESIRLYDTQDAVKKYGVGLVCFTDNPSIVLYSSNNGWDESLRLLSMNDNRFIRYYKGHLDRVVCIALCSGKENFLSCSLDRTILLWDHRAEKPQGLLRAQRRPTVSYDAQGMVFAVAYGGRIKMFDIRKFGMGPFATFSVGTDDSEAHVVQFSGDGRRILLTTKAGRVHVLDSFEGNSIASFRAKPILTNSTLEASFCPEGNHIVSGSGDGSVYAWNVESGKVACWESTDVKPPRVRWSPGSLMFVTGTSELSCWVPDLSKLESFTISHTNTRSSSSL

SEQ ID NO: 189757 - protein, 316 aa, Zea Mays
MTSPPRVSMEITDEVVKSMKIGLVFQGYNGRICSMDFHSKATNYLVTASDDESIRLYDTQDAVCLNTINSKKYGVGLVCFTDNPSIVLYSSNNGWDESLRLLSMNDNRFIRYYKGHLDRVVCIALCSGKENFLSCSLDRTILLWDHRAEKPQGLLRAQRRPTVSYDAQGMGPFATFSVGTDDSEAHVVQFSGDGRRILLTTKAGRVHVLDSFEGNSIASFRAKPILTNSTLEASFCPEGNHIVSGSGDGSVYAWNVESGKVACWESTDVKPPRVRWSPGSLMFVTGTSELSCWVPDLSKLESFTISHTNTRSSSSL

SEQ ID NO: 189758 - protein, 109 aa, Zea Mays
MFFWGLETKLHYNFVQRKLPSPRFQVEVVLVDYDGSQPPKPAAGAVDNKSDADSSASTAVKENSVAPAESNKGTGSNDKDEVFSDSDDGEDGSSKERKERTAGAVVKAV

SEQ ID NO: 189759 - protein, 129 aa, Zea Mays
MWCSVASSQLVVTLELVHSVYGGGGEGRVRSRRRCACTGLLCVLTSSGRSTTAGVHLRRPRRPGAPLHAAVPVLQVVHVALGHEGEPRLPRPLLPRRRRLRHRRLPRRRWLAPACKQANKPTMIWAGLN

SEQ ID NO: 189760 - protein, 125 aa, Zea Mays
MWCSVASSQLVVTLELVHSVYGGGGEGRVRSRRRCACTGLLCVLTSSGRSTTAGVHLRRPRRPGAPLHAGYGPGLINLAREGRTTEMETKATEHRHLRCFGGGCGRRRPVVVVGGAGPGRHGGRR

SEQ ID NO: 189761 - protein, 1598 aa, Zea Mays
MDPAAGGGRGRDRAGFERACRLPNTVHSEVLPSLPLPTLPRELGFDALRDDEPLAAPDRPDTIMQAANIARVLADTDVSHLGFTAADNVDVDPIRCSWLWREVLKHNPDAFKVKAPSPSSQGPFGGPGYQNQEHEKHFEHFTPNTSKARNESAFPQDEIDSHREHFYNELTSDSIASKKPKIRKRENNNSVSSSAPSIPNTQDVITTFCEVVEDFCGKTEIPDDGDGGDWLSIPLGDVKVLVNEITSVRSKRILHEVPMDTVTRLLDVIDRQIRYSQGLSIDVKENSDVVDAEPLVFSALEASHAALAIMTHHDMPKQLYREELIERIIDFSRHQITDCMAASNPTFRALYKPAENVANDGDDDEDDLENGQVSKRRRTATNLSMRKSSNNRTYHLADEDQKQIQMITALLVHLVQFSAIVPNSLKGTVDWTTIVDASGDADYYPIKCHEAATEACCRFWTDVLQRFTAAKSQDMSETKGIIDNLVQDFLMILNLPEYPAAASILEVLCVLLLQNAGLKSKDTNVRCFAIDLLGGIASRLKHDSVICSEEKLWILQDLTDAGSDGSKILKNKCCVCLGGRGINIACNECGRCFHSDCMGAASQDNLERDSVCPLCFCKQQLNVLQTYCQSQIKENGKKTAASTSKKSAKPAEVPAVDIIQQILLSYLQESGPQDDGNLFTRWFYLCIWNKENQHSQEEIIYYLARLKSKEILRDSGNGLAISRDSAKKICLALGQKNSFCRGFDKILALLLASLRENSPVIRAKALRAVSSIVEADPEVLGDKRVQSAVEGRFCDSAISVREAALELVGRHIASHPDVGLKYIEKVAERIKDTGVSVRKRAIKIIRDLCASNPNTDTTHAFVEIISRVNDEESSVQDLVCKTFYELWFEEPTGSHKHLVADGSSVPMEIAKKTEQIVDMLRKMTNHQPLITIIKRNLTLDFLPQSTKAAGINSYMVASIQKRCELICKRLLERILQVEEGAAKEMEIHMLPYIVALQAFCIVDPTLCIPVTDPSKFVVTLQPYLNIQVDSKSAAQLLESIIFVIDAVLPLIRKPTQNVVEELEKDLKHMIVRHSYLTVVHACIKCLCALSESAGRGPGLVENLVNIFYKHLSGANSDSQIQGLQNLYEYLRDAESQLTAESTVKPPVRCEINGRSKVPVAAGAGDTNICGGIIQLYWSSILERCLDTNDQVRQSALKIVEVVLRQGLVHPITCVPHLIALEMDPLEGNSKLAHHLLMNMNEKYPLFFESRLGDGLQMSFKFFESIVSNHKMAANIKSNPIAFVKPGISRIYRLIRSNRNSRNKFVHSIVRKFESDSRSRSTVSFLVYCAEVLASLPFTCSDEPLYLIYDINRIIHLKAGGVESNLKRWTSMSQSQNTVDMPTLPGERHVVMQEPGGYYDNVGYAHERVNANPCSTSDVDMAKVQVDVDMAKVQGDCLDAIALQLLLKLKRHLKVVYSLDDARCQSFSLKEPPKSGETFSRQNIPFNVSSTNISLPSCLQDVASVYQDFKTVLHEDSMDFAVFIPSVQIRKRPTPRNTTNPTPRSTTRVRRTAASSVTKARGGARGDDSDDSDDDDWTGGPRVLDFSGGGRVTRQRVQV

SEQ ID NO: 189762 - protein, 1340 aa, Zea Mays
MQLLQLKAIGVICTVFSSYTQHRSYLVDEILHLLRKLQFSKNAVRTYHLADEDQKQIQMITALLVHLVQFSAIVPNSLKGTVDWTTIVDASGDADYYPIKCHEAATEACCRFWTDVLQRFTAAKSQDMSETKGIIDNLVQDFLMILNLPEYPAAASILEVLCVLLLQNAGLKSKDTNVRCFAIDLLGGIASRLKHDSVICSEEKLWILQDLTDAGSDGSKILKNKCCVCLGGRGINIACNECGRCFHSDCMGAASQDNLERDSVCPLCFCKQQLNVLQTYCQSQIKENGKKTAASTSKKSAKPAEVPAVDIIQQILLSYLQESGPQDDGNLFTRWFYLCIWNKENQHSQEEIIYYLARLKSKEILRDSGNGLAISRDSAKKICLALGQKNSFCRGFDKILALLLASLRENSPVIRAKALRAVSSIVEADPEVLGDKRVQSAVEGRFCDSAISVREAALELVGRHIASHPDVGLKYIEKVAERIKDTGVSVRKRAIKIIRDLCASNPNTDTTHAFVEIISRVNDEESSVQDLVCKTFYELWFEEPTGSHKHLVADGSSVPMEIAKKTEQIVDMLRKMTNHQPLITIIKRNLTLDFLPQSTKAAGINSYMVASIQKRCELICKRLLERILQVEEGAAKEMEIHMLPYIVALQAFCIVDPTLCIPVTDPSKFVVTLQPYLNIQVDSKSAAQLLESIIFVIDAVLPLIRKPTQNVVEELEKDLKHMIVRHSYLTVVHACIKCLCALSESAGRGPGLVENLVNIFYKHLSGANSDSQLLGRSLFCLGLLLRYGYQLMQTSENQLDFPKIINLLQRKYLLRDDFSLKVRALQTLGYILIAKPEFMLQKDMLKLIETALSSEVDYRLKIQGLQNLYEYLRDAESQLTAESTVKPPVRCEINGRSKVPVAAGAGDTNICGGIIQLYWSSILERCLDTNDQVRQSALKIVEVVLRQGLVHPITCVPHLIALEMDPLEGNSKLAHHLLMNMNEKYPLFFESRLGDGLQMSFKFFESIVSNHKMAANIKSNPIAFVKPGISRIYRLIRSNRNSRNKFVHSIVRKFESDSRSRSTVSFLVYCAEVLASLPFTCSDEPLYLIYDINRIIHLKAGGVESNLKRWTSMSQSQNTVDMPTLPGERHVVMQEPGGYYDNVGYAHERVNANPCSTSDVDMAKVQVDVDMAKVQGDCLDAIALQLLLKLKRHLKVVYSLDDARCQSFSLKEPPKSGETFSRQNIPFNVSSTNISLPSCLQDVASVYQDFKTVLHEDSMDFAVFIPSVQIRKRPTPRNTTNPTPRSTTRVRRTAASSVTKARGGARGDDSDDSDDDDWTGGPRVLDFSGGGRVTRQRVQV

SEQ ID NO: 189763 - protein, 1363 aa, Zea Mays
MTHHDMPKQLYREELIERIIDFSRHQITDCMAASNPTFRALYKPAENVANDGDDDEDDLENGQVSKRRRTATNLSMRKSSNNRTYHLADEDQKQIQMITALLVHLVQFSAIVPNSLKGTVDWTTIVDASGDADYYPIKCHEAATEACCRFWTDVLQRFTAAKSQDMSETKGIIDNLVQDFLMILNLPEYPAAASILEVLCVLLLQNAGLKSKDTNVRCFAIDLLGGIASRLKHDSVICSEEKLWILQDLTDAGSDGSKILKNKCCVCLGGRDCMGAASQDNLERDSVCPLCFCKQQLNVLQTYCQSQIKENGKKTAASTSKKSAKPAEVPAVDIIQQILLSYLQESGPQDDGNLFTRWFYLCIWNKENQHSQEEIIYYLARLKSKEILRDSGNGLAISRDSAKKICLALGQKNSFCRGFDKILALLLASLRENSPVIRAKALRAVSSIVEADPEVLGDKRVQSAVEGRFCDSAISVREAALELVGRHIASHPDVGLKYIEKVAERIKDTGVSVRKRAIKIIRDLCASNPNTDTTHAFVEIISRVNDEESSVQDLVCKTFYELWFEEPTGSHKHLVADGSSVPMEIAKKTEQIVDMLRKMTNHQPLITIIKRNLTLDFLPQSTKAAGINSYMVASIQKRCELICKRLLERILQVEEGAAKEMEIHMLPYIVALQAFCIVDPTLCIPVTDPSKFVVTLQPYLNIQVDSKSAAQLLESIIFVIDAVLPLIRKPTQNVVEELEKDLKHMIVRHSYLTVVHACIKCLCALSESAGRGPGLVENLVNIFYKHLSGANSDSQLLGRSLFCLGLLLRYGYQLMQTSENQLDFPKIINLLQRKYLLRDDFSLKVRALQTLGYILIAKPEFMLQKDMLKLIETALSSEVDYRLKIQGLQNLYEYLRDAESQLTAESTVKPPVRCEINGRSKVPVAAGAGDTNICGGIIQLYWSSILERCLDTNDQVRQSALKIVEVVLRQGLVHPITCVPHLIALEMDPLEGNSKLAHHLLMNMNEKYPLFFESRLGDGLQMSFKFFESIVSNHKMAANIKSNPIAFVKPGISRIYRLIRSNRNSRNKFVHSIVRKFESDSRSRSTVSFLVYCAEVLASLPFTCSDEPLYLIYDINRIIHLKAGGVESNLKRWTSMSQSQNTVDMPTLPGERHVVMQEPGGYYDNVGYAHERVNANPCSTSDVDMAKVQVDVDMAKVQGDCLDAIALQLLLKLKRHLKVVYSLDDARCQSFSLKEPPKSGETFSRQNIPFNVSSTNISLPSCLQDVASVYQDFKTVLHEDSMDFAVFIPSVQIRKRPTPRNTTNPTPRSTTRVRRTAASSVTKARGGARGDDSDDSDDDDWTGGPRVLDFSGGGRVTRQRVQV

SEQ ID NO: 189764 - protein, 1767 aa, Zea Mays
MDPAAGGGRGRDRAGFERACRLPNTVHSEVLPSLPLPTLPRELGFDALRDDEPLAAPDRPDTIMQAANIARVLADTDVSHLGFTAADNVDVDPIRCSWLWREVLKHNPDAFKVKAPSPSSQGPFGGPGYQNQEHEKHFEHFTPNTSKARNESAFPQDEIDSHREHFYPKIRKRENNNSVSSSAPSIPNTQDVITTFCEVVEDFCGKTEIPDDGDGGDWLSIPLGDVKVLVNEITSVRSKRILHEVPMDTVTRLLDVIDRQIRYSQGLSIDVKENSDVVDAEPLVFSALEASHAALAIMTHHDMPKQLYREELIERIIDFSRHQITDCMAASNPTFRALYKPAENVANDGDDDEDDLENGQVSKRRRTATNLSMRKSSNKLSASVYSAVQKLCLILGFLKELLTTVRLSDGCILQLAKTCFTTFLVDNMQLLQLKAIGVICTVFSSYTQHRSYLVDEILHLLRKLQFSKNAVRTYHLADEDQKQIQMITALLVHLVQFSAIVPNSLKGTVDWTTIVDASGDADYYPIKCHEAATEACCRFWTDVLQRFTAAKSQDMSETKGIIDNLVQDFLMILNLPEYPAAASILEVLCVLLLQNAGLKSKDTNVRCFAIDLLGGIASRLKHDSVICSEEKLWILQDLTDAGSDGSKILKNKCCVCLGGRGINIACNECGRCFHSDCMGAASQDNLERDSVCPLCFCKQQLNVLQTYCQSQIKENGKKTAASTSKKSAKPAEVPAVDIIQQILLSYLQESGPQDDGNLFTRWFYLCIWNKENQHSQEEIIYYLARLKSKEILRDSGNGLAISRDSAKKICLALGQKNSFCRGFDKILALLLASLRENSPVIRAKALRAVSSIVEADPEVLGDKRVQSAVEGRFCDSAISVREAALELVGRHIASHPDVGLKYIEKVAERIKDTGVSVRKRAIKIIRDLCASNPNTDTTHAFVEIISRVNDEESSVQDLVCKTFYELWFEEPTGSHKHLVADGSSVPMEIAKKTEQIVDMLRKMTNHQPLITIIKRNLTLDFLPQSTKAAGINSYMVASIQKRCELICKRLLERILQVEEGAAKEMEIHMLPYIVALQAFCIVDPTLCIPVTDPSKFVVTLQPYLNIQVDSKSAAQLLESIIFVIDAVLPLIRKPTQNVVEELEKDLKHMIVRHSYLTVVHACIKCLCALSESAGRGPGLVENLVNIFYKHLSGANSDSQLLGRSLFCLGLLLRYGYQLMQTSENQLDFPKIINLLQRKYLLRDDFSLKVRALQTLGYILIAKPEFMLQKDMLKLIETALSSEVDYRLKIQGLQNLYEYLRDAESQLTAESTVKPPVRCEINGRSKVPVAAGAGDTNICGGIIQLYWSSILERCLDTNDQVRQSALKIVEVVLRQGLVHPITCVPHLIALEMDPLEGNSKLAHHLLMNMNEKYPLFFESRLGDGLQMSFKFFESIVSNHKMAANIKSNPIAFVKPGISRIYRLIRSNRNSRNKFVHSIVRKFESDSRSRSTVSFLVYCAEVLASLPFTCSDEPLYLIYDINRIIHLKAGGVESNLKRWTSMSQSQNTVDMPTLPGERHVVMQEPGGYYDNVGYAHERVNANPCSTSDVDMAKVQVDVDMAKVQGDCLDAIALQLLLKLKRHLKVVYSLDDARCQSFSLKEPPKSGETFSRQNIPFNVSSTNISLPSCLQDVASVYQDFKTVLHEDSMDFAVFIPSVQIRKRPTPRNTTNPTPRSTTRVRRTAASSVTKARGGARGDDSDDSDDDDWTGGPRVLDFSGGGRVTRQRVQV

SEQ ID NO: 189765 - protein, 1660 aa, Zea Mays
MDPAAGGGRGRDRAGFERACRLPNTVHSEVLPSLPLPTLPRELGFDALRDDEPLAAPDRPDTIMQAANIARVLADTDVSHLGFTAADNVDVDPIRCSWLWREVLKHNPDAFKVKAPSPSSQGPFGGPGYQNQEHEKHFEHFTPNTSKARNESAFPQDEIDSHREHFYPKIRKRENNNSVSSSAPSIPNTQDVITTFCEVVEDFCGKTEIPDDGDGGDWLSIPLGDVKVLVNEITSVRSKRILHEVPMDTVTRLLDVIDRQIRYSQGLSIDVKENSDVVDAEPLVFSALEASHAALAIMTHHDMPKQLYREELIERIIDFSRHQITDCMAASNPTFRALYKPAENVANDGDDDEDDLENGQVSKRRRTATNLSMRKSSNNRTYHLADEDQKQIQMITALLVHLVQFSAIVPNSLKGTVDWTTIVDASGDADYYPIKCHEAATEACCRFWTDVLQRFTAAKSQDMSETKGIIDNLVQDFLMILNLPEYPAAASILEVLCVLLLQNAGLKSKDTNVRCFAIDLLGGIASRLKHDSVICSEEKLWILQDLTDAGSDGSKILKNKCCVCLGGRDCMGAASQDNLERDSVCPLCFCKQQLNVLQTYCQSQIKENGKKTAASTSKKSAKPAEVPAVDIIQQILLSYLQESGPQDDGNLFTRWFYLCIWNKENQHSQEEIIYYLARLKSKEILRDSGNGLAISRDSAKKICLALGQKNSFCRGFDKILALLLASLRENSPVIRAKALRAVSSIVEADPEVLGDKRVQSAVEGRFCDSAISVREAALELVGRHIASHPDVGLKYIEKVAERIKDTGVSVRKRAIKIIRDLCASNPNTDTTHAFVEIISRVNDEESSVQDLVCKTFYELWFEEPTGSHKHLVADGSSVPMEIAKKTEQIVDMLRKMTNHQPLITIIKRNLTLDFLPQSTKAAGINSYMVASIQKRCELICKRLLERILQVEEGAAKEMEIHMLPYIVALQAFCIVDPTLCIPVTDPSKFVVTLQPYLNIQVDSKSAAQLLESIIFVIDAVLPLIRKPTQNVVEELEKDLKHMIVRHSYLTVVHACIKCLCALSESAGRGPGLVENLVNIFYKHLSGANSDSQLLGRSLFCLGLLLRYGYQLMQTSENQLDFPKIINLLQRKYLLRDDFSLKVRALQTLGYILIAKPEFMLQKDMLKLIETALSSEVDYRLKIQGLQNLYEYLRDAESQLTAESTVKPPVRCEINGRSKVPVAAGAGDTNICGGIIQLYWSSILERCLDTNDQVRQSALKIVEVVLRQGLVHPITCVPHLIALEMDPLEGNSKLAHHLLMNMNEKYPLFFESRLGDGLQMSFKFFESIVSNHKMAANIKSNPIAFVKPGISRIYRLIRSNRNSRNKFVHSIVRKFESDSRSRSTVSFLVYCAEVLASLPFTCSDEPLYLIYDINRIIHLKAGGVESNLKRWTSMSQSQNTVDMPTLPGERHVVMQEPGGYYDNVGYAHERVNANPCSTSDVDMAKVQVDVDMAKVQGDCLDAIALQLLLKLKRHLKVVYSLDDARCQSFSLKEPPKSGETFSRQNIPFNVSSTNISLPSCLQDVASVYQDFKTVLHEDSMDFAVFIPSVQIRKRPTPRNTTNPTPRSTTRVRRTAASSVTKARGGARGDDSDDSDDDDWTGGPRVLDFSGGGRVTRQRVQV

SEQ ID NO: 189766 - protein, 1152 aa, Zea Mays
MDPAAGGGRGRDRAGFERACRLPNTVHSEVLPSLPLPTLPRELGFDALRDDEPLAAPDRPDTIMQAANIARVLADTDVSHLGFTAADNVDVDPIRCSWLWREVLKHNPDAFKVKAPSPSSQGPFGGPGYQNQEHEKHFEHFTPNTSKARNESAFPQDEIDSHREHFYNELTSDSIASKKPKIRKRENNNSVSSSAPSIPNTQDVITTFCEVVEDFCGKTEIPDDGDGGDWLSIPLGDVKVLVNEITSVRSKRILHEVPMDTVTRLLDVIDRQIRYSQGLSIDVKENSDVVDAEPLVFSALEASHAALAIMTHHDMPKQLYREELIERIIDFSRHQITDCMAASNPTFRALYKPAENVANDGDDDEDDLENGQVSKRRRTATNLSMRKSSNNRTYHLADEDQKQIQMITALLVHLVQFSAIVPNSLKGTVDWTTIVDASGDADYYPIKCHEAATEACCRFWTDVLQRFTAAKSQDMSETKGIIDNLVQDFLMILNLPEYPAAASILEVLCVLLLQNAGLKSKDTNVRCFAIDLLGGIASRLKHDSVICSEEKLWILQDLTDAGSDGSKILKNKCCVCLGGRDCMGAASQDNLERDSVCPLCFCKQQLNVLQTYCQSQIKENGKKTAASTSKKSAKPAEVPAVDIIQQILLSYLQESGPQDDGNLFTRWFYLCIWNKENQHSQEEIIYYLARLKSKEILRDSGNGLAISRDSAKKICLALGQKNSFCRGFDKILALLLASLRENSPVIRAKALRAVSSIVEADPEVLGDKRVQSAVEGRFCDSAISVREAALELVGRHIASHPDVGLKYIEKVAERIKDTGVSVRKRAIKIIRDLCASNPNTDTTHAFVEIISRVNDEESSVQDLVCKTFYELWFEEPTGSHKHLVADGSSVPMEIAKKTEQIVDMLRKMTNHQPLITIIKRNLTLDFLPQSTKAAGINSYMVASIQKRCELICKRLLERILQVEEGAAKEMEIHMLPYIVALQAFCIVDPTLCIPVTDPSKFVVTLQPYLNIQVDSKSAAQLLESIIFVIDAVLPLIRKPTQNVVEELEKDLKHMIVRHSYLTVVHACIKCLCALSESAGRGPGLVENLVNIFYKHLSGANSDSQTLGYILIAKPEFMLQKDMLKLIETALSSEVDYRLKVLHNSFWFFCLKS

SEQ ID NO: 189767 - protein, 1455 aa, Zea Mays
MTHHDMPKQLYREELIERIIDFSRHQITDCMAASNPTFRALYKPAENVANDGDDDEDDLENGQVSKRRRTATNLSMRKSSNKLSASVYSAVQKLCLILGFLKELLTTVRLSDGCILQLAKTCFTTFLVDNMQLLQLKAIGVICTVFSSYTQHRSYLVDEILHLLRKLQFSKNAVRTYHLADEDQKQIQMITALLVHLVQFSAIVPNSLKGTVDWTTIVDASGDADYYPIKCHEAATEACCRFWTDVLQRFTAAKSQDMSETKGIIDNLVQDFLMILNLPEYPAAASILEVLCVLLLQNAGLKSKDTNVRCFAIDLLGGIASRLKHDSVICSEEKLWILQDLTDAGSDGSKILKNKCCVCLGGRDCMGAASQDNLERDSVCPLCFCKQQLNVLQTYCQSQIKENGKKTAASTSKKSAKPAEVPAVDIIQQILLSYLQESGPQDDGNLFTRWFYLCIWNKENQHSQEEIIYYLARLKSKEILRDSGNGLAISRDSAKKICLALGQKNSFCRGFDKILALLLASLRENSPVIRAKALRAVSSIVEADPEVLGDKRVQSAVEGRFCDSAISVREAALELVGRHIASHPDVGLKYIEKVAERIKDTGVSVRKRAIKIIRDLCASNPNTDTTHAFVEIISRVNDEESSVQDLVCKTFYELWFEEPTGSHKHLVADGSSVPMEIAKKTEQIVDMLRKMTNHQPLITIIKRNLTLDFLPQSTKAAGINSYMVASIQKRCELICKRLLERILQVEEGAAKEMEIHMLPYIVALQAFCIVDPTLCIPVTDPSKFVVTLQPYLNIQVDSKSAAQLLESIIFVIDAVLPLIRKPTQNVVEELEKDLKHMIVRHSYLTVVHACIKCLCALSESAGRGPGLVENLVNIFYKHLSGANSDSQLLGRSLFCLGLLLRYGYQLMQTSENQLDFPKIINLLQRKYLLRDDFSLKVRALQTLGYILIAKPEFMLQKDMLKLIETALSSEVDYRLKIQGLQNLYEYLRDAESQLTAESTVKPPVRCEINGRSKVPVAAGAGDTNICGGIIQLYWSSILERCLDTNDQVRQSALKIVEVVLRQGLVHPITCVPHLIALEMDPLEGNSKLAHHLLMNMNEKYPLFFESRLGDGLQMSFKFFESIVSNHKMAANIKSNPIAFVKPGISRIYRLIRSNRNSRNKFVHSIVRKFESDSRSRSTVSFLVYCAEVLASLPFTCSDEPLYLIYDINRIIHLKAGGVESNLKRWTSMSQSQNTVDMPTLPGERHVVMQEPGGYYDNVGYAHERVNANPCSTSDVDMAKVQVDVDMAKVQGDCLDAIALQLLLKLKRHLKVVYSLDDARCQSFSLKEPPKSGETFSRQNIPFNVSSTNISLPSCLQDVASVYQDFKTVLHEDSMDFAVFIPSVQIRKRPTPRNTTNPTPRSTTRVRRTAASSVTKARGGARGDDSDDSDDDDWTGGPRVLDFSGGGRVTRQRVQV

SEQ ID NO: 189768 - protein, 1189 aa, Zea Mays
MDPAAGGGRGRDRAGFERACRLPNTVHSEVLPSLPLPTLPRELGFDALRDDEPLAAPDRPDTIMQAANIARVLADTDVSHLGFTAADNVDVDPIRCSWLWREVLKHNPDAFKVKAPSPSSQGPFGGPGYQNQEHEKHFEHFTPNTSKARNESAFPQDEIDSHREHFYNELTSDSIASKKPKIRKRENNNSVSSSAPSIPNTQDVITTFCEVVEDFCGKTEIPDDGDGGDWLSIPLGDVKVLVNEITSVRSKRILHEVPMDTVTRLLDVIDRQIRYSQGLSIDVKENSDVVDAEPLVFSALEASHAALAIMTHHDMPKQLYREELIERIIDFSRHQITDCMAASNPTFRALYKPAENVANDGDDDEDDLENGQVSKRRRTATNLSMRKSSNNRTYHLADEDQKQIQMITALLVHLVQFSAIVPNSLKGTVDWTTIVDASGDADYYPIKCHEAATEACCRFWTDVLQRFTAAKSQDMSETKGIIDNLVQDFLMILNLPEYPAAASILEVLCVLLLQNAGLKSKDTNVRCFAIDLLGGIASRLKHDSVICSEEKLWILQDLTDAGSDGSKILKNKCCVCLGGRGINIACNECGRCFHSDCMGAASQDNLERDSVCPLCFCKQQLNVLQTYCQSQIKENGKKTAASTSKKSAKPAEVPAVDIIQQILLSYLQESGPQDDGNLFTRWFYLCIWNKENQHSQEEIIYYLARLKSKEILRDSGNGLAISRDSAKKICLALGQKNSFCRGFDKILALLLASLRENSPVIRAKALRAVSSIVEADPEVLGDKRVQSAVEGRFCDSAISVREAALELVGRHIASHPDVGLKYIEKVAERIKDTGVSVRKRAIKIIRDLCASNPNTDTTHAFVEIISRVNDEESSVQDLVCKTFYELWFEEPTGSHKHLVADGSSVPMEIAKKTEQIVDMLRKMTNHQPLITIIKRNLTLDFLPQSTKAAGINSYMVASIQKRCELICKRLLERILQVEEGAAKEMEIHMLPYIVALQAFCIVDPTLCIPVTDPSKFVVTLQPYLNIQVDSKSAAQLLESIIFVIDAVLPLIRKPTQNVVEELEKDLKHMIVRHSYLTVVHACIKCLCALSESAGRGPGLVENLVNIFYKHLSGANSDSQLLGRSLFCLGLLLRYGYQLMQTSENQLDFPKIINLLQRKYLLRDDFSLKVRALQVCVTTCNSLRHKISAW

SEQ ID NO: 189769 - protein, 1773 aa, Zea Mays
MDPAAGGGRGRDRAGFERACRLPNTVHSEVLPSLPLPTLPRELGFDALRDDEPLAAPDRPDTIMQAANIARVLADTDVSHLGFTAADNVDVDPIRCSWLWREVLKHNPDAFKVKAPSPSSQGPFGGPGYQNQEHEKHFEHFTPNTSKARNESAFPQDEIDSHREHFYNELTSDSIASKKPKIRKRENNNSVSSSAPSIPNTQDVITTFCEVVEDFCGKTEIPDDGDGGDWLSIPLGDVKVLVNEITSVRSKRILHEVPMDTVTRLLDVIDRQIRYSQGLSIDVKENSDVVDAEPLVFSALEASHAALAIMTHHDMPKQLYREELIERIIDFSRHQITDCMAASNPTFRALYKPAENVANDGDDDEDDLENGQVSKRRRTATNLSMRKSSNKLSASVYSAVQKLCLILGFLKELLTTVRLSDGCILQLAKTCFTTFLVDNMQLLQLKAIGVICTVFSSYTQHRSYLVDEILHLLRKLQFSKNAVRTYHLADEDQKQIQMITALLVHLVQFSAIVPNSLKGTVDWTTIVDASGDADYYPIKCHEAATEACCRFWTDVLQRFTAAKSQDMSETKGIIDNLVQDFLMILNLPEYPAAASILEVLCVLLLQNAGLKSKDTNVRCFAIDLLGGIASRLKHDSVICSEEKLWILQDLTDAGSDGSKILKNKCCVCLGGRGINIACNECGRCFHSDCMGAASQDNLERDSVCPLCFCKQQLNVLQTYCQSQIKENGKKTAASTSKKSAKPAEVPAVDIIQQILLSYLQESGPQDDGNLFTRWFYLCIWNKENQHSQEEIIYYLARLKSKEILRDSGNGLAISRDSAKKICLALGQKNSFCRGFDKILALLLASLRENSPVIRAKALRAVSSIVEADPEVLGDKRVQSAVEGRFCDSAISVREAALELVGRHIASHPDVGLKYIEKVAERIKDTGVSVRKRAIKIIRDLCASNPNTDTTHAFVEIISRVNDEESSVQDLVCKTFYELWFEEPTGSHKHLVADGSSVPMEIAKKTEQIVDMLRKMTNHQPLITIIKRNLTLDFLPQSTKAAGINSYMVASIQKRCELICKRLLERILQVEEGAAKEMEIHMLPYIVALQAFCIVDPTLCIPVTDPSKFVVTLQPYLNIQVDSKSAAQLLESIIFVIDAVLPLIRKPTQNVVEELEKDLKHMIVRHSYLTVVHACIKCLCALSESAGRGPGLVENLVNIFYKHLSGANSDSQLLGRSLFCLGLLLRYGYQLMQTSENQLDFPKIINLLQRKYLLRDDFSLKVRALQTLGYILIAKPEFMLQKDMLKLIETALSSEIQGLQNLYEYLRDAESQLTAESTVKPPVRCEINGRSKVPVAAGAGDTNICGGIIQLYWSSILERCLDTNDQVRQSALKIVEVVLRQGLVHPITCVPHLIALEMDPLEGNSKLAHHLLMNMNEKYPLFFESRLGDGLQMSFKFFESIVSNHKMAANIKSNPIAFVKPGISRIYRLIRSNRNSRNKFVHSIVRKFESDSRSRSTVSFLVYCAEVLASLPFTCSDEPLYLIYDINRIIHLKAGGVESNLKRWTSMSQSQNTVDMPTLPGERHVVMQEPGGYYDNVGYAHERVNANPCSTSDVDMAKVQVDVDMAKVQGDCLDAIALQLLLKLKRHLKVVYSLDDARCQSFSLKEPPKSGETFSRQNIPFNVSSTNISLPSCLQDVASVYQDFKTVLHEDSMDFAVFIPSVQIRKRPTPRNTTNPTPRSTTRVRRTAASSVTKARGGARGDDSDDSDDDDWTGGPRVLDFSGGGRVTRQRVQV

SEQ ID NO: 189770 - protein, 860 aa, Zea Mays
MDPAAGGGRGRDRAGFERACRLPNTVHSEVLPSLPLPTLPRELGFDALRDDEPLAAPDRPDTIMQAANIARVLADTDVSHLGFTAADNVDVDPIRCSWLWREVLKHNPDAFKVKAPSPSSQGPFGGPGYQNQEHEKHFEHFTPNTSKARNESAFPQDEIDSHREHFYNELTSDSIASKKPKIRKRENNNSVSSSAPSIPNTQDVITTFCEVVEDFCGKTEIPDDGDGGDWLSIPLGDVKVLVNEITSVRSKRILHEVPMDTVTRLLDVIDRQIRYSQGLSIDVKENSDVVDAEPLVFSALEASHAALAIMTHHDMPKQLYREELIERIIDFSRHQITDCMAASNPTFRALYKPAENVANDGDDDEDDLENGQVSKRRRTATNLSMRKSSNKLSASVYSAVQKLCLILGFLKELLTTVRLSDGCILQLAKTCFTTFLVDNMQLLQLKAIGVICTVFSSYTQHRSYLVDEILHLLRKLQFSKNAVRTYHLADEDQKQIQMITALLVHLVQFSAIVPNSLKGTVDWTTIVDASGDADYYPIKCHEAATEACCRFWTDVLQRFTAAKSQDMSETKGIIDNLVQDFLMILNLPEYPAAASILEVLCVLLLQNAGLKSKDTNVRCFAIDLLGGIASRLKHDSVICSEEKLWILQDLTDAGSDGSKILKNKCCVCLGGRGINIACNECGRCFHSDCMGAASQDNLERDSVCPLCFCKQQLNVLQTYCQSQIKENGKKTAASTSKKSAKPAEVPAVDIIQQILLSYLQESGPQDDGNLFTRWFYLCIWNKENQHSQEEIIYYLARLKSKEILRDSGNGLAISRDSAKKICLALGQKNSFCRGFDKILALLLLERKFSCNKSKSLACAV

SEQ ID NO: 189771 - protein, 1764 aa, Zea Mays
MDPAAGGGRGRDRAGFERACRLPNTVHSEVLPSLPLPTLPRELGFDALRDDEPLAAPDRPDTIMQAANIARVLADTDVSHLGFTAADNVDVDPIRCSWLWREVLKHNPDAFKVKAPSPSSQGPFGGPGYQNQEHEKHFEHFTPNTSKARNESAFPQDEIDSHREHFYNELTSDSIASKKPKIRKRENNNSVSSSAPSIPNTQDVITTFCEVVEDFCGKTEIPDDGDGGDWLSIPLGDVKVLVNEITSVRSKRILHEVPMDTVTRLLDVIDRQIRYSQGLSIDVKENSDVVDAEPLVFSALEASHAALAIMTHHDMPKQLYREELIERIIDFSRHQITDCMAASNPTFRALYKPAENVANDGDDDEDDLENGQVSKRRRTATNLSMRKSSNKLSASVYSAVQKLCLILGFLKELLTTVRLSDGCILQLAKTCFTTFLVDNMQLLQLKAIGVICTVFSSYTQHRSYLVDEILHLLRKLQFSKNAVRTYHLADEDQKQIQMITALLVHLVQFSAIVPNSLKGTVDWTTIVDASGDADYYPIKCHEAATEACCRFWTDVLQRFTAAKSQDMSETKGIIDNLVQDFLMILNLPEYPAAASILEVLCVLLLQNAGLKSKDTNVRCFAIDLLGGIASRLKHDSVICSEEKLWILQDLTDAGSDGSKILKNKCCVCLGGRDCMGAASQDNLERDSVCPLCFCKQQLNVLQTYCQSQIKENGKKTAASTSKKSAKPAEVPAVDIIQQILLSYLQESGPQDDGNLFTRWFYLCIWNKENQHSQEEIIYYLARLKSKEILRDSGNGLAISRDSAKKICLALGQKNSFCRGFDKILALLLASLRENSPVIRAKALRAVSSIVEADPEVLGDKRVQSAVEGRFCDSAISVREAALELVGRHIASHPDVGLKYIEKVAERIKDTGVSVRKRAIKIIRDLCASNPNTDTTHAFVEIISRVNDEESSVQDLVCKTFYELWFEEPTGSHKHLVADGSSVPMEIAKKTEQIVDMLRKMTNHQPLITIIKRNLTLDFLPQSTKAAGINSYMVASIQKRCELICKRLLERILQVEEGAAKEMEIHMLPYIVALQAFCIVDPTLCIPVTDPSKFVVTLQPYLNIQVDSKSAAQLLESIIFVIDAVLPLIRKPTQNVVEELEKDLKHMIVRHSYLTVVHACIKCLCALSESAGRGPGLVENLVNIFYKHLSGANSDSQLLGRSLFCLGLLLRYGYQLMQTSENQLDFPKIINLLQRKYLLRDDFSLKVRALQTLGYILIAKPEFMLQKDMLKLIETALSSEVDYRLKIQGLQNLYEYLRDAESQLTAESTVKPPVRCEINGRSKVPVAAGAGDTNICGGIIQLYWSSILERCLDTNDQVRQSALKIVEVVLRQGLVHPITCVPHLIALEMDPLEGNSKLAHHLLMNMNEKYPLFFESRLGDGLQMSFKFFESIVSNHKMAANIKSNPIAFVKPGISRIYRLIRSNRNSRNKFVHSIVRKFESDSRSRSTVSFLVYCAEVLASLPFTCSDEPLYLIYDINRIIHLKAGGVESNLKRWTSMSQSQNTVDMPTLPGERHVVMQEPGGYYDNVGYAHERVNANPCSTSDVDMAKVQVDVDMAKVQGDCLDAIALQLLLKLKRHLKVVYSLDDARCQSFSLKEPPKSGETFSRQNIPFNVSSTNISLPSCLQDVASVYQDFKTVLHEDSMDFAVFIPSVQIRKRPTPRNTTNPTPRSTTRVRRTAASSVTKARGGARGDDSDDSDDDDWTGGPRVLDFSGGGRVTRQRVQV

SEQ ID NO: 189772 - protein, 133 aa, Zea Mays
MALVVMCGQPCSGKTAAAACLAVALHSSSPDLTVRIIDESSLHLRRNDSYKDMVVEKNLRGLLRSEVDRSVSRDSIIIVDSLNNIKGYRYELWCLARASGVRYCVKWTIVRNGTATARRKENQHMILIYLKIL

SEQ ID NO: 189773 - protein, 121 aa, Zea Mays
MPEKKVSLNTFVTRRDIRSMVNSPSPVRTNTTPTPSTKLTTSTKAERAPTGSSVSSSMALVCVSRQHVSRHVDEVQQPDGVLMEDVKAAEMGQDDVEAGIIRLGRRVRKPNTRYPSSCWTR

SEQ ID NO: 189774 - protein, 500 aa, Zea Mays
MGPPAYTASPCTGSALFSNTRAPPPPPRLLIRWGPGPPSAVGRHGGRVTPSQERRGPAPSQERRRPAPSQERRRPTESSSQSHQLQERKRHWKAGEFPGTAADGGGGGGRRPALGNRHSKAGEFPGTDGVRPAPAPPQGKRHWKAGEFPGAAAAPGSGTPRTPLKNVKKRLDARADAKAWACTVTEALADRVSSKNWQEALQVFEMLKEQPFYHPKEGTYMKLIVLLGRSGQPTRAHQLFDEMLQQGCQPTPELYTALIGAYCRSGLLDEALQLLNDMKSSPLCQPDVYTYSTIIKACIDAARFDLTDAMYKDMAERSISPNTVTQNILIGAYGKRRMYDKMSAVMEHMRKLAFPWTTATYNNVIEAFAEAGDAGNMEHAFNQMRSEGMRPDTKTFCCLIDGFSRAGQFHKVVGMVKLAERLDVPVNTPFHNAVLGACARADDLVEMERVFRRMKHTQCEPDASTYSILVEAYRKEGMTDKIYALHQENPALVPADFVMV

SEQ ID NO: 189775 - protein, 595 aa, Zea Mays
MGPPAYTASPCTGSALFSNTRAPPPPPRLLIRWGPGPPSAVGRHGGRVTPSQERRGPAPSQERRRPAPSQERRRPTESSSQSHQLQERKRHWKAGEFPGTAADGGGGGGRRPALGNRHSKAGEFPGTDGVRPAPAPPQGKRHWKAGEFPGAAAAPGSGTPRTPLKNVKKRLDARADAKAWACTVTEALADRVSSKNWQEALQVFEMLKEQPFYHPKEGTYMKLIVLLGRSGQPTRAHQLFDEMLQQGCQPTPELYTALIGAYCRSGLLDEALQLLNDMKSSPLCQPDVYTYSTIIKACIDAARFDLTDAMYKDMAERSISPNTVTQNIVLSGYGKAGRLDDMERVLSDMLDSVSCKPDVWTMNIILSLFGNRGEVELMERWYEKFRGYGVEPETRTLNILIGAYGKRRMYDKMSAVMEHMRKLAFPWTTATYNNVIEAFAEAGDAGNMEHAFNQMRSEGMRPDTKTFCCLIDGFSRAGQFHKVVGMVKLAERLDVPVNTPFHNAVLGACARADDLVEMERVFRRMKHTQCEPDASTYSILVEAYRKEGMTDKIYALHQENPALVPADFVMRASIDVSSNSRGVKVRQQRTGIHLV

SEQ ID NO: 189776 - protein, 528 aa, Zea Mays
MALAFDEFGRPFIILREQEKKTRLRGLDAQKANIGAGKAVARILRTSLGPKGADKMLQSPDGDVIITNDGATILEQMDVDNQIAKLMVELSRSQDYEIGDGTTGVVVMAGALLEQAEKLLERGIHPIRVAEGYEMASKVAFDHLERISEKFEFSADNIEPLVQTCMTTLSSKIVNRCKRALAEIAVKAVLAVADLERKDVNLDLIKVEGKVGGKLEDTELVYGIIVDKDMSHPQMPKRIEDAKIAILTCPFEPPKPKTKHKVDIDTVEKFQTLREQEQKYFDEMVQKCKDAGATLVICQWGFDDEANHLLMHRNLPAVRWVGGVELELIGRIVPRFQELSPEKLGKAGLVREKSFGTTKDRMLYIEQCANSRAVTIFIRGGNKMMIEETKRSLHDALCVARNLIRNNSIVYGGGSAEISCSIAVETAADRHPGVEQYAIRSFADALDAVPLALAENSGLSPIDTLTAVKAQQESNPHCGIDCNDVGTNDMKEQNVFETLIGKQQQILLATQVVKMILKIDDVISPSEY

SEQ ID NO: 189777 - protein, 444 aa, Zea Mays
MALAFDEFGRPFIILREQEKKTRLRGLDAQKANIGAGKAVARILRTSLGPKGADKMLQSPDGDVIITNDGATILEQMDVDNQIAKLMVELSRSQDYEIGDGTTGVVVMAGALLEQAEKLLERGIHPIRVAEGYEMASKVAFDHLERISEKFEFSADNIEPLVQTCMTTLSSKIVNRCKRALAEIAVKAVLAVADLERKDVNLDLIKVEGKVGGKLEDTELVYGIIVDKDMSHPQMPKRIEDAKIAILTCPFEPPKPKTKHKVDIDTVEKFQTLREQEQKYFDEMVQKCKDAGATLVICQWGFDDEANHLLMHRNLPAVRWVGGVELELIAIATGGRIVPRFQELSPEKLGKAGLVREKSFGTTKDRMLYIEQCANSRAVTIFIRGGNKMMIEETKRSLHDALCVARNLIRNNSIVYGGGSAEISCSIAVETAADRHPGVEQVIR

SEQ ID NO: 189778 - protein, 550 aa, Zea Mays
MAAPPPAPFLLLLAVAAASLAGADDPYRYFTWTVTYGPISPLGTTQQGILINGQFPGPRIDCVTNDNLVVNVVNSLDEPFLLTWNGVKQRKNSWQDGVAGTNCGIPPGANYTYRFQAKDQIGTFFYFPSLALHRAAGGFGALNVYQRPAIPVPYPPPAGDFTLLVGDWYAAASPHADLRRALDDGGGGALPPPAALLINGAAASGAAPFVGAQGGTYLFRVSNIGLRASVNVRVQGHALRLVEVEGTHPVQSAYDSLDVHAGQSLAFLVTLDQAPLDYAVVASTRFAAAELTAVATLHYAGATARAPGPLPPAPPPGYGWSLGQARSFRWNLTASAARPNPQGSFHYGAIPTSRTLVLASSASLDGAGRRRCAVNAVSFVVPDTPLKLADRYDIAGVIDWDGLPARLDGAAAVPRAGTPVLRLGLHEFVEVVFQNTEEELQSWHLDGYDFWVVGWVGYGDGQWNETQRQTYNLVDAQARHTVQVYPNGWSAILVSLDNQGMWNLRSAMWDRQYLGQQLYLRVWTPEQSLSNEYAIPANAILCGKAAALPH

SEQ ID NO: 189779 - protein, 395 aa, Zea Mays
MGLDVMEIGMGADLSLDLRHFASKAVRQSKDDTPAPDMDACIRRLEEERGKIEMFKRDLPLCARLLADVIDVMKEEAGKKKTTTRRRSDRRLASAAADDEEEEADGATADKSKWMSTAQLWTGDSGREDAESEKQDKGRCSPEARSRGALLPFKADVGSGAPAFAPLFLRTDDKAAAARVGVPDLSSLLSPPATMPPADAGAEESRRQVVGFAQAAARAAAMAPSAPALGLQSQQQQQQQQQARKARRCWSTELHRKFVAALDQLGGPQVATPKQIRELMKVDGLTNDEVKSHLQKYRLHNRRAPGSGVVRQPIVLVGGLWIPQEQGSPQSGSPHGPLHHLSTSVAAVSSAATASCEEEDGRRRKGGSAQRQRRRLLESSLGGWMDGRTRRGREL

SEQ ID NO: 189780 - protein, 301 aa, Zea Mays
MGLDVMEIGMGADLSLDLRHFASKAVRQSKDDTPAPDMDACIRRLEEERGKIEMFKRDLPLCARLLADVSTGSVGVLSGARFVGGPKSFGALRSQKQDKGRCSPEARSRGALLPFKADVGSGAPAFAPLFLRTDDKAAAARVGVPDLSSLLSPPATMPPADAGAEESRRQKETLSSFMLRHACSCHAEANQGADEGGWADKRRSEKPSSEIPAAQPQGAWIRRGAPADRARGRAVDSPGARQPSVWISPRPPPPPVHLGGRRLVRRHRQLRGGRRPVRELWLEMMKRLLLLLLRHQCVFTV

SEQ ID NO: 189781 - protein, 331 aa, Zea Mays
MGLDVMEIGMGADLSLDLRHFASKAVRQSKDDTPAPDMDACIRRLEEERGKIEMFKRDLPLCARLLADVSTGSVGVLSGARFVGGPKSFGALRSQKQDKGRCSPEARSRGALLPFKADVGSGAPAFAPLFLRTDDKAAAARVGVPDLSSLLSPPATMPPADAGAEESRRQVVGFAQAAARAAAMAPSAPALGLQSQQQQQQQQQARKARRCWSTELHRKFVAALDQLGGPQVATPKQIRELMKVDGLTNDEVKSHLQKYRLHNRRAPGSGVVRQPIVLVGGLWIPQEQGSPQSGSPHGPLHHLSTSVAAVSSAATASCEEEDGRSESYGWK

SEQ ID NO: 189782 - protein, 61 aa, Zea Mays
MLSYESQYHYHNLIANSSSGAQTRSEQQQNHVEISHPNHASGLVNILLDLELLIHFTSQSS

SEQ ID NO: 189783 - protein, 227 aa, Zea Mays
MAKFVSSVLVQETVSQALSNLWSESTRRKMDQTVAGSQGHELGERLEMAHTRLEAVLETSERWQIADAALLRWRSKLKRVARYWTVFSARALSGFAQTRCAASGMISTSSIGHGSESGILGLGGGGYSSEDYLRVDTAPVIAAVYTEEQHFLHTEFSSFGQVEEIMLPMAIDYFCKNEKATIYQMLWKGLSMALRSRVQTHRPGCRDQSRTGFVTEIVINQVTRIEY

SEQ ID NO: 189784 - protein, 319 aa, Zea Mays
MDGEEIGLVLARASDLRTRISACAAAAAGAPGPRRDDEEAAKRLDAAEGDEEGAEEEEDEEEEVESLVGISDALESLERQLAALQHQQRYERETILSQIDRSRRSLLAKLREYKGQDCEVIHEAAAFAGERIERDDSLVLPPYSDHVTNSFALDDLYPLSYMSKPKRLHTQPDSEDDGTAQDDARRNGRESRDTRASKRGSGGGGGGGGGGGIGAFMGWVAKTAVMVVGAVCVMKAAGYESVTWRNGGARLDIAGLFGGGGGKQAVAAGGGDERRAPLRCPPGKAMVVENGRARCVVKERVEVPFDAVLAPPSSRYGLG

SEQ ID NO: 189785 - protein, 229 aa, Zea Mays
MSRLPAIVNVLKETSFYHTSKLADADMTLLVKILKSWPPQMMFPVIDFLRMFVLHPDGASLLLKTIETGNDILLETFRKAVASPVQPANLLTVLKAVTNLFGNSCLHQWLRTHCAEIIDSVSNCKSSFSKNAHLAYATLLLNYAVLSIESKEEQSQAQILSAALEIAEDDTQDFDSKYRALVAIGSLMLKGLVKSLALDLDVKSVASSAKSSMDQKIAEVGGDIESLTR

SEQ ID NO: 189786 - protein, 581 aa, Zea Mays
MERKDLPTDFLRTYTVRFLASMPGLGILSASHDSTVKLWALSGQPLLDMIGHSSLVYSVDAHSSGLIASGSEDRSLKIWKDGVCVQSIEHPGCIWDAKFLGNGDIVTACSDGTTRIWTADSNRFCSDEEIAAYTDLISQYTLSRKTVGGLKLMDLPGVEALQVPGNSDGQTLIVREGDNGVAYSWNSAELKWDKIGEVVDGPGEAAQGQVHDGVRYDFVFNVDIGDGEPIRKLPYNRSDDPYTVADKWLLKENLPLTYRQQVVEFILQNSGQNNFVPDPSFRDPYTGANAYVPGQPSSSSNGNTPEPIFKHIPKSGMLSFETAQFDGILKKVAEFNSKLSSDSKQLSLSETEMSRLPAIVNVLKETSFYHTSKLADADMTLLVKILKSWPPQMMFPVIDFLRMFVLHPDGASLLLKTIETGNDILLETFRKAVASPVQPANLLTVLKAVTNLFGNSCLHQWLRTHCAEIIDSVSNCKSSFSKNAHLAYATLLLNYAVLSIESKEEQSQAQILSAALEIAEDDTQDFDSKYRALVAIGSLMLKGLVKSLALDLDVKSVASSAKSSMDQKIAEVGGDIESLTR

SEQ ID NO: 189787 - protein, 732 aa, Zea Mays
MAEYRLGLQLHGHTDDVRGICVCGDAGIATSSRDRTVKFWTRNPEKESEYVLSKTLAGHSSFVGPLAWIPPSDRFPEGGIVSGGMDTFVFLWDLQKGEVAETMKGHSSQVTGLAVDTNGDIISSSMDCTVRRWRNGNAIEVWEAHKVAVQTVLKLPTGELFTDTVRFLASMPGLGILSASHDSTVKLWALSGQPLLDMIGHSSLVYSVDAHSSGLIASGSEDRSLKIWKDGVCVQSIEHPGCIWDAKFLGNGDIVTACSDGTTRIWTADSNRFCSDEEIAAYTDLISQYTLSRKTVGGLKLMDLPGVEALQVPGNSDGQTLIVREGDNGVAYSWNSAELKWDKIGEVVDGPGEAAQGQVHDGVRYDFVFNVDIGDGEPIRKLPYNRSDDPYTVADKWLLKENLPLTYRQQVVEFILQNSGQNNFVPDPSFRDPYTGANAYVPGQPSSSSNGNTPEPIFKHIPKSGMLSFETAQFDGILKKVAEFNSKLSSDSEQKQLSLSETEMSRLPAIVNVLKETSFYHTSKLADADMTLLVKILKSWPPQMMFPVIDFLRMFVLHPDGASLLLKTIETGNDILLETFRKAVASPVQPANLLTVLKAVTNLFGNSCLHQWLRTHCAEIIDSVSNCKSSFSKNAHLAYATLLLNYAVLSIESKEEQSQAQILSAALEIAEDDTQDFDSKYRALVAIGSLMLKGLVKSLALDLDVKSVASSAKSSMDQKIAEVGGDIESLTR

SEQ ID NO: 189788 - protein, 564 aa, Zea Mays
MERKDLPTDFLRTCSTVKLWALSGQPLLDMIGHSSLVYSVDAHSSGLIASGSEDRSLKIWKDGVCVQSIEHPGCIWDAKFLGNGDIVTACSDGTTRIWTADSNRFCSDEEIAAYTDLISQYTLSRKTVGGLKLMDLPGVEALQVPGNSDGQTLIVREGDNGVAYSWNSAELKWDKIGEVVDGPGEAAQGQVHDGVRYDFVFNVDIGDGEPIRKLPYNRSDDPYTVADKWLLKENLPLTYRQQVVEFILQNSGQNNFVPDPSFRDPYTGANAYVPGQPSSSSNGNTPEPIFKHIPKSGMLSFETAQFDGILKKVAEFNSKLSSDSEQKQLSLSETEMSRLPAIVNVLKETSFYHTSKLADADMTLLVKILKSWPPQMMFPVIDFLRMFVLHPDGASLLLKTIETGNDILLETFRKAVASPVQPANLLTVLKAVTNLFGNSCLHQWLRTHCAEIIDSVSNCKSSFSKNAHLAYATLLLNYAVLSIESKEEQSQAQILSAALEIAEDDTQDFDSKYRALVAIGSLMLKGLVKSLALDLDVKSVASSAKSSMDQKIAEVGGDIESLTR

SEQ ID NO: 189789 - protein, 71 aa, Zea Mays
MATKPGRAAAAVLLLTLLAALHAAARNNNNNENRNPGGGGGDPGAFFAGMPRFSGGGGCSFDCTERCAATC

SEQ ID NO: 189790 - protein, 129 aa, Zea Mays
MQDVFKKERSKCRDYRNWDSHNPNYYQHHQRDDWYWNAEAFYANQRTNFRAMTREAMTYTMSHHYSVLGLDRSRSEPFSDAEIKNAFRRKAMEYHPDQNQNNKEVAEAKFKEVMDSYEAIKRERRDRSC

SEQ ID NO: 189791 - protein, 135 aa, Zea Mays
MRDRTEDQRERVERIRHMQDVFKKERSKCRDYRNWDSHNPNYYQHHQRDDWYWNAEAFYANQRTNFRAMTREAMTYTMSHHYSVLGLDRSRSEPFSDAEIKNAFRRKAMEYHPDQNQNNKGEHSFLVSPGLLSPS

SEQ ID NO: 189792 - protein, 227 aa, Zea Mays
MAGRREGEHQASPWRSGTPAAEEDSGAFPSAIIFFALVGATATTAAVGQLRRTVSWFYTQLSRSEPYVFWEDIPRRPNRHRCGEAWERYHQRMRDRTEDQRERVERIRHMQDVFKKERSKCRDYRNWDSHNPNYYQHHQRDDWYWNAEAFYANQRTNFRAMTREAMTYTMSHHYSVLGLDRSRSEPFSDAEIKNAFRRKAMEYHPDQNQNNKGEHSFLVSPGLLSPS

SEQ ID NO: 189793 - protein, 105 aa, Zea Mays
MAGRREGEHQASPWRSGTPAAEEDSGAFPSAIIFFALVGATATTAAVGQLRRTVSWFYTQLSRSEPYVFWEDIPRRPNRHRCGEAWERYHQRMRDRTEDQRERVY

SEQ ID NO: 189794 - protein, 138 aa, Zea Mays
MQDVFKKERSKCRDYRNWDSHNPNYYQHHQRDDWYWNAEAFYANQRTNFRAMTREAMTYTMSHHYSVLGLDRSRSEPFSDAEIKNAFRRKAMEYHPDQNQNNKGEHSFLVSPEVAEAKFKEVMDSYEAIKRERRDRSC

SEQ ID NO: 189795 - protein, 246 aa, Zea Mays
MAGRREGEHQASPWRSGTPAAEEDSGAFPSAIIFFALVGATATTAAVGQLRRTVSWFYTQLSRSEPYVFWEDIPRRPNRHRCGEAWERYHQRMRDRTEDQRERVVAIALESSQSTPTTVLDELVNIDPNTERIRHMQDVFKKERSKCRDYRNWDSHNPNYYQHHQRDDWYWNAEAFYANQRTNFRAMTREAMTYTMSHHYSVLGLDRSRSEPFSDAEIKNAFRRKAMEYHPDQNQNNKGIYVLRNF

SEQ ID NO: 189796 - protein, 220 aa, Zea Mays
MAGRREGEHQASPWRSGTPAAEEDSGAFPSAIIFFALVGATATTAAVGQLRRTVSWFYTQLSRSEPYVFWEDIPRRPNRHRCGEAWERYHQRMRDRTEDQRERVERIRHMQDVFKKERSKCRDYRNWDSHNPNYYQHHQRDDWYWNAEAFYANQRTNFRAMTREAMTYTMSHHYSVLGLDRSRSEPFSDAEIKNAFRRKAMEYHPDQNQNNKGIYVLRNF

SEQ ID NO: 189797 - protein, 64 aa, Zea Mays
MIVAHWLWAFRFKNQSKLMVMIPLRPEWVHHLEKSTPAGYQKWENGSNTSRPDVERTWSPVCVD

SEQ ID NO: 189798 - protein, 206 aa, Zea Mays
MSAVAQLDRSASPSLFPCELDSCSPMEFAQLPAPVTSARRPALYALLVPAHAPRFPPSSLAVDSFCASSPALRCPSLASAHSSAAPCSSRSPIGRYTLASARSVGAHCLLCPWCALTSTSLLAGVFPAVDLLVCRVRLPDVPRCPSPCARSVSSRGFVLAWPLSWMRRSSVGACSWGILDIGLGLEKTVLFRASLIRCSTECPTGR

SEQ ID NO: 189799 - protein, 161 aa, Zea Mays
MELFHASLSPPYIDHVICGTPLSGAVWTKQRFGHSRPSKSSGATSLSSSSLAISILFSTDSIIRPPLRIAHIFYPLQFCAQSLQTPDRRSKSSFQPTSPELLPLLFSCAQEEKSRGSILPAVFFPYPRRRSAQDFSHRRCLVPIRSATLNKNPIAVSIFCS

SEQ ID NO: 189800 - protein, 621 aa, Zea Mays
MDWYSDDSDPDIDEDLREDLDALRRSCILSGADPDAAVAQVSSGLAGPSTPALAAAPGAAADHHHHASSSDDEEDEDLALVRSIRANLHHLHNSKASTVLPDAAPAPRDDDDPSSRPICTWPPSDTDEEEDDLETLRAIQRRFSHYQSSTSTASPKTMKPEASQGVHSDLFADRSGDDFAVQKQNAIVPHGDGFPKAALLLVDALKKNRAYQKFIRRKMVNIEAKIEENKDLRDRVKCLLGYQLSCRKSVSRSLGQKEDPRVRLISPLKSTQPCTKNKYRKIPALFLGPAENPHVSKYEMALKQFPMSFKKQPWSDAEKDKLARGIKQQYQETLILDSLNNGSADGDFSALDMAYALTNGAGNFEVTPENLRSVLPLINWDKISAMYLPGRSGAECESRWLNCDDPLINHEAWTADEETRLLLIIQEKGMCNWIDIAVTLGTYRTPFQCLVRYQRSLNPHILNKAWTKEEDLQLQAAVETFGQKWQLVSASLDGRTGTQCSNRWRKTLHPEKTSVGRWLLDEDKRLMVTVKLIGPGRWSLIAPFIPGRTQTQIFERWCNILDPDLYLDDWRPDEDSTLLAAVSEFGPCWSKISKTIIPGRNDNDGENFVNMKSRKLEKPDN

SEQ ID NO: 189801 - protein, 110 aa, Zea Mays
MEEPSPSSNRTDFCLGRFSAMVSMMLPIRSAEQQRFEFGAVSSSRGALALAGGHGTRRTRCRRMRTLLLVNGAGEAAEQPGRVDWTDGERGEERGNNVVRRIDGISWTGG

SEQ ID NO: 189802 - protein, 286 aa, Zea Mays
MSHFRKKLAAILLSSYMNKRRGYPIYKYDKEVHIGSPSDVEILDSPTNHKKRKLLHVLDNSEVLMEDEDGPITQADLQRWFVDEWDKRTPTKVSADGCTDDFLMSGLSIKDMPVTKADLIDVLCDYIMAIQDDRTLEMIWVRSFNPFKIEISVKDLQNILSINLDMTLKCFDMAVRLLANKESRRPKGEIIKNRKHYMDMRFLVFMPWKFNGCYALFVIDHGKNTSLLLTLHLFKIGVSTCHTRGSQKRLSSLQRNIRLPIARNVLDGQRIFLSGNIQFNLVFQLT

SEQ ID NO: 189803 - protein, 171 aa, Zea Mays
MISLLRRALAASASSPAATYRRLLVVAPLSRAAAPPGPCQAPAAGSQEPPRRAFHCSTTPLGFRSTPASWAGPCPGEGEGEGVDTGAEKGLEIARLGTSPRIVEKLAARGITRLFPIQRAVLEPAMQGKDMIGRARTGTGKTLAFGIPIMDKILSYNEKTGTMHAEMAGIL

SEQ ID NO: 189804 - protein, 866 aa, Zea Mays
MRLQGKLIKMRSFPHLLLILALLLVLENVRAQPKPLLINCGSGSSADVDGRTWVGDAHPDGGAGFTVTLAGATATRARKPVDEGGGGGDAAYGELYRTARVFNASSAYRFSVAAGSYFLRLHFSRLFSSNLSGDATAKEAVFDVTANGLRLLSRFSVAGEIYWRNSRTNSTSDVAVKEYLLNVTAARPLEVEFAPDAGSFAFVNAMEVVPVPGNSIFGSVNKVGGVGLKGPFSLGESGVETMYRVCVGGGKIERKEDDPRLWRRWDSDERYIFSMNAAHSIRNTSSISYVSRDGADSVPAPLRLYETARVTEETFVVDRKFNVSWRFGVDPGFEYLVRLHFCELEYGSAEQRRFKIYINGKTAAENYDVVAKAGGKNKAFHEDFLDDDDAAPASETDTLWVQLGSESSATSSAASDALLNGMEIFKVSRNGNLGHPTVRIGGVSGGLEDDRRKRSPRWVLVGAAAGVVIFVSVAAAVYLCFYLHRKKNTNTSAANKKTKTKTKDDNLPATTTAPGLRAAGTFGSCRMGRRFSIAEIKAATMDFDESLVIGVGGFGKVYRGETDTGTPVAVKRGHAESQQGAKEFETEIEMLSRLRHRHLVSLIGYCDEQDEMILVYEHMANGTLRSHLYGSESESDHLPALTWRQRLEICIGAARGLHYLHTGLDRGGVIHRDVKTTNILLDGSLRGEGGGLRHLEARPAAGPHPRQHRREGQLRVPGPGVLHEAAADAELRRVLVRRRPAGGPLRPARHQPGPAEGPGQPPPSGLWSGRGGACSRPWSTVGWTEATTWSPSGSWLRSPRSASRMRDGTGLPSVRSCGTSRPLCSCTKRICRAHQPQLLRVIWSPLMARLLATASGAPKRQQKPLV

SEQ ID NO: 189805 - protein, 758 aa, Zea Mays
MRLQGKLIKMRSFPHLLLILALLLVLENVRAQPKPLLINCGSGSSADVDGRTWVGDAHPDGGAGFTVTLAGATATRARKPVDEGGGGGDAAYGELYRTARVFNASSAYRFSVAAGSYFLRLHFSRLFSSNLSGDATAKEAVFDVTANGLRLLSRFSVAGEIYWRNSRTNSTSDVAVKEYLLNVTAARPLEVEFAPDAGSFAFVNAMEVVPVPGNSIFGSVNKVGGVGLKGPFSLGESGVETMYRVCVGGGKIERKEDDPRLWRSISYVSRDGADSVPAPLRLYETARVTEETFVVDRKFNVSWRFGVDPGFEYLVRLHFCELEYGSAEQRRFKIYINGKTAAENYDVVAKAGGKNKAFHEDFLDDDDAAPASETDTLWVQLGSESSATSSAASDALLNGMEIFKVSRNGNLGHPTVRIGGVSGGLEDDRRKRSPRWVLVGAAAGVVIFVSVAAAVYLCFYLHRKKNTNTSAANKKTKTKTKDDNLPATTTAPGLRAAGTFGSCRMGRRFSIAEIKAATMDFDESLVIGVGGFGKVYRGETDTGTPVAVKRGHAESQQGAKEFETEIEMLSRLRHRHLVSLIGYCDEQDEMILVYEHMANGTLRSHLYGSESESDHLPALTWRQRLEICIGAARGLHYLHTGLDRGGVIHRDVADFGISKHGPPLDRTHVSTAVKGSFGYLDPEYFMRQQLTQSSDVYSFGVVLLEVLCARPVINPALPRDQVNLPRVGSGAEEAGPARDRGRPSAGRRLRPGVRQAVG

SEQ ID NO: 189806 - protein, 655 aa, Zea Mays
MKVEVDQHLNKLSEDIRDLKSCNLAHKYDTDGSCCTACHVGKLAEIDDRFNSLKFLLAVVFRQIREILTVVNSSIHDLQWEHELQSEVTGIIIGDCIRGLQDELERKLYEQSSMVNSLRKNCQETVAQFASIREELIAISNILLPSEEEPQISLCRHESLGNWSDRWKFSFFRKRAHQDHSLSSTQNQNSATQKSISPSEVISERSDFRHLKGMTRHEMLNYFRSEISKLRRLHELDLQEKTEELFKFKREKWSLALKYDVEFEPLRRKFPEVISRFDQIMSNGMAAAVPTICSNSDAFDETSRLSSIIDSLYRENQHLHCLLAEKMKNIQELSSQISDSTRKMSLQYSLEKQILRQLNSTQVEYEDLFVESTIRDEIYQTVVRTLVDSHRNVLEDTTQTFRAKVSSLEAALSEKDKALCLSDEENQMLKEKLSTLEKEHFIQNNQQDLELIKQESEEMVLRDIEMEPQRSCEISDRDIQYEGLIKLNQVLEIASTTAKEIETKRLNLSDIQGKREQEKQLDCILVSIMDLSKEFMETEHRVPKDIKGNEKKTDNLHDQCNYMIQQAIVLTKKGLWYKQMLDTKRSELRKAESEVDIMGDKVNALLSLVQKIYVTLEHYSPVFQHHPVLLDAFLKTCKLVAGIRSRQKKDLQDTI

SEQ ID NO: 189807 - protein, 555 aa, Zea Mays
MKVEVDQHLNKLSEDIRDLKSCNLAHKYDTDGSCCTACHVGKLAEIDDRFNSLKFLLAVVFRQIREILTVVNSSIHDLQWEHELQSEVTGIIIGDCIRGLQDELERKLYEQSSMVNSLRKNCQETVAQFASIREELIAISNILLPSEEEPQISLCRHESLGNWSDRWKFSFFRKRAHQDHSLSSTQNQNSATQKSISPSEVISERSDFRHLKGMTRHEMLNYFRSEISKLRRLHELDLQEKTEELFKFKREKWSLALKYDVEFEPLRRKFPEVISRFDQIMSNGMAAAVPTICSNSDAFDETSRLSSIIDSLYRENQHLHCLLAEKMKNIQELSSQISDSTRKMSLQYSLEKQILRQLNSTQVEYEDLFVESTIRDEIYQTVVRTLVDSHRNVLEDTTQTFRAKVSSLEAALSEKDKALCLSDEENQMLKEKLSTLEKEHFIQNNQQDLELIKQESEEMVLRDIEMEPQRSCEISDRDIQYEGLIKLNQVLEIASTTAKEIETKRLNLSDIQGKREQEKQLDCILVSIMDLSKEFMETEHRVPKDIKGNEKKMQN

SEQ ID NO: 189808 - protein, 206 aa, Zea Mays
MFTSFEKALTSVELTKSLVLLLSSKADIQNVVHLTWCPYQGPSGKIMLLPEDDPNATHIMIATGTGVAPYRGYLRRMFMEDVPTFKFGGLAWLFLGVANSDSLLYDEEFTNYLQQYPDNFRYDKALSREQKNKSGGKMYVQDKIEEYSDEIFRLLDGGAHIYFCGLKGMMPGIQDTLKKVAEQRGESWDQKLSQLKKNKQWHVEVY

SEQ ID NO: 189809 - protein, 274 aa, Zea Mays
MAAMFRTGKDRVTASFLLERIQKNLDLPILLGSIQLLLLGMVILLMERQQAYVFAVLFIMILKLERKTPQREVSAVTSCVAQNQGTKFRSQAFQHFILHHNYFFSINQGPSGKIMLLPEDDPNATHIMIATGTGVAPYRGYLRRMFMEDVPTFKFGGLAWLFLGVANSDSLLYDEEFTNYLQQYPDNFRYDKALSREQKNKSGGKMYVQDKIEEYSDEIFRLLDGGAHIYFCGLKGMMPGIQDTLKKVAEQRGESWDQKLSQLKKNKQWHVEVY

SEQ ID NO: 189810 - protein, 396 aa, Zea Mays
MAPPALGSQVAAAASVPVGSDSLAKGAALKGNSTLNFRTKPCIGMALAWKNRTQQPRRLNKVLCMSVQQASRSKVAVVPIELEKAKEPPLHLYKPKEPYTATIVSVERLVGPRAPGETCHVVIDHGGNVPYWEGQSYGVIPPGENPKKPGSPNTVRLYSIASTRYGDSFDGKTASLCVRRAVYYDPETGEEDPSKRGVCSNFLCGSKPGDKVQITADIQNVVHLTWCPYQGPSGKIMLLPEDDPNATHIMIATGTGVAPYRGYLRRMFMEDVPTFKFGGLAWLFLGVANSDSLLYDEEFTNYLQQYPDNFRYDKALSREQKNKSGGKMYVQDKIEEYSDEIFRLLDGGAHIYFCGLKGMMPGIQDTLKKVAEQRGESWDQKLSQLKKNKQWHVEVY

SEQ ID NO: 189811 - protein, 227 aa, Zea Mays
MAPPALGSQVAAAASVPVGSDSLAKGAALKGNSTLNFRTKPCIGMALAWKNRTQQPRRLNKVLCMSVQQASRSKVAVVPIELEKAKEPPLHLYKPKEPYTATIVSVERLVGPRAPGETCHVVIDHGGNVPYWEGQSYGVIPPGENPKKPGSPNTVRLYSIASTRYGDSFDGKTASLCVRRAVYYDPETGEEDPSKRGVCSNFLCGSKPGDKVQITDFGTMKICKSDR

SEQ ID NO: 189812 - protein, 119 aa, Zea Mays
MAARCSLSSSSLSVHGPLRHNKPSKRLAPCLPSAPRPGAAALRARAAKLPPGVEAPRVQPKLSEPFLGFTQTAEIWNSRACMIGLIGTFIVELVLNKGILQMIGVEVYHDSILRSVLRE

SEQ ID NO: 189813 - protein, 333 aa, Zea Mays
MESVEYHPCDVDDVNKPSSALRSGLMSDTLDPNYSNQAQQSSFVQPAAETESNAREIGGSSMNGGEEVLNAETTPAFARDQLSLGVSGGSVGMGASHEAEIHGIDVSGHKTGSVVGDADPIPELIETMGHTGESAPGPALMDEFVPEEVGREGPNGDSQDMASRLAVRADSGSKICGSTKADSVESGEKTSRENSAHPSLSCNARVFSGIDASKDEVTGIMLTNDDYDPGSGLGATNGGNDYETGLPDFDPIRHHNDYCPWVNGNVAAACCISTGSSTALSGWQLTVDAIETLQSLGQAQNQTMQSDSAASLYKDDHVPPSRKLLKSANHSKS

SEQ ID NO: 189814 - protein, 120 aa, Zea Mays
MEGEVKGGTVWTVSQKAFVQEFLANLVADGSKTSTGFKRVHLSACAKALNNHFKINRTPEQIGNHLKTLKKSTLGSTNLGARVVLTGMKRTLSSNMTMRCTQVILRMRMERRSTRVMMST

SEQ ID NO: 189815 - protein, 182 aa, Zea Mays
MTTVPLYDLGKFYLVDAGYGAKPGFLPPYRGVRYHLNEWGSNPVQNEKELFNLRHSSLRLDIMEGEVKGGTVWTVSQKAFVQEFLANLVADGSKTSTGFKRVHLSACAKALNNHFKINRTPEQIGNHLKTLKKSTLGSTNLGARVVLTGMKRTLSSNMTMRCTQVILRMRMERRSTRVMMST

SEQ ID NO: 189816 - protein, 175 aa, Zea Mays
MAVVDFDLRFTCVIAGWEGTAHDASILRDALERPNGLRVPQGKFYLVDAGYGAKPGFLPPYRGVRYHLNEWGSNPVQNEKELFNLRHSSLRVTVERAFGSLKRRFKILDDAIPFFPFPTQVEVVIAACIIHNWVIEDGGDDFIIAENDDLPGIIHQTSTHGQATEHAFMVNFSWI

SEQ ID NO: 189817 - protein, 311 aa, Zea Mays
MIRLSRASFFRFCKLIRDRGLLQDTTHMCVEQQVAMFLHTIGHNVRNRVVATNFGRSGETVSRYFNKVLHAIGELRTDFIKPPSSTTPSKIQGNPRWDPYFKDCIGAIDGTHIRASVPKELEPAFRGRKSYTTQNVMAVVDFDLRFTCVIAGWEGTAHDASILRDALERPNGLRVPQGKFYLVDAGYGAKPGFLPPYRGVRYHLNEWGSNPVQNEKELFNLRHSSLRVTVERAFGSLKRRFKILDDAIPFFPFPTQVEVVIAACIIHNWVIEDGGDDFIIAENDDLPGIIHQTSTHGQATEHAFMVNFSWI

SEQ ID NO: 189818 - protein, 530 aa, Zea Mays
MGCCLHRRLCLGGTGTLPFVRRFTAKEVEAATRGFTAVLDAAGTAYRARFAGGLVATVVRRRRDADDNDDHHRQGEGGGGGTTDAFYLELQLLARLNHRHVVRLRGFALAHHARFLVFDHMENRSLKECLHDPLRTPLDWRTRLQVAIDVAAALEYLYYHCDPPVFHVSVNSGTVLMDANFVAKLSDVGVVSHDVRLATTDSFQDRVERRRAGLAFQYGVLVLELVTGQSPGADGELVRWAQDPGSAASVHRMVDADLGGVYDARELRDLVAVARLCTRDRDDRDEGAGVVTIPQIVRYLQGKLERIGCQASLSVPSNVQKRVAFLLWMPRICWCRSVDRGTKGIHGARRAKIHEGWAIPQVVDHGVDAVTVVNMAHLARDFFTLPLEDEFKMLDQMSGPARKLHVHADENSDDGANPPKAYLPLNCVSIVVGRCREKQRKESSRLQIVNRKLSAMNKLLMEENDRLQKQVSRLVLDNGYMKNRLHSPSVATTDTTCECVVTSGQHNQQPSSSASSTKGCEQPSRSTRYC

SEQ ID NO: 189819 - protein, 251 aa, Zea Mays
MSPELVKTATDMIGSMKPEELQKMFEVASSLNSTSSAGPNLGPNMPEMSPDMLKMASDMIASMPPDDVQKMMSFASQMGGPGGAPRSSENINFGPSVRATTSNSARGSSSQPVLENPDELSDDQRMSQSSSSLPPSTADMQETMRNSMKDPAMRQMLTSMMKNMSPEMMANMSEQFGMKLSKEDAAKAQQAMSSLSPEDLDRMMRWMERAQKAVEVAKKTKNWLLGRQGLILAIVMLILAFILHQFGFIGR

SEQ ID NO: 189820 - protein, 1013 aa, Zea Mays
MYLDVADSGVLPYGWTRYAQFSLSVVNQIHNKFTIRKETQHQFSARESDWGFTSFMPLGELYNHSRGYLVNDTCIVEAEVAVCKVVDYWSYDSKKETGYVGLKNQGATCYMNSLLQTLYHIPYFRKAVYHMPTTENDMPSGSIPLALQSLFYKLQYNDSSVSTKELTKSFGWDMHDSFMQHDVQELNRVLSEKLEDKMKGTVVEGTIQQLFEGHHMNYIECINVDFKSTRKESFYDLQLDVKGCQDVYASFDKYVEVEQLEGDNKYHADKHGLQDAKKGVLFIDFPPVLQLQLKRFEYDFMRDTMVKINDRYEFPLQLDLDRDDGKYLSPDADRNVRNLYTLHSVLVHSGGVHGGHYYAFIRPTLSDQWFKFDDERVTKEDAKRALEEQYGGEEELPQTNPGLNNTPFKFTKYSNAYMLVYIRESDKDKIICNVDEKDIAEHLRIRLEKDREEKERRKKEKAEAHLYTIIKVARDDDLKTQIGKDIYFDLVDHDKVPSFRIQKQMAFAQFKEEVAKEFGIPTQFQRFWLWAKRQNHTYRPNRPLCPQDEAHTRVFSCKPKFATPLLGNFDHSSKDLKPLPLPDKTREDIFLLFKLYEPEKEQLRYVGRLFVKASGRPQDILPKLKMLAGFSQDDDIELYEEIKFEPNVMCEYIDNRLLFRSCQLEDGDIICFQKSSKADSADRYRFPDVPSFLTYIRNRQVVHFRSLEKPKEDDFFLEMSKIFTYDQVVEKVAEKLGVDDPSKIRLTSHNCYSQQPKPQPIKYRGVERLLDMLIHYNQTSDILYYEVLDIPLPELQALKTLKVTYHHATKDEVSVHSIRLPKNSTVGDVLNDIKTKVELSHPNAELRLLEVFYHKIYKVFAPNEKIENINDQYWTLRAEEVPDEEKNLGPFDRLIHVYHFTKDTQNQTQVQNFGEPFFMVIREDETLSSIKERIQRKLKVPDEDFSKWKFAYISLGRPDYFEDSDTVALKFQRNMYGAWEQYLGLEHPDTAPRKAHTINQNRHSFERPVKIYN

SEQ ID NO: 189821 - protein, 1015 aa, Zea Mays
MYLDVADSGVLPYGWTRYAQFSLSVVNQIHNKFTIRKETQHQFSARESDWGFTSFMPLGELYNHSRGYLVNDTCIVEAEVAVCKVVDYWSYDSKKETGYVGLKNQGATCYMNSLLQTLYHIPYFRKAVYHMPTTENDMPSGSIPLALQSLFYKLQYNDSSVSTKELTKSFGWDMHDSFMQHDVQELNRVLSEKLEDKMKGTVVEGTIQQLFEGHHMNYIECINVDFKSTRKESFYDLQLDVKGCQDVYASFDKYVEVEQLEGDNKYHADKHGLQDAKKGVLFIDFPPVLQLQLKRFEYDFMRDTMVKINDRYEFPLQLDLDRDDGKYLSPDADRNVRNLYTLHSVLVHSGGVHGGHYYAFIRPTLSDQWFKFDDERVTKEDAKRALEEQYGGEEELPQTNPGLNNTPFKFTKYSNAYMLVYIRESDKDKIICNVDEKDIAEHLRIRLEKDREEKERRKKEKAEAHLYTIIKVARDDDLKTQIGKDIYFDLVDHDKVPSFRIQKQMAFAQFKEEVAKEFGIPTQFQRFWLWAKRQNHTYRPNRPLCPQDEAHTVGQLKELVNKAHNAELKLFLEVELGLDLKPLPLPDKTREDIFLLFKLYEPEKEQLRYVGRLFVKASGRPQDILPKLKMLAGFSQDDDIELYEEIKFEPNVMCEYIDNRLLFRSCQLEDGDIICFQKSSKADSADRYRFPDVPSFLTYIRNRQVVHFRSLEKPKEDDFFLEMSKIFTYDQVVEKVAEKLGVDDPSKIRLTSHNCYSQQPKPQPIKYRGVERLLDMLIHYNQTSDILYYEVLDIPLPELQALKTLKVTYHHATKDEVSVHSIRLPKNSTVGDVLNDIKTKVELSHPNAELRLLEVFYHKIYKVFAPNEKIENINDQYWTLRAEEVPDEEKNLGPFDRLIHVYHFTKDTQNQTQVQNFGEPFFMVIREDETLSSIKERIQRKLKVPDEDFSKFAYISLGRPDYFEDSDTVALKFQRNMYGAWEQYLGLEHPDTAPRKAHTINQNRHSFERPVKIYN

SEQ ID NO: 189822 - protein, 992 aa, Zea Mays
MYLDVADSGVLPYGWTRYAQFSLSVVNQIHNKFTIRKETQHQFSARESDWGFTSFMPLGELYNHSRGYLVNDTCIVEAEVAVCKVVDYWSYDSKKETGYVGLKNQGATCYMNSLLQTLYHIPYFRKAVYHMPTTENDMPSGSIPLALQSLFYKLQYNDSSVSTKELTKSFGWDMHDSFMQHDVQELNRVLSEKLEDKMKGTVVEGTIQQLFEGHHMNYIECINVDFKSTRKESFYDLQLDVKGCQDVYASFDKYVEVEQLEGDNKYHADKHGLQDAKKGVLFIDFPPVLQLQLKRFEYDFMRDTMVKINDRYEFPLQLDLDRDDGKYLSPDADRNVRNLYTLHSVLVHSGGVHGGHYYAFIRPTLSDQWFKFDDERVTKEDAKRALEEQYGGEEELPQTNPGLNNTPFKFTKYSNAYMLVYIRESDKDKIICNVDEKDIAEHLRIRLEKDREEKERRKKEKAEAHLYTIIKVARDDDLKTQIGKDIYFDLVDHDKVPSFRIQKQMAFAQFKEEVAKEFGIPTQFQRFWLWAKRQNHTYRPNRPLCPQDEAHTVGQLKELVNKAHNAELKLFLEVELGLDLKPLPLPDKTREDIFLLFKLYEPEKEQLRYVGRLFVKASGRPQDILPKLKMLAGFSQDDDIELYEEIKFEPNVMCEYIDNRLLFRSCQLEDGDIICFQKSSKADSADRYRFPDVPSFLTYIRNRQVVHFRSLEKPKEDDFFLEMSKIFTYDQVVEKVAEKLGVDDPSKIRLTSHNCYSQQPKPQPIKYRGVERLLDMLIHYNQTSDILYYEVLDIPLPELQALKTLKVTYHHATKDEVSVHSIRLPKNSTVGDVLNDIKTKVELSHPNAELRLLEVFYHKIYKVFAPNEKIENINDQYWTLRAEEVPDEEKNLGPFDRLIHVYHFTKDTQNQTQVQNFGEPFFMVIREDETLSSIKERIQRKLKVPDEDFSKRNMYGAWEQYLGLEHPDTAPRKAHTINQNRHSFERPVKIYN

SEQ ID NO: 189823 - protein, 1010 aa, Zea Mays
MYLDVADSGVLPYGWTRYAQFSLSVVNQIHNKFTIRKETQHQFSARESDWGFTSFMPLGELYNHSRGYLVNDTCIVEAEVAVCKVVDYWSYDSKKETGYVGLKNQGATCYMNSLLQTLYHIPYFRKAVYHMPTTENDMPSGSIPLALQSLFYKLQYNDSSVSTKELTKSFGWDMHDSFMQHDVQELNRVLSEKLEDKMKGTVVEGTIQQLFEGHHMNYIECINVDFKSTRKESFYDLQLDVKGCQDVYASFDKYVEVEQLEGDNKYHADKHGLQDAKKGVLFIDFPPVLQLQLKRFEYDFMRDTMVKINDRYEFPLQLDLDRDDGKYLSPDADRNVRNLYTLHSVLVHSGGVHGGHYYAFIRPTLSDQWFKFDDERVTKEDAKRALEEQYGGEEETNPGLNNTPFKFTKYSNAYMLVYIRESDKDKIICNVDEKDIAEHLRIRLEKDREEKERRKKEKAEAHLYTIIKVARDDDLKTQIGKDIYFDLVDHDKVPSFRIQKQMAFAQFKEEVAKEFGIPTQFQRFWLWAKRQNHTYRPNRPLCPQDEAHTRVFSCKPKFATPLLGNFDHSSKDLKPLPLPDKTREDIFLLFKLYEPEKEQLRYVGRLFVKASGRPQDILPKLKMLAGFSQDDDIELYEEIKFEPNVMCEYIDNRLLFRSCQLEDGDIICFQKSSKADSADRYRFPDVPSFLTYIRNRQVVHFRSLEKPKEDDFFLEMSKIFTYDQVVEKVAEKLGVDDPSKIRLTSHNCYSQQPKPQPIKYRGVERLLDMLIHYNQTSDILYYEVLDIPLPELQALKTLKVTYHHATKDEVSVHSIRLPKNSTVGDVLNDIKTKVELSHPNAELRLLEVFYHKIYKVFAPNEKIENINDQYWTLRAEEVPDEEKNLGPFDRLIHVYHFTKDTQNQTQVQNFGEPFFMVIREDETLSSIKERIQRKLKVPDEDFSKWKFAYISLGRPDYFEDSDTVALKFQRNMYGAWEQYLGLEHPDTAPRKAHTINQNRHSFERPVKIYN

SEQ ID NO: 189824 - protein, 1034 aa, Zea Mays
MYLDVADSGVLPYGWTRYAQFSLSVVNQIHNKFTIRKETQHQFSARESDWGFTSFMPLGELYNHSRGYLVNDTCIVEAEVAVCKVVDYWSYDSKKETGYVGLKNQGATCYMNSLLQTLYHIPYFRKAVYHMPTTENDMPSGSIPLALQSLFYKLQYNDSSVSTKELTKSFGWDMHDSFMQHDVQELNRVLSEKLEDKMKGTVVEGTIQQLFEGHHMNYIECINVDFKSTRKESFYDLQLDVKGCQDVYASFDKYVEVEQLEGDNKYHADKHGLQDAKKGVLFIDFPPVLQLQLKRFEYDFMRDTMVKINDRYEFPLQLDLDRDDGKYLSPDADRNVRNLYTLHSVLVHSGGVHGGHYYAFIRPTLSDQWFKFDDERVTKEDAKRALEEQYGGEEELPQTNPGLNNTPFKFTKYSNAYMLVYIRESDKDKIICNVDEKDIAEHLRIRLEKDREEKERRKKEKAEAHLYTIIKVARDDDLKTQIGKDIYFDLVDHDKVPSFRIQKQMAFAQFKEEVAKEFGIPTQFQRFWLWAKRQNHTYRPNRPLCPQDEAHTVGQLKELVNKAHNAELKLFLEVELGLDLKPLPLPDKTREDIFLLFKLYEPEKEQLRYVGRLFVKASGRPQDILPKLKMLAGFSQDDDIELYEEIKFEPNVMCEYIDNRLLFRSCQLEDGDIICFQKSSKADSADRYRFPDVPSFLTYIRNRQVVHFRSLEKPKEDDFFLEMSKIFTYDQVVEKVAEKLGVDDPSKIRLTSHNCYSQQPKPQPIKYRGVERLLDMLIHYNQTSDILYYEVLDIPLPELQALKTLKVTYHHATKDEVSVHSIRLPKNSTVGDVLNDIKTKVELSHPNAELRLLEVFYHKIYKVFAPNEKIENINDQYWTLRAEEVPDEEKNLGPFDRLIHVYHFTKDTQNQTQVQNFGEPFFMVIREDETLSSIKERIQRKLKVPDEDFSKWKFAYISLGRPDYFEDSDTVALKFQRNMYGAWEQYLGLEHPDTAPRKAHTINQVFRGAGELVHETPSMIGAASHLSLLFPGYI

SEQ ID NO: 189825 - protein, 1014 aa, Zea Mays
MYLDVADSGVLPYGWTRYAQFSLSVVNQIHNKFTIRKETQHQFSARESDWGFTSFMPLGELYNHSRGYLVNDTCIVEAEVAVCKVVDYWSYDSKKETGYVGLKNQGATCYMNSLLQTLYHIPYFRKAVYHMPTTENDMPSGSIPLALQSLFYKLQYNDSSVSTKELTKSFGWDMHDSFMQHDVQELNRVLSEKLEDKMKGTVVEGTIQQLFEGHHMNYIECINVDFKSTRKESFYDLQLDVKGCQDVYASFDKYVEVEQLEGDNKYHADKHGLQDAKKGVLFIDFPPVLQLQLKRFEYDFMRDTMVKINDRYEFPLQLDLDRDDGKYLSPDADRNVRNLYTLHSVLVHSGGVHGGHYYAFIRPTLSDQWFKFDDERVTKEDAKRALEEQYGGEEETNPGLNNTPFKFTKYSNAYMLVYIRESDKDKIICNVDEKDIAEHLRIRLEKDREEKERRKKEKAEAHLYTIIKVARDDDLKTQIGKDIYFDLVDHDKVPSFRIQKQMAFAQFKEEVAKEFGIPTQFQRFWLWAKRQNHTYRPNRPLCPQDEAHTVGQLKELVNKAHNAELKLFLEVELGLDLKPLPLPDKTREDIFLLFKLYEPEKEQLRYVGRLFVKASGRPQDILPKLKMLAGFSQDDDIELYEEIKFEPNVMCEYIDNRLLFRSCQLEDGDIICFQKSSKADSADRYRFPDVPSFLTYIRNRQVVHFRSLEKPKEDDFFLEMSKIFTYDQVVEKVAEKLGVDDPSKIRLTSHNCYSQQPKPQPIKYRGVERLLDMLIHYNQTSDILYYEVLDIPLPELQALKTLKVTYHHATKDEVSVHSIRLPKNSTVGDVLNDIKTKVELSHPNAELRLLEVFYHKIYKVFAPNEKIENINDQYWTLRAEEVPDEEKNLGPFDRLIHVYHFTKDTQNQTQVQNFGEPFFMVIREDETLSSIKERIQRKLKVPDEDFSKWKFAYISLGRPDYFEDSDTVALKFQRNMYGAWEQYLGLEHPDTAPRKAHTINQNRHSFERPVKIYN

SEQ ID NO: 189826 - protein, 960 aa, Zea Mays
MYLDVADSGVLPYGWTRYAQFSLSVVNQIHNKFTIRKETQHQFSARESDWGFTSFMPLGELYNHSRGYLVNDTCIVEAEVAVCKVVDYWSYDSKKETGYVGLKNQGATCYMNSLLQTLYHIPYFRKAVYHMPTTENDMPSGSIPLALQSLFYKLQYNDSSVSTKELTKSFGWDMHDSFMQHDVQELNRVLSEKLEDKMKGTVVEGTIQQLFEGHHMNYIECINVDFKSTRKESFYDLQLDVKGCQDVYASFDKYVEVEQLEGDNKYHADKHGLQDAKKGVLFIDFPPVLQLQLKRFEYDFMRDTMVKINDRYEFPLQLDLDRDDGKYLSPDADRNVRNLYTLHSVLVHSGGVHGGHYYAFIRPTLSDQWFKFDDERVTKEDAKRALEEQYGGEEELPQTNPGLNNTPFKFTKYSNAYMLVYIRESDKDKIICNVDEKDIAEHLRIRLEKDREEKERRKKEKAEAHLYTIIKVARDDDLKTQIGKDIYFDLVDHDKVPSFRIQKQMAFAQFKEEVAKEFGIPTQFQRFWLWAKRQNHTYRPNRPLCPQDEAHTVGQLKELVNKAHNAELKLFLEVELGLDLKPLPLPDKTREDIFLLFKLYEPEKEQLRYVGRLFVKASGRPQDILPKLKMLAGFSQDDDIELYEEIKFEPNVMCEYIDNRLLFRSCQLEDGDIICFQKSSKADSADRYRFPDVPSFLTYIRNRQVVHFRSLEKPKEDDFFLEMSKIFTYDQVVEKVAEKLGVDDPSKIRLTSHNCYSQQPKPQPIKYRGVERLLDMLIHYNQTSDILYYEVLDIPLPELQALKTLKVTYHHATKDEVSVHSIRLPKNSTVGDVLNDIKTKVELSHPNAELRLLEVFYHKIYKVFAPNEKIENINDQYWTLRAEEVPDEEKNLGPFDRLIHVYHFTKDTQNQTQVQNFGEPFFMVIREDETLSSIKERIQRKLKVPDEDFSKVPDFQMFCS

SEQ ID NO: 189827 - protein, 644 aa, Zea Mays
MQFGTPLPPAARRAPTFHADPAADARQLLGALLPPRPALYHVLQAHARLAVLGLATARALPQLLAALPRLTLAAADVSHSYPLLLFRCSNCTSAFASNHLLRVLPHPLPLRLFPRLPRRNPHSFTFLLASLSNHLDTEPAAAGSIASRFMGTHVHALAVKAGAAGDLYVRNAQIHFYGVCGDVAAMRKVFDELPIVRDVVTWNAVLAGYVRAGMVGVAREVFDGMPVRDEVSWSTVIGGYVKEGEPEVALGVFKNMVAQGVKANEAAIVTALSAAAQLGLLEQGKFVHEVVKRVGMTMSVNLGAALIDMYSKCGSVAAAKEVFDAMPRRDVFAWNSMICGLATHGLGHDAVQLFEKFVSEGFCPTSITFVGVLNACSRTGLVDEGRRYFKLMAEKYDIESEMEHYGCMVDLLSRAGLVQEAVELIEGMRIPPDPVLWGTILSACKRHGLVDLGITVGNKLIELDPAHDGYYVLLASIYAKAKKWDEVRKVRKLMSNRGTSKSAGWSLMEAHGIVHKFLVGDMNHKDSARIYNMLCTINRRLAEAGYVPDVSSVLHDIGDEEKVHAIKVHSERLAIAYGFIVVEAGSPIRIVKNLSVCGDCHEFSKMVTKVFGREIVVRDANDPYILLPPKKFLGHRCSGRAYRL

SEQ ID NO: 189828 - protein, 493 aa, Zea Mays
MPTAVPTPKAVVHQRFGAKARYTVEEVREDVGGCPGLAPQTRNVYRCALDLPGLSVATPGTFLRKKDAEQAAAQIALDKNFLSSTHPLIGHLCVSLRRTGDLIGRLPLSAIAACDVKVNTLCKLIDHRAEFDPLLVLSLLYNAAKQSPGVSVSDSNFWIQSEKPYSPEAVDSALERWSGTTDPVEVEAVLVPHMLEDELKTVRINLRDNEHYMSYVAAELSAIDSSHVLVSRTIGKTSSEIRLYFAAANIHAVSDMSKHALDSLGDGDINWQVNKRASYICGQTIYGDALLANIGYTRRDSELHTEDVNLCSYYRILLGKLPDGNCKMSRDSILAAELPSAYSRFSWKGLSPRDLLCSFCRLQRLPEPHFAVSRVSCDTLMSAVSSEERGAPAGSAENQYTNDVRINKEKPDLFKCEVNIRSRKQEVLLEYSAADTWSKESDAIQNSSLKVLIWFNNYFKKLTSKTGKLYLSESTAGVKCSWTIFYGYTKEAP

SEQ ID NO: 189829 - protein, 443 aa, Zea Mays
MPTAVPTPKAVVHQRFGAKARYTVEEVREDVGGCPGLAPQTRNVYRCALDLPGLSVATPGTFLRKKDAEQAAAQIALDKLGIHPTANSPTTPQEAWAELIARISGFFIDESEKPYSPEAVDSALERWSGTTDPVEVEAVLVPHMLEDELKTVRINLRDNEHYMSYVAAELSAIDSSHVLVSRTIGKTSSEIRLYFAAANIHAVSDMSKHALDSLGDGDINWQVNKRASYICGQTIYGDALLANIGYTRRDSELHTEDVNLCSYYRILLGKLPDGNCKMSRDSILAAELPSAYSRFSWKGLSPRDLLCSFCRLQRLPEPHFAVSRVSCDTLMSAVSSEERGAPAGSAENQYTNDVRINKEKPDLFKCEVNIRSRKQEVLLEYSAADTWSKESDAIQNSSLKVLIWFNNYFKKLTSKTGKLYLSESTAGVKCSWTIFYGYTKEAP

SEQ ID NO: 189830 - protein, 678 aa, Zea Mays
MPTAVPTPKAVVHQRFGAKARYTVEEVREDVGGCPGLAPQTRNVYRCALDLPGLSVATPGTFLRKKDAEQAAAQIALDKNFLSSTHPLIGHLCVSLRRTGDLIGRLPLSAIAACDVKVNTLCKLIDHRAEFDPLLVLSLLYNAAKQSPGVSVSDSNFWIQSEKPYSPEAVDSALERWSGTTDPVEVEAVLVPHMLEDELKTVRINLRDNEHYMSYVAAELSAIDSSHVLVSRTIGKTSSEIRLYFAAANIHAVSDMSKHALDSLGDGDINWQVNKRASYICGQTIYGDALLANIGYTRRDSELHTEDVNLCSYYRILLGKLPDGNCKMSRDSILAAELPSAYSRFSWKGLSPRDLLCSFCRLQRLPEPHFAVSRVSCDTLMSAVSSEERGAPAGSAENQYTNDVRINKEKPDLFKCEVNIRSRKQEVLLEYSAADTWSKESDAIQNSSLKVLIWFNNYFKKLTSKTGKLYLSESTAGVKVHSNIFLQEFAMCLSVYGKNGCSDSAMCSAVGPFSMDTQKKHLESTAKLTHIEGPDSGVFPSHGSLTCISYTASLVTKDKAKTYLLESHNEFEFEIGTGAVSNQLESCVTQLSVNQTARFVAELPPRDLIMAASCEFSHDLSNVSSESCFLEFSVKVLQVTEPLEDRMEKALFSPPLSKQRVEFAVRHINELHATTLPS

SEQ ID NO: 189831 - protein, 383 aa, Zea Mays
MDTQKKHLESTAKLTHIEGPDSGVFPSHGSLTCISYTASLVTKDKAKTYLLESHNEFEFEIGTGAVSNQLESCVTQLSVNQTARFVAELPPRDLIMAASCVHILNIVAESCFLEFSVKVLQVTEPLEDRMEKALFSPPLSKQRVEFAVRHINELHATTLVDFGCGSGSLLDSLLEHPTTLEKLVGVDISRKGLTRAAKSLHQKLSKKSTTQTNVPTAVLYDGSITDYDSRLYGFDIGTCLEVIEHVEEDQATLFGNVVLSSFRPTVLIVSTPNYEYNPILQGSAMPNKDDEADESAGPCKFRNHDHKFEWTRLQFQCWATGLAVKHSYSVEFSGVGGSGEEPGYASQIAVFRRLVQGQEAMCLDEDGDQPYEVLWEWPNACVN

SEQ ID NO: 189832 - protein, 412 aa, Zea Mays
MPTAVPTPKAVVHQRFGAKARYTVEEVREDVGGCPGLAPQTRNVYRCALDLPGLSVATPGTFLRKKDAEQAAAQIALDKSEKPYSPEAVDSALERWSGTTDPVEVEAVLVPHMLEDELKTVRINLRDNEHYMSYVAAELSAIDSSHVLVSRTIGKTSSEIRLYFAAANIHAVSDMSKHALDSLGDGDINWQVNKRASYICGQTIYGDALLANIGYTRRDSELHTEDVNLCSYYRILLGKLPDGNCKMSRDSILAAELPSAYSRFSWKGLSPRDLLCSFCRLQRLPEPHFAVSRVSCDTLMSAVSSEERGAPAGSAENQYTNDVRINKEKPDLFKCEVNIRSRKQEVLLEYSAADTWSKESDAIQNSSLKVLIWFNNYFKKLTSKTGKLYLSESTAGVKCSWTIFYGYTKEAP

SEQ ID NO: 189833 - protein, 386 aa, Zea Mays
MDTQKKHLESTAKLTHIEGPDSGVFPSHGSLTCISYTASLVTKDKAKTYLLESHNEFEFEIGTGAVSNQLESCVTQLSVNQTARFVAELPPRDLIMAASCEFSHDLSNVSSESCFLEFSVKVLQVTEPLEDRMEKALFSPPLSKQRVEFAVRHINELHATTLVDFGCGSGSLLDSLLEHPTTLEKLVGVDISRKGLTRAAKSLHQKLSKKSTTQTNVPTAVLYDGSITDYDSRLYGFDIGTCLEVIEHVEEDQATLFGNVVLSSFRPTVLIVSTPNYEYNPILQGSAMPNKDDEADESAGPCKFRNHDHKFEWTRLQFQCWATGLAVKHSYSVEFSGVGGSGEEPGYASQIAVFRRLVQGQEAMCLDEDGDQPYEVLWEWPNACVN

SEQ ID NO: 189834 - protein, 408 aa, Zea Mays
MLLHSEQLEVKPNPHPERPDRLRAIAASLAAAGIFPSKCALVPPREITKEELLMVHSPDHIESVEQTKNMLYSYFTSDTYANGHSACAAKLAAGLCADLASLIVSGRVRNGFALVRPPGHHAGVKQAMGFCLHNNAAVAALAAKRAGAKKVLIVDWDVHHGNGTQEIFDGDKTVLYISLHRHEDGNFYPGTGAAHEVGVLDGQGFSVNIPWSRGGVGDDDYIFAFQTVVLPIASEFAADITIISAGFDAARGDPLGCCDVTPTGYSWMTSLLAGSSNGRLLVILEGGYNLRSISSSATEVVKVLLGEGPNRASFVVSPSKEALSTVSQVLKIQQQFWPVLGPTYASLQAQQGSVSSNHSNELKKRKRPGGGPGPFWWKMGSKRLLYEALIEPRSRPRKLKGSTGSAAP

SEQ ID NO: 189835 - protein, 766 aa, Zea Mays
MAASPSPSTATATASPSASAAAVLAVNGERVELREGDVNPGTTLLEFLRTRTRFTGPKLGCGEGTSPRPPPPSPRALPFRGCGACVVLLSAYDAASGAVSHAAASSCLTLVHGLHHRAVTTTEGLGGGGRLHAVHERLAGFHASQCGFCTPGVCMSLAAALAGAEAEAKAKAGRRPAPPEGFARLTAAEAEWAVAGNLCRCTGYRPIADACKSFAADVDLEDLGLNSFWRKGDAHASKLPRYDEGSIGVFPEFLKAEIRASSGVDQYTPPALLGSATTWHRPRSVEEYYKLVDSELFDQSKTKVVVGNTASGVYRETEVYDRYIDLRCIPELNSVSKEANGVQIGAAVTISQAIEILRVEAGGCNDVIFCKIADHMEKVASPFVRNTASLGGNLVMAQRDQFASDIATILLAAGSSICIQASSKRLTVMMEDFLQMPPCDHKTLLLSICIPRWTPIGGLFSGDKTMAGTESKTGTSVLFETYRAAPRPLGNAVAYLNSAFLAQVSSDGTSSRLILREICLAFGAYGSQHAIRARNVEKLLVGKPITTSVLLEACRRLKETIVPKEGTRHAAYRSSLAVAFLFTFLYPVTEGTLKTVKEVHLNGYATFGTNGNPNCGPDAHVDVSLKKVIDVNSGSCTNERILEYSNQIIEINKDYFPVGIPTKKVGAELQASGEAVFVDDIPAPKDCVYGAFIYSTKPLAHVKSIELDLSLKQLKTLGVVTVKDIPECGSNVGANTIFGPEPLFGDPVTQCAGEPLGVVKHKDLPI

SEQ ID NO: 189836 - protein, 500 aa, Zea Mays
MAASPSPSTATATASPSASAAAVLAVNGERVELREGDVNPGTTLLEFLRTRTRFTGPKLGCGEGTSPRPPPPSPRALPFRGCGACVVLLSAYDAASGAVSHAAASSCLTLVHGLHHRAVTTTEGLGGGGRLHAVHERLAGFHASQCGFCTPGVCMSLAAALAGAEAEAKAKAGRRPAPPEGFARLTAAEAEWAVAGNLCRCTGYRPIADACKSFAADVDLEDLGLNSFWRKGDAHASKLPRYDEGSIGVFPEFLKAEIRASSGVDQYTPPALLGSATTWHRPRSVEEYYKLVDSELFDQSKTKVVVGNTASGVYRETEVYDRYIDLRCIPELNSVSKEANGVQIGAAVTISQAIEILRVEAGGCNDVIFCKIADHMEKVASPFVRNTASLGGNLVMAQRDQFASDIATILLAAGSSICIQASSKRLTVMMEDFLQMPPCDHKTLLLSICIPRWTPIGGLFSGDKTMAGTESLFRWNFKQINIERDMSGFWCIWEPTCHQG

SEQ ID NO: 189837 - protein, 763 aa, Zea Mays
MAASPSPSTATATASPSASAAAVLAVNGERVELREGDVNPGTTLLEFLRTRTRFTGPKLGCGEGTSPRPPPPSPRALPFRGCGACVVLLSAYDAASGAVSHAAASSCLTLVHGLHHRAVTTTEGLGGGGRLHAVHERLAGFHASQCGFCTPGVCMSLAAALAGAEAEAKAKAGRRPAPPEGFARLTAAEAEWAVAGNLCRCTGYRPIADACKSFAADVDLEDLGLNSFWRKGDAHASKLPRYDEGSIGVFPEFLKAEIRASSGVDQYTPPALLGSATTWHRPRSVEEYYKLVDSELFDQSKTKVVVGNTASGVYRETEVYDRYIDLRCIPELNSVSKEANGVQIGAAVTISQAIEILRVEAGGCNDVIFCKIADHMEKVASPFVRNTASLGGNLVMAQRDQFASDIATILLAAGSSICIQASSKRLTVMMEDFLQMPPCDHKTLLLSICIPRWTPIGGLFSGDKTMAGTESKTGTSVLFETYRAAPRPLGNAVAYLNSAFLAQVSSDGTSSRLILREICLAFGAYGSQHAIRARNVEKLLVGKPITTSVLLEACRRLKETIVPKEGTRHAAYRSSLAVAFLFTFLYPVTEGTLKTVKEVHLNGYATFGTNGNPNCGPDAHVDVSLKKVIDVNSGSCTNERILEYSNQIIEINKDYFPVGIPTKKVGAELQASGEAVFVDDIPAPKDCVYGAFIYSTKPLAHVKSIELDLSLKQLKTLGVVTVKDIPECGSNVGANTIFGPEPLFGDPVTQCAGEPLGVVFCCY

SEQ ID NO: 189838 - protein, 612 aa, Zea Mays
MSLAAALAGAEAEAKAKAGRRPAPPEGFARLTAAEAEWAVAGNLCRCTGYRPIADACKSFAADVDLEDLGLNSFWRKGDAHASKLPRYDEGSIGVFPEFLKAEIRASSGVDQYTPPALLGSATTWHRPRSVEEYYKLVDSELFDQSKTKVVVGNTASGVYRETEVYDRYIDLRCIPELNSVSKEANGVQIGAAVTISQAIEILRVEAGGCNDVIFCKIADHMEKVASPFVRNTASLGGNLVMAQRDQFASDIATILLAAGSSICIQASSKRLTVMMEDFLQMPPCDHKTLLLSICIPRWTPIGGLFSGDKTMAGTESKTGTSVLFETYRAAPRPLGNAVAYLNSAFLAQVSSDGTSSRLILREICLAFGAYGSQHAIRARNVEKLLVGKPITTSVLLEACRRLKETIVPKEGTRHAAYRSSLAVAFLFTFLYPVTEGTLKTVKEVHLNGYATFGTNGNPNCGPDAHVDVSLKKVIDVNSGSCTNERILEYSNQIIEINKDYFPVGIPTKKVGAELQASGEAVFVDDIPAPKDCVYGAFIYSTKPLAHVKSIELDLSLKQLKTLGVVTVKDIPECGSNVGANTIFGPEPLFGDPVTQCAGEPLGVVKHKDLPI

SEQ ID NO: 189839 - protein, 373 aa, Zea Mays
MSSDDSFLQKDCTAEQAVSKQIRALRKKLQQIEILEAKQLAGHQLDSQQVAKLESRAALEEGRTNRKPEVSKKQKRKNKQSTQTPSVKNEPGQQIPITELQVLQVNVSAEKQEAYAADPIKPMEAAAFSNTKDTASPPEKKPSQPTPSKKKNRKGGLSLFLSGALDDTPKPSLPAPAVPATPKPEGPAWGGVKITKGPASLRDIQTEQSRTNEPASAKAKDRHENSPDSAGRATRLSSFIPDARSSPVAVVAPARAAAAPSSEGDRSTPPWSSSATSPNVSQPSLRDIQQMQQRHHGGVSHSPKTQTSGFCIPPHGGAPEAAGGGGVKDNVPNRWFRPETDAPSSIRSIQIEEQAMKDFRRFYSSVRIVKPQV

SEQ ID NO: 189840 - protein, 360 aa, Zea Mays
MVEYLKGKVLRGVSAAKYHTIVLGADGEVFTWGHRLVTPRRVVVARCLKKGGNTNLKFHRMERLQVISVAAGTTHNTALTADGALFYWVSSDPDLKCQQEAYAADPIKPMEAAAFSNTKDTASPPEKKPSQPTPSKKKNRKGGLSLFLSGALDDTPKPSLPAPAVPATPKPEGPAWGGVKITKGPASLRDIQTEQSRTNEPASAKAKDRHENSPDSAGRATRLSSFIPDARSSPVAVVAPARAAAAPSSEGDRSTPPWSSSATSPNVSQPSLRDIQQMQQRHHGGVSHSPKTQTSGFCIPPHGGAPEAAGGGGVKDNVPNRWFRPETDAPSSIRSIQIEEQAMKDFRRFYSSVRIVKPQV

SEQ ID NO: 189841 - protein, 718 aa, Zea Mays
MVEYLKGKVLRGVSAAKYHTIVLGADGEVFTWGHRLVTPRRVVVARCLKKGGNTNLKFHRMERLQVISVAAGTTHNTALTADGALFYWVSSDPDLKCQQIFSMCGRNIVNISAGKYWTAVATSTGDVFMWDAKKRKDETPIFTRVHGVKRATFVCVGETHMLVLSSIYHPEYPPKPKSQGLKSMLEWNGGTEELGEDILFDDVQPNSGLSGSSGEMSKGVPSLKSLCEKVAVEYLLEPKNSIQLLEIADSLEAKELKKHCEDLAIRNLDYIFTVGASSIMNASSEILVNLEKLLDEKSSEPWSQHRLPTMTATYPAVIDSDVEEDEAREFPKTRKCGKSASRPSAMSSDDSFLQKDCTAEQAVSKQIRALRKKLQQIEILEAKQLAGHQLDSQQVAKLESRAALEEGRTNRKPEVSKKQKRKNKQSTQTPSVKNEPGQQIPITELQVLQVNVSAEKQEAYAADPIKPMEAAAFSNTKDTASPPEKKPSQPTPSKKKNRKGGLSLFLSGALDDTPKPSLPAPAVPATPKPEGPAWGGVKITKGPASLRDIQTEQSRTNEPASAKAKDRHENSPDSAGRATRLSSFIPDARSSPVAVVAPARAAAAPSSEGDRSTPPWSSSATSPNVSQPSLRDIQQMQQRHHGGVSHSPKTQTSGFCIPPHGGAPEAAGGGGVKDNVPNRWFRPETDAPSSIRSIQIEEQAMKDFRRFYSSVRIVKPQV

SEQ ID NO: 189842 - protein, 1058 aa, Zea Mays
METSISPPGTSKQSAVRKPSPGSSLKDLCLVSKQGSIAEVESALALLKKSGGNIDGRNAFGLSALHLATWRNHLPIVRRLLDAGADPDARDGESGWSSLHRALHFGHLCIAGVLLQFGASLALEDTKGRTPVDLISCPVSQANGDFPDAVATEVFSWGSGTNYQLGTGNAHIQKLPCKVEALHGSYIKTVAASKFHSVAVSSNGELYTWGFGRGGRLGHPDIHSGQTTAVITPRQVTVGLGRKRVNAVAAAKHHTVIATELGELFTWGSNREGQLGYPSVDTQPTPRRVGSLKQRIISVAAANKHSAAVADTGEVFTWGCNKEGQLGYGTSNSASNCIPRMVEYLKGKVLRGVSAAKYHTIVLGADGEVFTWGHRLVTPRRVVVARCLKKGGNTNLKFHRMERLQVISVAAGTTHNTALTADGALFYWVSSDPDLKCQQIFSMCGRNIVNISAGKYWTAVATSTGDVFMWDAKKRKDETPIFTRVHGVKRATFVCVGETHMLVLSSIYHPEYPPKPKSQGLKSMLEWNGGTEELGEDILFDDVQPNSGLSGSSGEMSKGVPSLKSLCEKVAVEYLLEPKNSIQLLEIADSLEAKELKKHCEDLAIRNLDYIFTVGASSIMNASSEILVNLEKLLDEKSSEPWSQHRLPTMTATYPAVIDSDVEEDEAREFPKTRKCGKSASRPSAMSSDDSFLQKDCTAEQAVSKQIRALRKKLQQIEILEAKQLAGHQLDSQQVAKLESRAALEEGRTNRKPEVSKKQKRKNKQSTQTPSVKNEPGQQIPITELQVLQVNVSAEKQEAYAADPIKPMEAAAFSNTKDTASPPEKKPSQPTPSKKKNRKGGLSLFLSGALDDTPKPSLPAPAVPATPKPEGPAWGGVKITKGPASLRDIQTEQSRTNEPASAKAKDRHENSPDSAGRATRLSSFIPDARSSPVAVVAPARAAAAPSSEGDRSTPPWSSSATSPNVSQPSLRDIQQMQQRHHGGVSHSPKTQTSGFCIPPHGGAPEAAGGGGVKDNVPNRWFRPETDAPSSIRSIQIEEQAMKDFRRFYSSVRIVKPQV

SEQ ID NO: 189843 - protein, 601 aa, Zea Mays
METSISPPGTSKQSAVRKPSPGSSLKDLCLVSKQGSIAEVESALALLKKSGGNIDGRNAFGLSALHLATWRNHLPIVRRLLDAGADPDARDGESGWSSLHRALHFGHLCIAGVLLQFGASLALEDTKGRTPVDLISCPVSQANGDFPDAVATEVFSWGSGTNYQLGTGNAHIQKLPCKVEALHGSYIKTVAASKFHSVAVSSNGELYTWGFGRGGRLGHPDIHSGQTTAVITPRQVTVGLGRKRVNAVAAAKHHTVIATELGELFTWGSNREGQLGYPSVDTQPTPRRVGSLKQRIISVAAANKHSAAVADTGEVFTWGCNKEGQLGYGTSNSASNCIPRMVEYLKGKVLRGVSAAKYHTIVLGADGEVFTWGHRLVTPRRVVVARCLKKGGNTNLKFHRMERLQVISVAAGTTHNTALTADGALFYWVSSDPDLKCQQIFSMCGRNIVNISAGKYWTAVATSTGDVFMWDAKKRKDETPIFTRVHGVKRATFVCVGETHMLVLSSIYHPEYPPKPKSQGLKSMLEWNGGTEELGEDILFDDVQPNSGLSGSSGEMSKGVPSLKSLCEKVAVEYLLEPKNSIQLLEIADSLEAKELKKHCE

SEQ ID NO: 189844 - protein, 849 aa, Zea Mays
MVNYTHGDLVEVVVLVIQIFTAKHHTVIATELGELFTWGSNREGQLGYPSVDTQPTPRRVGSLKQRIISVAAANKHSAAVADTGEVFTWGCNKEGQLGYGTSNSASNCIPRMVEYLKGKVLRGVSAAKYHTIVLGADGEVFTWGHRLVTPRRVVVARCLKKGGNTNLKFHRMERLQVISVAAGTTHNTALTADGALFYWVSSDPDLKCQQIFSMCGRNIVNISAGKYWTAVATSTGDVFMWDAKKRKDETPIFTRVHGVKRATFVCVGETHMLVLSSIYHPEYPPKPKSQGLKSMLEWNGGTEELGEDILFDDVQPNSGLSGSSGEMSKGVPSLKSLCEKVAVEYLLEPKNSIQLLEIADSLEAKELKKHCEDLAIRNLDYIFTVGASSIMNASSEILVNLEKLLDEKSSEPWSQHRLPTMTATYPAVIDSDVEEDEAREFPKTRKCGKSASRPSAMSSDDSFLQKDCTAEQAVSKQIRALRKKLQQIEILEAKQLAGHQLDSQQVAKLESRAALEGELAELGIPSEIYSTSSACPAEGRTNRKPEVSKKQKRKNKQSTQTPSVKNEPGQQIPITELQVLQVNVSAEKEAYAADPIKPMEAAAFSNTKDTASPPEKKPSQPTPSKKKNRKGGLSLFLSGALDDTPKPSLPAPAVPATPKPEGPAWGGVKITKGPASLRDIQTEQSRTNEPASAKAKDRHENSPDSAGRATRLSSFIPDARSSPVAVVAPARAAAAPSSEGDRSTPPWSSSATSPNVSQPSLRDIQQMQQRHHGGVSHSPKTQTSGFCIPPHGGAPEAAGGGGVKDNVPNRWFRPETDAPSSIRSIQIEEQAMKDFRRFYSSVRIVKPQV

SEQ ID NO: 189845 - protein, 1093 aa, Zea Mays
METSISPPGTSKQSAVRKPSPGSSLKDLCLVSKQGSIAEVESALALLKKSGGNIDGRNAFGLSALHLATWRNHLPIVRRLLDAGADPDARDGESGWSSLHRALHFGHLCIAGVLLQFGASLALEDTKGRTPVDLISCPVSQANGDFPDAVATEVFSWGSGTNYQLGTGNAHIQKLPCKVEALHGSYIKTVAASKFHSVAVSSNGELYTWGFGRGGRLGHPDIHSGQTTAVITPRQVTVGLGRKRVNAVAAAKHHTVIATELGELFTWGSNREGQLGYPSVDTQPTPRRVGSLKQRIISVAAANKHSAAVADTGEVFTWGCNKEGQLGYGTSNSASNCIPRMVEYLKGKVLRGVSAAKYHTIVLGADGEVFTWGHRLVTPRRVVVARCLKKGGNTNLKFHRMERLQVISVAAGTTHNTALTADGALFYWVSSDPDLKCQQIFSMCGRNIVNISAGKYWTAVATSTGDVFMWDAKKRKDETPIFTRVHGVKRATFVCVGETHMLVLSSIYHPEYPPKPKSQGLKSMLEWNGGTEELGEDILFDDVQPNSGLSGSSGEMSKGVPSLKSLCEKVAVEYLLEPKNSIQLLEIADSLEAKELKKHCEDLAIRNLDYIFTVGASSIMNASSEILVNLEKLLDEKSSEPWSQHRLPTMTATYPAVIDSDVEEDEAREFPKTRKCGKSASRPSAMSSDDSFLQKDCTAEQAVSKQIRALRKKLQQIEILEAKQLAGHQLDSQQVAKLESRAALEGELAELGIPSEIYSTSSACPAEGRTNRKPEVSKKQKRKNKQSTQTPSVKNEPGQQIPITELQVLQVNVSAEKEAYAADPIKPMEAAAFSNTKDTASPPEKKPSQPTPSKKKNRKGGLSLFLSGALDDTPKPSLPAPAVPATPKPEGPAWGGVKITKGPASLRDIQTEQSRTNEPASAKAKDRHENSPDSAGRATRLSSFIPDARSSPVAVVAPARAAAAPSSEGDRSTPPWSSSATSPNVSQPSLRDIQQMQQAPWRRLPQPENPDIGLLYTAPRRSARGRWRWRREGQRAQPVVQAGDRRPVLHPLHPDRGAGYEGLQALLQQREDRQAAGLVALAAAAVAALAESD

SEQ ID NO: 189846 - protein, 252 aa, Zea Mays
MRPILMKGHERPLTFLRYNRDGDLLFSCAKDHTPTVWYADNGDRLGTYRGHNGAVWTCDVSRDSARLITGSADQTAKLWDVSTGKELFSFRFDAPARSVEFAIGDALAVVTTDNFMDHVPTVQVKRIAEDIDDQTEESALVITGIKGRINRAVWGPLNRTIITAGEDATVRIWDSETGQLLKESDKESGHQKTISSLSKSLDWSHFITGSLDKSAKLWDTRTLTLIKTYVTERPVNAVDISPTHDTEVVRMQ

SEQ ID NO: 189847 - protein, 309 aa, Zea Mays
MRPILMKGHERPLTFLRYNRDGDLLFSCAKDHTPTVWYADNGDRLGTYRGHNGAVWTCDVSRDSARLITGSADQTAKLWDVSTGKELFSFRFDAPARSVEFAIGDALAVVTTDNFMDHVPTVQVKRIAEDIDDQTEESALVITGIKGRINRAVWGPLNRTIITAGEDATVRIWDSETGQLLKESDKESGHQKTISSLSKSLDWSHFITGSLDKSAKLWDTRTLTLIKTYVTERPVNAVDISPTHDTVVLGGGQDAMNVTMTDRRAGKFEAKFYHKILQEEIGGVKGHFGPINALAFNPDGRSSVIVANY

SEQ ID NO: 189848 - protein, 405 aa, Zea Mays
MDEDAGGASPPPVPLAHVPPLQQPTTAAPSHRDMAASPTSSRSVTETVNGSHRFVIQGYSLAKGMGVGKHIASETFSVGGYQWAVYFYPDGKNPEDNSVYVSVFIALASDGTDVRALFELTLLDQSGKGKHKVHSHFDRSMESGPYTLKYRGSMWGYKRFFRRTALELSDYLKDDCLKINCTVGVVVSTIDYSIPHSIHVPDSDIGYDFGSLLDSQEGADVILNVGGERFHAHKLVLAARSHVFGSQFFDDESDGEKSEVNETDELKEFSIDDMEPNVFKAMLHFIYRDTLVDDDELGASSSDGSIFDTPAAKLLAAADKYHLARLKSLCESYLCKGISVASVASTLALADRHHAMELKAVCLKFAAENLSGCEDQCSSVGKSQSVCGQLSDGGDSSCRRVRQRT

SEQ ID NO: 189849 - protein, 583 aa, Zea Mays
MVDAISLPPPELYRHVEDISGDELMKALQIKGKIPRRKALSALEEKVISILSEQGYVSKDGLSGGTESLADIVEDEDEDEIVDDGEVDEGDVHIKPVSRKPLQLFAEVDVKLVFKEISSKYLRKRIVERGKRSDGRSPWELRPINSQCGLLPRAHGSALFTRGETQSLAVVTLGGYQMAQRIDNLVDTEDSKSFYLQYSFPPSCVGEVGRIGAPSRREIGHGMLAERALEPILPLEEDFPYTIRVESTITESNGSSSMASVCGGCLALQDAGVPIKFPVAGIAMGLVLDTQEFGGDGSPLILSDITGAEDASGDMDLKIAGNESGISAFQMDIKVVGITLPVMEKALLQAREGRQHILNEMLKSSPPPSKALSPHAPLIHVMKVKPNKVNLIIGSGGKTIKSIIEETGVDAIDTGDDGTVKITARDLTSLEKSKIIIANLTMVPKVGEIYRDCEIKSIAPYGAFVEIAPGREGLCHISELSSGWLAKAEDAFKVGDRIDVKLIEINDKGQLRLSSRALLPDVDSESNIGSTKEKVPQKDDVIKMTTKRPRRKKQPEPSGAENATTKALAKSAAAPAGSKGSEA

SEQ ID NO: 189850 - protein, 659 aa, Zea Mays
MMAFTPQTAWLSQLLMENSELDLMMAGTDSAILMIEGYCDFLTEEKLLEAVEAGQVAIREICKAIDVLVQSCGKKKMVDAISLPPPELYRHVEDISGDELMKALQIKGKIPRRKALSALEEKVISILSEQGYVSKDGLSGGTESLADIVEDEDEDEIVDDGEVDEGDVHIKPVSRKPLQLFAEVDVKLVFKEISSKYLRKRIVERGKRSDGRSPWELRPINSQCGLLPRAHGSALFTRGETQSLAVVTLGGYQMAQRIDNLVDTEDSKSFYLQYSFPPSCVGEVGRIGAPSRREIGHGMLAERALEPILPLEEDFPYTIRVESTITESNGSSSMASVCGGCLALQDAGVPIKFPVAGIAMGLVLDTQEFGGDGSPLILSDITGAEDASGDMDLKIAGNESGISAFQMDIKVVGITLPVMEKALLQAREGRQHILNEMLKSSPPPSKALSPHAPLIHVMKVKPNKVNLIIGSGGKTIKSIIEETGVDAIDTGDDGTVKITARDLTSLEKSKIIIANLTMVPKVGEIYRDCEIKSIAPYGAFVEIAPGREGLCHISELSSGWLAKAEDAFKVGDRIDVKLIEINDKGQLRLSSRALLPDVDSESNIGSTKEKVPQKDDVIKMTTKRPRRKKQPEPSGAENATTKALAKSAAAPAGSKGSEA

SEQ ID NO: 189851 - protein, 409 aa, Zea Mays
MLAAPAALHLLLPAPPLPPPHYHHHHVAFPAPPLHASLPCSRRPRRRPPRHGVARASAAMAEEASSSGPTKFSVRIPVGDREILVETGHIGRQASASVMVTDGETILYCSVCLSDTPNDPSDFFPLSVHYQERLSAAGRTSGGFFKREGKTKDHEVLVCRLIDRPLRPTMPKGFYFETQILSWVFSYDGIHSPDCLAITAAGIAVALSEIPNKQTIAGVRIGLINNQFIVNPTTEQMENSELDLMMAGTDSAILMIEGYCDFLTEEKLLEAVEAGQVAIREICKAIDVLVQSCGKKKMVDAISLPPPELYRHVEDISGDELMKALQIKGKIPRRKALSALEEKVISILSEQGYVSKDGLSGGTESLADIVEDEDEDEIVDDGEVDEGDVHIKPVSRKPLQVMIIAICRS

SEQ ID NO: 189852 - protein, 877 aa, Zea Mays
MLAAPAALHLLLPAPPLPPPHYHHHHVAFPAPPLHASLPCSRRPRRRPPRHGVARASAAMAEEASSSGPTKFSVRIPVGDREILVETGHIGRQASASVMVTDGETILYCSVCLSDTPNDPSDFFPLSVHYQERLSAAGRTSGGFFKREGKTKDHEVLVCRLIDRPLRPTMPKGFYFETQILSWVFSYDGIHSPDCLAITAAGIAVALSEIPNKQTIAGVRIGLINNQFIVNPTTEQMENSELDLMMAGTDSAILMIEGYCDFLTEEKLLEAVEAGQVAIREICKAIDVLVQSCGKKKMVDAISLPPPELYRHVEDISGDELMKALQIKGKIPRRKALSALEEKVISILSEQGYVSKDGLSGGTESLADIVEDEDEDEIVDDGEVDEGDVHIKPVSRKPLQLFAEVDVKLVFKEISSKYLRKRIVERSDGRSPWELRPINSQCGLLPRAHGSALFTRGETQSLAVVTLGGYQMAQRIDNLVDTEDSKSFYLQYSFPPSCVGEVGRIGAPSRREIGHGMLAERALEPILPLEEDFPYTIRVESTITESNGSSSMASVCGGCLALQDAGVPIKFPVAGIAMGLVLDTQEFGGDGSPLILSDITGAEDASGDMDLKIAGNESGISAFQMDIKVVGITLPVMEKALLQAREGRQHILNEMLKSSPPPSKALSPHAPLIHVMKVKPNKVNLIIGSGGKTIKSIIEETGVDAIDTGDDGTVKITARDLTSLEKSKIIIANLTMVPKVGEIYRDCEIKSIAPYGAFVEIAPGREGLCHISELSSGWLAKAEDAFKVGDRIDVKLIEINDKGQLRLSSRALLPDVDSESNIGSTKEKVPQKDDVIKMTTKRPRRKKQPEPSGAENATTKALAKSAAAPAGSKGSEA

SEQ ID NO: 189853 - protein, 578 aa, Zea Mays
MLAAPAALHLLLPAPPLPPPHYHHHHVAFPAPPLHASLPCSRRPRRRPPRHGVARASAAMAEEASSSGPTKFSVRIPVGDREILVETGHIGRQASASVMVTDGETILYCSVCLSDTPNDPSDFFPLSVHYQERLSAAGRTSGGFFKREGKTKDHEVLVCRLIDRPLRPTMPKGFYFETQILSWVFSYDGIHSPDCLAITAAGIAVALSEIPNKQTIAGVRIGLINNQFIVNPTTEQMENSELDLMMAGTDSAILMIEGYCDFLTEEKLLEAVEAGQVAIREICKAIDVLVQSCGKKKMVDAISLPPPELYRHVEDISGDELMKALQIKGKIPRRKALSALEEKVISILSEQGYVSKDGLSGGTESLADIVEDEDEDEIVDDGEVDEGDVHIKPVSRKPLQLFAEVDVKLVFKEISSKYLRKRIVERGKRSDGRSPWELRPINSQCGLLPRAHGSALFTRGETQSLAVVTLGGYQMAQRIDNLVDTEDSKSFYLQYSFPPSCVGEVGRIGAPSRREIGHGMLAERALEPILPLEEDFPYTIRVESTITESNGSSRLFSTSRCWGSYKVSCCWNCNGPGP

SEQ ID NO: 189854 - protein, 559 aa, Zea Mays
MLAAPAALHLLLPAPPLPPPHYHHHHVAFPAPPLHASLPCSRRPRRRPPRHGVARASAAMAEEASSSGPTKFSVRIPVGDREILVETGHIGRQASASVMVTDGETILYCSVCLSDTPNDPSDFFPLSVHYQERLSAAGRTSGGFFKREGKTKDHEVLVCRLIDRPLRPTMPKGFYFETQILSWVFSYDGIHSPDCLAITAAGIAVALSEIPNKQTIAGVRIGLINNQFIVNPTTEQMENSELDLMMAGTDSAILMIEVAIREICKAIDVLVQSCGKKKMVDAISLPPPELYRHVEDISGDELMKALQIKGKIPRRKALSALEEKVISILSEQGYVSKDGLSGGTESLADIVEDEDEDEIVDDGEVDEGDVHIKPVSRKPLQLFAEVDVKLVFKEISSKYLRKRIVERGKRSDGRSPWELRPINSQCGLLPRAHGSALFTRGETQSLAVVTLGGYQMAQRIDNLVDTEDSKSFYLQYSFPPSCVGEVGRIGAPSRREIGHGMLAERALEPILPLEEDFPYTIRVESTITESNGSSRLFSTSRCWGSYKVSCCWNCNGPGP

SEQ ID NO: 189855 - protein, 69 aa, Zea Mays
MKLLDDSFRVINQKMNKTKCGSCSISDDEYDVYSNYFLFVFSPRLLVAFLLSVMRPHINFTDRLFHVCI

SEQ ID NO: 189856 - protein, 86 aa, Zea Mays
MMQERKAKQQQSLKKVIDVKLPSVTDMERSPKGETGSTELTGVGTDVLNKERLLGKAGEKNGEKGNDVAPQDLKTQTEKLAGLNGC

SEQ ID NO: 189857 - protein, 583 aa, Zea Mays
MAAVGSLKPGMETLHVQDYKDGNMYYGAYPAYAYGAYGGWGEYPYLSHDGAQTPTAGTYADMYYGYAPYGVATMGHDGQIYGSQNYQYPSTYTKQQNSTAKLSSNGISEKLTPAPQTDVSTIGVDEVKGLKNSNSVLKTDRNMPGSNGSYGRSSVRSGSYQNQTSWSHYPYYSSEMFSDKQQKFTGNHNSTSNPKTKGQSRNQNTRQYPHLMGLQTPTSSVYSANGIYGYDGSYGPGLWYGSHMYNSGLYGGWNSLYDGKYRTRGRGNNGYYVYGNGSIDGFNELKRGPRSGMYKNQLGLEATTQAPAKEQDLLFANGSHPAMKDQYNQADFAETYSDAKFFIIKSYSEDDVHKSVKYNVWASTPNGNKKLDAAYQEAKEKSSETPVFLLFSVNASGQFVGLAEMVGRVDFEKTVEHWQQDKWTGCFPVKWHIVKDVPNSLLKHIILENNENKPVTNSRDTHEVKLEQGLQVLKIFKDHVCKTSILDDFGFYDNREKMMQERKAKQQQSLKKVIDVKLPSVTDMERSPKGETGSTELTGVGTDVLNKERLLGKAGEKNGEKGNDVAPQDLKTQTEKLAGLNGC

SEQ ID NO: 189858 - protein, 614 aa, Zea Mays
MAAVGSLKPGMETLHVQDYKDAPPAKAAVESLQPAMESLHVQDYKDAPPAKGVAAAAVGSLQPGAENLQVQDYKDGNMYYGAYPAYAYGAYGGWGEYPYLSHDGAQTPTAIYGSQNYQYPSTYTKQQNSTAKLSSNGISEKLTPAPQTDVSTIGVDEVKGLKNSNSVLKTDRNMPGSNGSYGRSSVRSGSYQNQTSWSHYPYYSSEMFSDKQQKFTGNHNSTSNPKTKGQSRNQNTRQYPHLMGLQTPTSSVYSANGIYGYDGSYGPGLWYGSHMYNSGLYGGWNSLYDGKYRTRGRGNNGYYVYGNGSIDGFNELKRGPRSGMYKNQLGLEATTQAPAKEQDLLFANGSHPAMKDQYNQADFAETYSDAKFFIIKSYSEDDVHKSVKYNVWASTPNGNKKLDAAYQEAKEKSSETPVFLLFSVNASGQFVGLAEMVGRVDFEKTVEHWQQDKWTGCFPVKWHIVKDVPNSLLKHIILENNENKPVTNSRDTHEVKLEQGLQVLKIFKDHVCKTSILDDFGFYDNREKMMQERKAKQQQSLKKVIDVKLPSVTDMERSPKGETGSTELTGVGTDVLNKERLLGKAGEKNGEKGNDVAPQDLKTQTEKLAGLNGC

SEQ ID NO: 189859 - protein, 560 aa, Zea Mays
MYYGAYPAYAYGAYGGWGEYPYLSHDGAQTPTAGTYADMYYGYAPYGVATMGHDGQIYGSQNYQYPSTYTKQQNSTAKLSSNGISEKLTPAPQTDVSTIGVDEVKGLKNSNSVLKTDRNMPGSNGSYGRSSVRSGSYQNQTSWSHYPYYSSEMFSDKQQKFTGNHNSTSNPKTKGQSRNQNTRQYPHLMGLQTPTSSVYSANGIYGYDGSYGPGLWYGSHMYNSGLYGGWNSLYDGKYRTRGRGNNGYYVYGNGSIDGFNELKRGPRSGMYKNQLGLEATTQAPAKEQDLLFANGSHPAMKDQYNQADFAETYSDAKFFIIKSYSEDDVHKSVKYNVWASTPNGNKKLDAAYQEAKEKSSETPVFLLFSVNASGQFVGLAEMVGRVDFEKTVEHWQQDKWTGCFPVKWHIVKDVPNSLLKHIILENNENKPVTNSRDTHEVKLEQGLQVLKIFKDHVCKTSILDDFGFYDNREKMMQERKAKQQQSLKKVIDVKLPSVTDMERSPKGETGSTELTGVGTDVLNKERLLGKAGEKNGEKGNDVAPQDLKTQTEKLAGLNGC

SEQ ID NO: 189860 - protein, 599 aa, Zea Mays
MCRTTRTRLRPSKGVAAAAVGSLQPGAENLQVQDYKDGNMYYGAYPAYAYGAYGGWGEYPYLSHDGAQTPTAGTYADMYYGYAPYGVATMGHDGQIYGSQNYQYPSTYTKQQNSTAKLSSNGISEKLTPAPQTDVSTIGVDEVKGLKNSNSVLKTDRNMPGSNGSYGRSSVRSGSYQNQTSWSHYPYYSSEMFSDKQQKFTGNHNSTSNPKTKGQSRNQNTRQYPHLMGLQTPTSSVYSANGIYGYDGSYGPGLWYGSHMYNSGLYGGWNSLYDGKYRTRGRGNNGYYVYGNGSIDGFNELKRGPRSGMYKNQLGLEATTQAPAKEQDLLFANGSHPAMKDQYNQADFAETYSDAKFFIIKSYSEDDVHKSVKYNVWASTPNGNKKLDAAYQEAKEKSSETPVFLLFSVNASGQFVGLAEMVGRVDFEKTVEHWQQDKWTGCFPVKWHIVKDVPNSLLKHIILENNENKPVTNSRDTHEVKLEQGLQVLKIFKDHVCKTSILDDFGFYDNREKMMQERKAKQQQSLKKVIDVKLPSVTDMERSPKGETGSTELTGVGTDVLNKERLLGKAGEKNGEKGNDVAPQDLKTQTEKLAGLNGC

SEQ ID NO: 189861 - protein, 156 aa, Zea Mays
MPPAKAGRLTNNACVSSLPAPTTLTQSPSHASYANTSPSRTSYANTSPSHASYATVSPTHASYATPSPPHASYATASPYPYDRPVGHGVYCTRSPPVIREPYVYPAEEVATVNVGIPMAYSTPPMSYPAAPYGGYGNGMPAYTNGMAPAFHQAYYR

SEQ ID NO: 189862 - protein, 226 aa, Zea Mays
MLKKASAGRAAAATGRGDPAAPASRPSPTAKVAEGGACSARPASRLLSTRSVPSLFAESPMTTSPAASAPELLSRAPLRSGGSPGAAGLAGVLVAEEADERGSLLRNGRRVLRGTRLRVQLPPPPPIEFGVKNREAQLALLSPVQRSPARLARRRSEVEEELAGEDYTCVIARGPNPRMTHIFEDRVVESSTSTSSSTSCDGCNKDAALLLVLESSTWCCLCLLDG

SEQ ID NO: 189863 - protein, 352 aa, Zea Mays
MSPPGSSPCRVQLSWSKSLVRKWLNIRPRAQDFHADFDAGHQARDGGGGGGGSWRPSCSSSEASASTAKKSRADRPSSKRSAERARRGRNNFDLARLTEVQDYRIFAATWNVGGKSPPRGLNLDEWLHTSPSADIYVLGFQEIVPLNAGNVLGTEDNLPAKKWVSLIRRTLNKNPGSSGCGGGYHTPSPVLDPVVELDADFEGSARRQDNFSFFHRRSFHNLSRSLRMDGDLMFPQPRLDRRFSVCDPVNLGGRPSDFDGSLRCPGSPDEDTIDMEMGDSVQVSPFPHSYSASAPSEQNDDQSNSSRYCLVASKQMVGIFLTVWVRNEIRDDVRNLKVSCVGRGLMGYLGNK

SEQ ID NO: 189864 - protein, 68 aa, Zea Mays
METKQASIHPYLFLSALCLTRSAEPNEPFPICSSTSYCSIPVTVKLLAGSEITCTVGEECCQRNSSCQ

SEQ ID NO: 189865 - protein, 57 aa, Zea Mays
MIYGGLASLIFSGYIVYDTNNIIKRYTYDQYVWAAVSLYLDVINLFLSLMTLFRAAD

SEQ ID NO: 189866 - protein, 281 aa, Zea Mays
MQTETVQKLTGTYPKEGFRKVDPDRWEFANEGFLRGQRHLLKNIRRRKPPAQNATNQQSIGPYLEVGHFGYDAEIDMLKRDKQLLMAEVVKLRQEQQNTKANLKAMEDRLQGTEQKQQQMMAFLARVMRNPEFLKHLVSQNEMRKELQDAISKKRRRRIDQGPEADDLGASSSLEQGSPVLFNAQDPVEFLVDGIPADLESPAFDGHGLIGPHDIDIDIDIGSTSEQQQDMPQEDLNDNFWEQLLNEGLGEENDSPVIEDDMNVLSEKMGYLNSDGPTSSN

SEQ ID NO: 189867 - protein, 144 aa, Zea Mays
MVDAGDITAGGPPRAHEEEQAGTPAYGSVVLGGTFDRLHDGHRRLLKSIKPELIVQVEPIEDPYGPSITDEKLDAIIVSKETLNGGLAVNRKREEKGFPLLKVEVVDLLSGGVEGEKLSSSALRKLEAEQAQQSETKSGSLEAS

SEQ ID NO: 189868 - protein, 227 aa, Zea Mays
MEQDHQAYEEADHYAKRKAANICASTGARTVKRKLEASRIPPNDLVRRTGKEQKVPAYEVRQLTKNELPLKVSARNAINSDHFHRPLSSRCNDLTKNISEIRPVCRALPLPEKPLCIREEDECSVASCSANYSEYSTSDNKQSVGTGSCFADDVMYSCQRRQETKNAYGSGLFLNVHELELQAYQSTVRAFHAAGPLTWEQESLLTNLRLSLNISNEEHLLQFLCSG

SEQ ID NO: 189869 - protein, 75 aa, Zea Mays
MYSCQRRQETKNAYGSGLFLNVHELELQAYQSTVRAFHAAGPLTWEQESLLTNLRLSLNISNEEHLLQLRFLCSG

SEQ ID NO: 189870 - protein, 229 aa, Zea Mays
MEQDHQAYEEADHYAKRKAANICASTGARTVKRKLEASRIPPNDLVRRTGKEQKVPAYEVRQLTKNELPLKVSARNAINSDHFHRPLSSRCNDLTKNISEIRPVCRALPLPEKPLCIREEDECSVASCSANYSEYSTSDNKQSVGTGSCFADDVMYSCQRRQETKNAYGSGLFLNVHELELQAYQSTVRAFHAAGPLTWEQESLLTNLRLSLNISNEEHLLQLRFLCSG

SEQ ID NO: 189871 - protein, 168 aa, Zea Mays
MIFTCPGHSPAILKKLRRERIAERMRALQELVPNTNKTDRAAMLDEILDYVKFLRLQVKVLSMSRLGGAGAVAQLVADIPLSVKGEAGDGGGAPQQQQQQHVWEKWSTDGTEKQVAKLMEEDIGAAMQFLQSKALCMMPVSLAMAIYDTQHPLDGHGHSLKPEPNASS

SEQ ID NO: 189872 - protein, 159 aa, Zea Mays
MAGQPPPSGASEDDFLEHFFAFPSAASAGAAGGHAGAGVGGDHPFPLALSLDAAAEAKPDRDPVQLAGLFPPVFAGAGGVHQPHLRGPPPPQMFQAQPKPGEGGMAPQPPAPRPKVRARRGQATDPHSIAERLRRERIAERMRALQELVPNTNKIGQPC

SEQ ID NO: 189873 - protein, 139 aa, Zea Mays
MAAHPVDAPTAVHTRAPAPPPHRAALPTLYEFDDLESIIDRTLKRDFDTEEALWLLKIGLVCIPDSPKIKPSMSMVAKMLQGECAVSDRIMRPGLITDVMDLKVRMVEPIQFNLTSCSSTAAPDLVRSIWRPRMSKSRT

SEQ ID NO: 189874 - protein, 192 aa, Zea Mays
MSKARNESAFPQDEIDSHREHFYNELTSDSIASKKPKIRKRENNNSVSSSAPNIPNTQGGGGFLWKTEIPEDGNCGDWLSIPLGDVKVLVNEITSVRSKRILHEVPMDTVTRLLDVIDRQIRYSQVSMNKVEALYRLFKKIGNTFIDDGLINKALSNGKPTVVEFYANWYEVCRELALDIYKAEQQYKSAGN

SEQ ID NO: 189875 - protein, 136 aa, Zea Mays
MSKARNESAFPQDEIDSHREHFYNELTSDSIASKKPKIRKRENNNSVSSSAPNIPNTQGGGGFLWKTEIPEDGNCGDWLSIPLGDVKVLVNEITSVRSKRILHEVPMDTVTRLLDVIDRQIRYSQGLSIDVKENSA

SEQ ID NO: 189876 - protein, 168 aa, Zea Mays
MSMVAKMLQGPFGGPGCQNQEHEKHFEHFTPNMSKARNESAFPQDEIDSHREHFYNELTSDSIASKKPKIRKRENNNSVSSSAPNIPNTQGGGGFLWKTEIPEDGNCGDWLSIPLGDVKVLVNEITSVRSKRILHEVPMDTVTRLLDVIDRQIRYSQGLSIDVKENSA

SEQ ID NO: 189877 - protein, 160 aa, Zea Mays
MSKARNESAFPQDEIDSHREHFYNELTSDSIASKKPKIRKRENNNSVSSSAPNIPNTQGGGGFLWKTEIPEDGNCGDWLSIPLGDVKVLVNEITSVRSKRILHEVPMDTVTRLLDVIDRQIRYSQGLSIDVKENVSYLPCHSSLHDYSCFVARINLTTML

SEQ ID NO: 189878 - protein, 86 aa, Zea Mays
MDTVTRLLDVIDRQIRYSQVSMNKVEALYRLFKKIGNTFIDDGLINKALSNGKPTVVEFYANWYEVCRELALDIYKAEQQYKSAGN

SEQ ID NO: 189879 - protein, 224 aa, Zea Mays
MSMVAKMLQGPFGGPGCQNQEHEKHFEHFTPNMSKARNESAFPQDEIDSHREHFYNELTSDSIASKKPKIRKRENNNSVSSSAPNIPNTQGGGGFLWKTEIPEDGNCGDWLSIPLGDVKVLVNEITSVRSKRILHEVPMDTVTRLLDVIDRQIRYSQVSMNKVEALYRLFKKIGNTFIDDGLINKALSNGKPTVVEFYANWYEVCRELALDIYKAEQQYKSAGN

SEQ ID NO: 189880 - protein, 277 aa, Zea Mays
MVRAQPYMLLLIFDRPDHSLEHIRPLIFPAKRRKVVTMKKRKERVSSESTLPSVVGTTAEESTALIPAASESKAQKDLTPVGRDALSRIRGRDFDSACGLTEDTGALIVWQAPPILEETAAHNQLDSKQDPDSFRPPATSDIEYQRQGPTAQMTNISFMVGNSSHARPTDQDDENMRGDILTLINESNARIMEMYDAHISKLKAGNIKLIEQLENERAAALERTRILEERLQQELENERTVAAERTRLLEKKLQRELEHEREAAIERTRVLDERLQR

SEQ ID NO: 189881 - protein, 304 aa, Zea Mays
MLHGAQQASASSTAGPRPKSTAILQSDQPPRAAAAREGGRGGTGPESLVRGSVVAPCVSCGICGGLLRDATAFTECLHAFCRKCIYDKVAKDNIKCCPKCGIFMGNPLEKLRPDHSLEHIRPLIFPAKRRKVVTMKKRKERVSSESTLPSVVGTTAEESTALIPAASESKAQKDLTPVGRDALSRIRGRDFDSACGLTEDTGALIVWQAPPILEETAAHNQLDSKQDPDSFRPPATSDIEYQRQGPTAQMTNISFMVGNSSHARPTDQDDENMRGDILTLINESNARIMEMYDAHISKLKATGK

SEQ ID NO: 189882 - protein, 1546 aa, Zea Mays
MQSIVMQIHVCFLQQPQGTRRCRAKPQKKEEESTENNKLENGSLDATEEVHHGVEKGDGHVTRKRPRRSAACSDFKEKSIRLSEKKSVVMVKKNRMEEEEVDAVNLTKLGPEDPPPCRKLIDFILHDAEGNPQPFEMSEIDDFFITALIMPMDDDLEKERERGVRCEGFGRIEDWNISGYDEGTPVIWVSTDVADYECVKPSTNYKSYFDHFYEKAQVCVEVFKKLAKSVGGNPNQGLDELLASVVRSTNAMKGYSGTMSKDLVISIGEFVYNQLVGLDETSNNDDEKFATLPVLLSLRDQCRSRVELTKLPSNFSNTSLKIKDSECDETAEDDDDAKLARLLQQEEEWKMMKKQRGRRGTPSQKNVYIKISEAEIANDYPLPAYYKPFSQEMDEYIFDSDDSIFSDDVPVRILNNWTLYNADSRLISLELIPMKSGAENDVVIFGSGFMRDDDGSCCSTAESVKSSSSSSKADQLDAGIPIYLSPIKEWIIEFGGSMICITIRTDVAWYKLRQPTKQYAPWCEPVLKTARLAVSIITLLKEQSRASKLSFADVIRKVAEFDKGNPAFISSNITLVERYIVVHGQIILQQFADFPDETIRRSAFVSGLLLKMEQRRHTKLVMKKKTQVMRGENLNPSAAMGPASRKKAMRATTTRLINRIWSDYYAHHFPEDSKEGDGNETKEIDDEQEENEDEDAEDEGQIEENISKTPPSTRSRKLLSQTCKEIRWEGETSGKTLSGETLYKCAYVRELRIPVGGTVALEDDSGDTVICFVEYMFQKVDGSKMVHGRILQKGSQTILGNAANEREVFLTNDCLEFKLDDIKELVMVDIQSRPWGHKYRKENSEADKVEQVKAEERKKKGQPMVYFCKSLYWPEKGAFFALSRDKMGLGSGLCSSCDNIEPDSDELKIFSKTSFVYRKVTYNVNEFLYIRPDFFAEDEDRATFKAGRNVGLKPYAVCQILSIPEGAGSKKLNPASANISARRFYRPDDISSAKAYASDIREVYYSEDVIDVPVDMIEGKCEVRKKNDLASSDLPVMFEHVFFCELIYDRASGALKQLPPNVRFMSMVQRTSALKKNKGKQICEPDQIDSGKWLDVPKENRLATLDIFAGCGGLSEGLQQAGVSFTKWAIEYEEPAGEAFNKNHPEAVVFVDNCNVILKAIMDKCGDTDDCVSTSEAAEQAAKLPEVNINNLPVPGEVEFINGGPPCQGFSGMNRFNQSPWSKVQCEMILAFLSFAEYFRPRFFLLENVRNFVSFNKGQTFRLAVASLLEMGYQVRFGILEAGAFGVAQSRKRAFIWAAAPGEMLPDWPEPMHVFASPELKITLPDGQYYAAARSTAGGAPFRAITVRDTIGDLPKVGNGASKLTLEYGGEPVSWFQKKIRGNMMVLNDHISKEMNELNLIRCQHIPKRPGCDWHDLPDEKVKLSNGQMADLIPWCLPNTAKRHNQWKGLYGRLDWEGNFPTSVTDPQPMGKVGMCFHPDQDRIITVRECARSQGFPDSYEFAGNIQNKHRQIGNAVPPPLAYALGRKLKEAVDKRQEASAGVPAP

SEQ ID NO: 189883 - protein, 1125 aa, Zea Mays
MQSIVMQIHVCFLQQPQGTRRCRAKPQKKEEESTENNKLENGSLDATEEVHHGVEKGDGHVTRKRPRRSAACSDFKEKSIRLSEKKSVVMVKKNRMEEEEVDAVNLTKLGPEDPPPCRKLIDFILHDAEGNPQPFEMSEIDDFFITALIMPMDDDLEKERERGVRCEGFGRIEDWNISGYDEGTPVIWVSTDVADYECVKPSTNYKSYFDHFYEKAQVCVEVFKKLAKSVGGNPNQGLDELLASVVRSTNAMKGYSGTMSKDLVISIGEFVYNQLVGLDETSNNDDEKFATLPVLLSLRDQCRSRVELTKLPSNFSNTSLKIKDSECDETAEDDDDAKLARLLQQEEEWKMMKKQRGRRGTPSQKNVYIKISEAEIANDYPLPAYYKPFSQEMDEYIFDSDDSIFSDDVPVRILNNWTLYNADSRLISLELIPMKSGAENDVVIFGSGFMRDDDGSCCSTAESVKSSSSSSKADQLDAGIPIYLSPIKEWIIEFGGSMICITIRTDVAWYKLRQPTKQYAPWCEPVLKTARLAVSIITLLKEQSRASKLSFADVIRKVAEFDKGNPAFISSNITLVERYIVVHGQIILQQFADFPDETIRRSAFVSGLLLKMEQRRHTKLVMKKKTQVMRGENLNPSAAMGPASRKKAMRATTTRLINRIWSDYYAHHFPEDSKEGDGNETKEIDDEQEENEDEDAEDEGQIEENISKTPPSTRSRKLLSQTCKEIRWEGETSGKTLSGETLYKCAYVRELRIPVGGTVALEDDSGDTVICFVEYMFQKVDGSKMVHGRILQKGSQTILGNAANEREVFLTNDCLEFKLDDIKELVMVDIQSRPWGHKYRKENSEADKVEQVKAEERKKKGQPMVYFCKSLYWPEKGAFFALSRDKMGLGSGLCSSCDNIEPDSDELKIFSKTSFVYRKVTYNVNEFLYIRPDFFAEDEDRATFKAGRNVGLKPYAVCQILSIPEGAGSKKLNPASANISARRFYRPDDISSAKAYASDIREVYYSEDVIDVPVDMIEGKCEVRKKNDLASSDLPVMFEHVFFCELIYDRASGALKQLPPNVRFMSMVQRTSALKKNKGKQICEPDQIDSGKWLDVPKENRLATLDIFAGCGGLSEGLQQAGMYC

SEQ ID NO: 189884 - protein, 63 aa, Zea Mays
MLVQPCIVCFVGEYLCRVRIVLFGNEYKWSVSTFGYSELRMWYVYLFLCIPDFFGLLFLHIRY

SEQ ID NO: 189885 - protein, 63 aa, Zea Mays
MRFYWHFKVYHCLQHTSLDYILCLISSLAIKGSIFIGEPPHFHTMQHQWTWLFKYMFFLFSSA

SEQ ID NO: 189886 - protein, 81 aa, Zea Mays
MDLRNNLQGPASIHFQTSKCTVRIFHKGDIVEVDTWISANGKNGMRRHWHVHDSITGHTILKVTRFKSTSCSYVYIFNQFY

SEQ ID NO: 189887 - protein, 162 aa, Zea Mays
MTPPPPRSFALGRRPSRLGASSRSRPTPGSFNLRRRLGISPPIPHPHPRRRLGRSPPLPLGKPLCARPTRVASPPAPAQQLTGPTRIASPPARGSAGHCSAPETRCRPVGSKLLDDARWTAEAQSPPSLHPVELHMPPEAPSPPSLKWHRDSAVRAAAHPQR

SEQ ID NO: 189888 - protein, 304 aa, Zea Mays
MARSRVNMMATNACAFDIRIRCFCNVGRLDLADILIRCFCNVGRLDLAFAAFGLFLRTGWRVQNVVLNQLIKGLCDGKRTGDAMDMVFRRMPELGYTPDVFSYNALIKGLCAEKKSQEALELLLHMTANGGYNCSPDVVSYNIVIDGLFKEGEVDKAYFLFHEMPGQGFPPDLVTYSSVIDGLCKAQAMDKAEASLQQMLYKGVMPNTRPYNSLIHGYCSLGQLVEAVRLLKKMSGGGLQLNVVTYNMLIDYYCKIGRCAEARSIFDSMVRRGQKPNATTYCSLLHGDATEWFEAKFSQLKHGN

SEQ ID NO: 189889 - protein, 106 aa, Zea Mays
MYRVVSKEWDHEDREDDHGKAQGRRRRASRPSRHLHLLVLKHKRIGNQQLVSLVILKNHLLPNVVQRLLNSQTHETQKYRKTKYSHSSILFTGYNKWWCPLYIVQS

SEQ ID NO: 189890 - protein, 115 aa, Zea Mays
MDKSSKVRKAAESLMNEILRICGQEMVGRNLKDLPSPTLAIVSERLKLSTLKDLPSPTLAIVSERLKLSTAHEGFSESVKVVSTSMSLPSKAGLKNNKHGPNDRGSNVGKPVSQV

SEQ ID NO: 189891 - protein, 133 aa, Zea Mays
MCFNGVSDWALYLLRKYSHLYYLLRTQGVGCLPWFCLRVIWTVRIYCPRSTASTSSNPRSIPQSLPPTALRRASRGRPSPPDPVRCSRTHPGMLGLRSRHLPPPYADPPLAPPSSDPPQPCPLPSSPRRTPPS

SEQ ID NO: 189892 - protein, 129 aa, Zea Mays
MGGSTSPRVWPTRRYSPLRGSAVRSQGEKPCNPMKGETVARWWRRPAVGCKYEHLAKRVFLPMLPLPPAPHARRRAARPRRSLPSHHAPRCGGQHQSTPSIACWSYAQCMSPSTGGGGATVLPQRIHRT

SEQ ID NO: 189893 - protein, 189 aa, Zea Mays
MNMENDQPLLPAPPVNLESAILEQNANMVALKEGCSVGSELPPGLQGNFGGNKANTCTSALHSIDEGEEITCGFIKHERSYDLQNLTMDKSIQVSNETKYKFLAHKPRVGCETAIQNCELASALPDTEFHGPVATISTTGQSEGSDTEINVPNYSDLEALILDLDLIPWDQESDFIQPEGFSILKAGRI

SEQ ID NO: 189894 - protein, 338 aa, Zea Mays
MNMENDQPLLPAPPVNLESAILEQNANMVALKEGCSVGSELPPGLQGNFGGNKANTCTSALHSIDEGEEITCGFIKHERSYDLQNLTMDKSIQVSNETKYKFLAHKPRVGCETAIQNCELASALPDTEFHGPVATISTTGQSEGSDTEINVPNYSDLEALVLDLDLIPWDQESDFIQPEVSRFQYPESRKDLIRLEKGVCSYMNRSIMSKGAFAILYGQRTKYYIREPEVSLGRETEEVHVDIDLSKEGKANKISRRQAVIKMDDGGSFYINNTGKFSIFVNSKEVPCSKRINLMSDSLIEVWPSNPFFVLTLGIPNNRAILNIHALFNSMYWFLFLI

SEQ ID NO: 189895 - protein, 338 aa, Zea Mays
MNMENDQPLLPAPPVNLESAILEQNANMVALKEGCSVGSELPPGLQGNFGGNKANTCTSALHSIDEGEEITCGFIKHERSYDLQNLTMDKSIQVSNETKYKFLAHKPRVGCETAIQNCELASALPDTEFHGPVATISTTGQSEGSDTEINVPNYSDLEALILDLDLIPWDQESDFIQPEVSRFQYPESRKDLIRLEKGVCSYMNRSIMSKGAFAILYGQRTKYYIREPEVSLGRETEEVHVDIDLSKEGKANKISRRQAVIKMDDGGSFYINNTGKFSIFVNSKEVPCSKRINLMSDSLIEVWPSNPFFVLTLGIPNNRAILNIHALFNSMYWFLFLI

SEQ ID NO: 189896 - protein, 516 aa, Zea Mays
MEDKASNLDAVLKEAVDLENIPIEEVFENLRCSPQGLTTEQAEQRLAIFGPNKLEEKQESKFLKFLGFMWNPLSWVMEAAAIMAIALANGGNKPPDWQDFVGIITLLIINSTISFIEENNAGNAAAALMARLAPKAKVLRNGRWTEEESAILVPGDIISVKLGDIIPADARLLEGDPLKIDQSALTGESLPVTKGPGDGVYSGSTCKQGEIEAVVIATGVHTFFGKAAHLVDSTNQVGHFQKVLTAIGNFCICSIAVGMLVELVVMYAIQHRAYRPGIDNLLVLLIGGIPIAMPTVLSVTMAIGAHRLAQQGAITKRMTAIEEMAGMDVLCSDKTGTLTLNKLTVDKSLVEVFQRGVDQDTVILMAARASRTENQDAIDATIVGMLADPKEARAGVQEIHFLPFNPTDKRTALTYLDGEGRMHRVSKGAPEQILHLAHNKSDIERRVRAVIDKFAERGLRALGVAYQEVPDGRKESPGGPWQFIGLLPLFDPPRHDSAETIRRALNLGVNVKMITE

SEQ ID NO: 189897 - protein, 117 aa, Zea Mays
MVSRNRQNSYACSHASRLHGNMHALAHDDTWNLTHGRRGGGGVRALYGPNVAVSVQTRTSLQSVLYMYILSIVKFYKCHRTTGHQNYMISRFYFDMGEHHYISQSTCNKTQPLISTD

SEQ ID NO: 189898 - protein, 62 aa, Zea Mays
MYASVVFFSSSSSNSYINFSSLNHRFKKLLNNFGSKKNVSSPIVLYIYVVVLFCIYPHLKKI

SEQ ID NO: 189899 - protein, 224 aa, Zea Mays
MGEAVYDDEYLRSRKQNKPSSASEEDEEFRLEEDAEDDDEEEYSLSTSEDLEEPQRHKKLETRGRRGTKLRSVGEIQAGLRRSKRSSRPRINYRQYDFSDSDTEPRKARKSDASDPDAGSDAENDMELSTSSQEQEEEEDDSHDEENGNNANDKMEEDHTAEENKIEPEEEKEQPQQQPVEKMDAPSRESKSVGRTFLDLNELAPGGGFDDGPSLTVRDDMDNI

SEQ ID NO: 189900 - protein, 237 aa, Zea Mays
MASASLHPASPSHPNPNHSPDADLRSDRPMPDADAVSGGASPTSPEKREEEEEEAPGKEAKPAAAAEEQPTPRKTRLPRACNNKPKPPPPPPSERPRRRAAAASGAGGADETPQCRVVTPLVSEPEAPAELPRWRLRCMWELGSVLNFLHVFRPLLNITGEFTAEDVEAALITPNEILDDVHMPLLKSIPPVTRMAMGRGTWVTVLCRKLKDWWHWVAEGDLPIVASHGLASHIGHS

SEQ ID NO: 189901 - protein, 566 aa, Zea Mays
MAMGRGTWVTVLCRKLKDWWHWVAEGDLPIVASHGTEIETYKTLEPAIRLLILKAICDIRVEQEDIRNFIDSSLKHGHDLSTFRKERIGGDSLGISYWYEDDEILGHRLYREIRRVEQVKKEPGKRSRGKGGSSAISVVSYQWETVASTFDEFDDVAEKLFSSRNRTEVSLGKKLKIEYLPEIEKLHKKKERLLKKQQREALLLDSYLASDGLTTGRSLRDRKPVTYTFDDYDRSINEAIKITKKRENSAEPVATTANRRVLPPRSEAPSNGKLNNGPSPTTNDSSDGNSSKSDDYRDSDGEQENEALDRSNRRRKRSQRYTQDFVEAVSDVDPNFDSDDDIMGEAVYDDEYLRSRKQNKPSSASEEDEEFRLEEDAEDDDEEEYSLSTSEDLEEPQRHKKLETRGRRGTKLRSVGEIQAGLRRSKRSSRPRINYRQYDFSDSDTEPRKARKSDASDPDAGSDAENDMELSTSSQEQEEEEDDSHDEENGNNANDKMEEDHTAEENKIEPEEEKEQPQQQPVEKMDAPSRESKSVGRTFLDLNELAPGGGFDDGPSLTVRDDMDNI

SEQ ID NO: 189902 - protein, 264 aa, Zea Mays
MASASLHPASPSHPNPNHSPDADLRSDRPMPDADAVSGGASPTSPEKREEEEEEAPGKEAKPAAAAEEQPTPRKTRLPRACNNKPKPPPPPPSERPRRRAAAASGAGGADETPQCRVVTPLVSEPEAPAELPRWRLRCMWELGSVLNFLHVFRPLLNITGEFTAEDVEAALITPNEILDDVHMPLLKSIPPVTRMAMGRGTWVTVLCRKLKDWWHWVAEGDLPIVASHGTEIETYKTLEPAIRLLILKAICDIRVEVCTDFILI

SEQ ID NO: 189903 - protein, 552 aa, Zea Mays
MQKAEGLVALEGDLPIVASHGTEIETYKTLEPAIRLLILKAICDIRVEQEDIRNFIDSSLKHGHDLSTFRKERIGGDSLGISYWYEDDEILGHRLYREIRRVEQVKKEPGKRSRGKGGSSAISVVSYQWETVASTFDEFDDVAEKLFSSRNRTEVSLGKKLKIEYLPEIEKLHKKKERLLKKQQREALLLDSYLASDGLTTGRSLRDRKPVTYTFDDYDRSINEAIKITKKRENSAEPVATTANRRVLPPRSEAPSNGKLNNGPSPTTNDSSDGNSSKSDDYRDSDGEQENEALDRSNRRRKRSQRYTQDFVEAVSDVDPNFDSDDDIMGEAVYDDEYLRSRKQNKPSSASEEDEEFRLEEDAEDDDEEEYSLSTSEDLEEPQRHKKLETRGRRGTKLRSVGEIQAGLRRSKRSSRPRINYRQYDFSDSDTEPRKARKSDASDPDAGSDAENDMELSTSSQEQEEEEDDSHDEENGNNANDKMEEDHTAEENKIEPEEEKEQPQQQPVEKMDAPSRESKSVGRTFLDLNELAPGGGFDDGPSLTVRDDMDNI

SEQ ID NO: 189904 - protein, 309 aa, Zea Mays
MASASLHPASPSHPNPNHSPDADLRSDRPMPDADAVSGGASPTSPEKREEEEEEAPGKEAKPAAAAEEQPTPRKTRLPRACNNKPKPPPPPPSERPRRRAAAASGAGGADETPQCRVVTPLVSEPEAPAELPRWRLRCMWELGSVLNFLHVFRPLLNITGEFTAEDVEAALITPNEILDDVHMPLLKSIPPVTRMAMGRGTWVTVLCRKLKDWWHWVAEGDLPIVASHGTEIETYKTLEPAIRLLILKAICDIRVEQEDIRNFIDSSLKHGHDLSTFRKERIGGDSLGISYWKNSFQVGTGQRFLLERS

SEQ ID NO: 189905 - protein, 114 aa, Zea Mays
MSRPAWSAREALAASAVAAVLLGGLVLMSLVVGRDARTPSPASAAAPAVGGRRMVIGATEELKGGDDPLSSSKRRVPNGPDPIHNRYLLFLACKLTWNALSLSLSKTFCSFLSH

SEQ ID NO: 189906 - protein, 52 aa, Zea Mays
MVPDTYARVKCYICRVVRDPQLSKSIRIAVISPESGDLITDLQPKSGCEPHE

SEQ ID NO: 189907 - protein, 270 aa, Zea Mays
MPIPCALLSAERLLHACLSLPGACSRQAPAPFRGRVLSSTAGRAQLLSLGAHSSLSPLVPAMAAVPWSEFLLARISSLRRPSSMAAAFFSRRVLPSPSPSPRRPACPAFIYGRSPPMSRPSQAPASIPVRAWRLRCSGAQVLARSSSARHLLELAPVFLLGAQIPARFCVARVAFRCSYACCREALYSVRLHRVVVRAKLLAPHYRRFLVPAGRAPLQLPIRQNVWTSAHRVLGRSAPMFLPNIDCLILGRSTHAWCSMNGSNRIALSKS

SEQ ID NO: 189908 - protein, 144 aa, Zea Mays
MGETAMSIQKAAFRYRLPIDDDTDPVLETVYNCIVASTMLGSLFVMIPLSSEEHQLLQDVQEKLSVHPLTAPVLGNDHAEFRQRGTPSVVPPILDGDMLVQFLELTGEQQQAILTHALPGKGQHRPLSVFQVLQTLERVHYALN

SEQ ID NO: 189909 - protein, 575 aa, Zea Mays
MLLRFESETRDYLPGFLYKDSSIPSVNTFLQLISIRRIGITPVLLVPIHDSANADIIVLSDRPWLLHAARHSLAYSSISFLSASHVTPVSSVDCPNGLLFVAESCLHLVELVHGKRLNAQKFSIGGTPRKVLYHNESRTLLVLRTGLNGASSSSDVVQVDPQNGVLLSRYKCEPGETAKCMQIAKIGNDQVLIVGTTKSAGRPMMSNGEAESIKGRLIVLSLEAVESPRESSSFIPTFSFNPSSHSGSPFHEIVGYTTEEFSSNSMCSSPDEFSCNQIQAEQMTGQLRSLTQYILNGAVLALCPYLDRYVLAAAGNMIYVFGFTNENPHRIKKCAVGRTRFTITCLKTFASRIAVGDCRDGVLFYSYNESHRKLELVYSDPAHRLVGDIALLNCETAVVSDRRGSISVLSCTRLEVSESPQKNLAVNCSFYMGETAMSIQKAAFRYRLPIDDDTDPVLETVYNCIVASTMLGSLFVMIPLSSEEHQLLQDVQEKLSVHPLTAPVLGNDHAEFRQRGTPSVVPPILDGDMLVQFLELTGEQQQAILTHALPGKGQHRPLSVFQVLQTLERVHYALN

SEQ ID NO: 189910 - protein, 1255 aa, Zea Mays
MWRPLCFLHVNDSRGKHKTAGGVPVETVFCRESIYNYLCKRFFAIANIELSKPGNLRHHLGRILAIDRESNFVAVSSYEDKFALIHVSVSQSGSGSGIISEKKYFYPPENEDDARIITSSRTSIRGTIWTMRFISVPQDEEYYPVLAMIINRKGSDVNDLSLFGYDSSSCVINHLSSYSEIGPLVLDVSEIPETFGFALLLRVGDALLLDLRNPTNVCCIQRVSLTTNLIGEPITVEDPCPGLDVDDDVAACALLELRDSGNNIMKDDGYMDIDGVDSRSNVKPRIVCSWSWEPPDPVRRGCARLLFCLDDGEFHILEFTLDVEGAKLYTFEYIDRTLPCRPLFWMKNRMIIGFVEMGDGMIFKLGHRRLLHKSTIQNVAPILDLAIADYHGEKQDQMFACCGMSPEGSLRVLRNGVNVDRLLKTEAIYQGVTGLWTLRMKATDAYHSFLVLSFVEETRILSVGLSFNDISDAVGFQPDVCTLACGLVADNLLVQIYSKGVKVCLPTVYAHPEGAPLTSPICTDWYPAITISVGAVGHNIVVVATSNPCCLYVLGVRSSSSYQYELYATHHVQLQYEVSCISIPQEDCIHDNVSFSCGEGDDICKNPPPKVNVCKFAVIGTHRPSVEIISLEPGEALRVLTIGTVSVNNALGAPMSGCIPENVRFVAAERFYILAGLRNGMLLRFESETRDYLPGFLYKDSSIPSVNTFLQLISIRRIGITPVLLVPIHDSANADIIVLSDRPWLLHAARHSLAYSSISFLSASHVTPVSSVDCPNGLLFVAESCLHLVELVHGKRLNAQKFSIGGTPRKVLYHNESRTLLVLRTGLNGASSSSDVVQVDPQNGVLLSRYKCEPGETAKCMQIAKIGNDQVLIVGTTKSAGRPMMSNGEAESIKGRLIVLSLEAVESPRESSSFIPTFSFNPSSHSGSPFHEIVGYTTEEFSSNSMCSSPDEFSCNQIQAEQMTGQLRSLTQYILNGAVLALCPYLDRYVLAAAGNMIYVFGFTNENPHRIKKCAVGRTRFTITCLKTFASRIAVGDCRDGVLFYSYNESHRKLELVYSDPAHRLVGDIALLNCETAVVSDRRGSISVLSCTRLEVSESPQKNLAVNCSFYMGETAMSIQKAAFRYRLPIDDDTDPVLETVYNCIVASTMLGSLFVMIPLSSEEHQLLQDVQEKLSVHPLTAPVLGNDHAEFRQRGTPSVVPPILDGDMLVQFLELTGEQQQAILTHALPGKGQHRPLSVFQVLQTLERVHYALN

SEQ ID NO: 189911 - protein, 1108 aa, Zea Mays
MRFISVPQDEEYYPVLAMIINSCVINHLSSYSEIGPLVLDVSEIPETFGFALLLRVGDALLLDLRNPTNVCCIQRVSLTTNLIGEPITVEDPCPGLDVDDDVAACALLELRDSGNNIMKDDGYMDIDGVDSRSNVKPRIVCSWSWEPPDPVRRGCARLLFCLDDGEFHILEFTLDVEGAKLYTFEYIDRTLPCRPLFWMKNRMIIGFVEMGDGMIFKLGHRRLLHKSTIQNVAPILDLAIADYHGEKQDQMFACCGMSPEGSLRVLRNGVNVDRLLKTEAIYQGVTGLWTLRMKATDAYHSFLVLSFVEETRILSVGLSFNDISDAVGFQPDVCTLACGLVADNLLVQIYSKGVKVCLPTVYAHPEGAPLTSPICTDWYPAITISVGAVGHNIVVVATSNPCCLYVLGVRSSSSYQYELYATHHVQLQYEVSCISIPQEDCIHDNVSFSCGEGDDICKNPPPKVNVCKFAVIGTHRPSVEIISLEPGEALRVLTIGTVSVNNALGAPMSGCIPENVRFVAAERFYILAGLRNGMLLRFESETRDYLPGFLYKDSSIPSVNTFLQLISIRRIGITPVLLVPIHDSANADIIVLSDRPWLLHAARHSLAYSSISFLSASHVTPVSSVDCPNGLLFVAESCLHLVELVHGKRLNAQKFSIGGTPRKVLYHNESRTLLVLRTGLNGASSSSDVVQVDPQNGVLLSRYKCEPGETAKCMQIAKIGNDQVLIVGTTKSAGRPMMSNGEAESIKGRLIVLSLEAVESPRESSSFIPTFSFNPSSHSGSPFHEIVGYTTEEFSSNSMCSSPDEFSCNQIQAEQMTGQLRSLTQYILNGAVLALCPYLDRYVLAAAGNMIYVFGFTNENPHRIKKCAVGRTRFTITCLKTFASRIAVGDCRDGVLFYSYNESHRKLELVYSDPAHRLVGDIALLNCETAVVSDRRGSISVLSCTRLEVSESPQKNLAVNCSFYMGETAMSIQKAAFRYRLPIDDDTDPVLETVYNCIVASTMLGSLFVMIPLSSEEHQLLQDVQEKLSVHPLTAPVLGNDHAEFRQRGTPSVVPPILDGDMLVQFLELTGEQQQAILTHALPGKGQHRPLSVFQVLQTLERVHYALN

SEQ ID NO: 189912 - protein, 1102 aa, Zea Mays
MKPSTAGDASAAAAASSSGPSTSASTSASTSTADATHYIAKRVLRGSAVLHVAEGCFRSPDSADVVLAKETSLELVAVGDDGVLQSICEQDIFGIIKDIGVLQWHSRHNGLIPQIECKDLLVVLSDSGKLSLLYFCSEMHRFFAIANIELSKPGNLRHHLGRILAIDRESNFVAVSSYEDKFALIHVSVSQSGSGSGIISEKKYFYPPENEDDARIITSSRTSIRGTIWTMRFISVPQDEEYYPVLAMIINRKGSDVNDLSLFGYDSSSCVINHLSSYSEIGPLVLDVSEIPETFGFALLLRVGDALLLDLRNPTNVCCIQRVSLTTNLIGEPITVEDPCPGLDVDDDVAACALLELRDSGNNIMKDDGYMDIDGVDSRSNVKPRIVCSWSWEPPDPVRRGCARLLFCLDDGEFHILEFTLDVEGAKLYTFEYIDRTLPCRPLFWMKNRMIIGFVEMGDGMIFKLGHRRLLHKSTIQNVAPILDLAIADYHGEKQDQMFACCGMSPEGSLRVLRNGVNVDRLLKTEAIYQGVTGLWTLRMKATDAYHSFLVLSFVEETRILSVGLSFNDISDAVGFQPDVCTLACGLVADNLLVQIYSKGVKVCLPTVYAHPEGAPLTSPICTDWYPAITISVGAVGHNIVVVATSNPCCLYVLGVRSSSSYQYELYATHHVQLQYEVSCISIPQEDCIHDNVSFSCGEGDDICKNPPPKVNVCKFAVIGTHRPSVEIISLEPGEALRVLTIGTVSVNNALGAPMSGCIPENVRFVAAERFYILAGLRNGMLLRFESETRDYLPGFLYKDSSIPSVNTFLQLISIRRIGITPVLLVPIHDSANADIIVLSDRPWLLHAARHSLAYSSISFLSASHVTPVSSVDCPNGLLFVAESCLHLVELVHGKRLNAQKFSIGGTPRKVLYHNESRTLLVLRTGLNGASSSSDVVQVDPQNGVLLSRYKCEPGETAKCMQIAKIGNDQVLIVGTTKSAGRPMMSNGEAESIKGRLIVLSLEAVESPRESSSFIPTFSFNPSSHSGSPFHEIVGYTTEEFSSNSMCSSPDEFSCNQIQAEQMTGQLRSLTQYILNGAVLALCPYLDRYVLAAADLCIWFHK

SEQ ID NO: 189913 - protein, 994 aa, Zea Mays
MKPSTAGDASAAAAASSSGPSTSASTSASTSTADATHYIAKRVLRGSAVLHVAEGCFRSPDSADVVLAKETSLELVAVGDDGVLQSICEQDIFGIIKDIGVLQWHSRHNGLIPQIECKDLLVVLSDSGKLSLLYFCSEMHRFFAIANIELSKPGNLRHHLGRILAIDRESNFVAVSSYEDKFALIHVSVSQSGSGSGIISEKKYFYPPENEDDARIITSSRTSIRGTIWTMRFISVPQDEEYYPVLAMIINRKGSDVNDLSLFGYDSSSCVINHLSSYSEIGPLVLDVSEIPETFGFALLLRVGDALLLDLRNPTNVCCIQRVSLTTNLIGEPITVEDPCPGLDVDDDVAACALLELRDSGNNIMKDDGYMDIDGVDSRSNVKPRIVCSWSWEPPDPVRRGCARLLFCLDDGEFHILEFTLDVEGAKLYTFEYIDRTLPCRPLFWMKNRMIIGFVEMGDGMIFKLGHRRLLHKSTIQNVAPILDLAIADYHGEKQDQMFACCGMSPEGSLRVLRNGVNVDRLLKTEAIYQGVTGLWTLRMKATDAYHSFLVLSFVEETRILSVGLSFNDISDAVGFQPDVCTLACGLVADNLLVQIYSKGVKVCLPTVYAHPEGAPLTSPICTDWYPAITISVGAVGHNIVVVATSNPCCLYVLGVRSSSSYQYELYATHHVQLQYEVSCISIPQEDCIHDNVSFSCGEGDDICKNPPPKVNVCKFAVIGTHRPSVEIISLEPGEALRVLTIGTVSVNNALGAPMSGCIPENVRFVAAERFYILAGLRNGMLLRFESETRDYLPGFLYKDSSIPSVNTFLQLISIRRIGITPVLLVPIHDSANADIIVLSDRPWLLHAARHSLAYSSISFLSASHVTPVSSVDCPNGLLFVAESCLHLVELVHGKRLNAQKFSIGGTPRKVLYHNESRTLLVLRTGLNGASSSSDVVQVDPQNGVLLSRYKCEPGETAKCMQIAKIGNDQVLIVGTTKSAGRPMMSNGEAERDA

SEQ ID NO: 189914 - protein, 1217 aa, Zea Mays
MHRFFAIANIELSKPGNLRHHLGRILAIDRESNFVAVSSYEDKFALIHVSVSQSGSGSGIISEKKYFYPPENEDDARIITSSRTSIRGTIWTMRFISVPQDEEYYPVLAMIINRKGSDVNDLSLFGYDSSSCVINHLSSYSEIGPLVLDVSEIPETFGFALLLRVGDALLLDLRNPTNVCCIQRVSLTTNLIGEPITVEDPCPGLDVDDDVAACALLELRDSGNNIMKDDGYMDIDGVDSRSNVKPRIVCSWSWEPPDPVRRGCARLLFCLDDGEFHILEFTLDVEGAKLYTFEYIDRTLPCRPLFWMKNRMIIGFVEMGDGMIFKLGHRRLLHKSTIQNVAPILDLAIADYHGEKQDQMFACCGMSPEGSLRVLRNGVNVDRLLKTEAIYQGVTGLWTLRMKATDAYHSFLVLSFVEETRILSVGLSFNDISDAVGFQPDVCTLACGLVADNLLVQIYSKGVKVCLPTVYAHPEGAPLTSPICTDWYPAITISVGAVGHNIVVVATSNPCCLYVLGVRSSSSYQYELYATHHVQLQYEVSCISIPQEDCIHDNVSFSCGEGDDICKNPPPKVNVCKFAVIGTHRPSVEIISLEPGEALRVLTIGTVSVNNALGAPMSGCIPENVRFVAAERFYILAGLRNGMLLRFESETRDYLPGFLYKDSSIPSVNTFLQLISIRRIGITPVLLVPIHDSANADIIVLSDRPWLLHAARHSLAYSSISFLSASHVTPVSSVDCPNGLLFVAESCLHLVELVHGKRLNAQKFSIGGTPRKVLYHNESRTLLVLRTGLNGASSSSDVVQVDPQNGVLLSRYKCEPGETAKCMQIAKIGNDQVLIVGTTKSAGRPMMSNGEAESIKGRLIVLSLEAVESPRESSSFIPTFSFNPSSHSGSPFHEIVGYTTEEFSSNSMCSSPDEFSCNQIQAEQMTGQLRSLTQYILNGAVLALCPYLDRYVLAAAGNMIYVFGFTNENPHRIKKCAVGRTRFTITCLKTFASRIAVGDCRDGVLFYSYNESHRKLELVYSDPAHRLVGDIALLNCETAVVSDRRGSISVLSCTRLEVSESPQKNLAVNCSFYMGETAMSIQKAAFRYRLPIDDDTDPVLETVYNCIVASTMLGSLFVMIPLSSEEHQLLQDVQEKLSVHPLTAPVLGNDHAEFRQRGTPSVVPPILDGDMLVQFLELTGEQQQAILTHALPGKGQHRPLSVFQVLQTLERVHYALN

SEQ ID NO: 189915 - protein, 991 aa, Zea Mays
MKDDGYMDIDGVDSRSNVKPRIVCSWSWEPPDPVRRGCARLLFCLDDGEFHILEFTLDVEGAKLYTFEYIDRTLPCRPLFWMKNRMIIGFVEMGDGMIFKLGHRRLLHKSTIQNVAPILDLAIADYHGEKQDQMFACCGMSPEGSLRVLRNGVNVDRLLKTEAIYQGVTGLWTLRMKATDAYHSFLVLSFVEETRILSVGLSFNDISDAVGFQPDVCTLACGLVADNLLVQIYSKGVKVCLPTVYAHPEGAPLTSPICTDWYPAITISVGAVGHNIVVVATSNPCCLYVLGVRSSSSYQYELYATHHVQLQYEVSCISIPQEDCIHDNVSFSCGEGDDICKNPPPKVNVCKFAVIGTHRPSVEIISLEPGEALRVLTIGTVSVNNALGAPMSGCIPENVRFVAAERFYILAGLRNGMLLRFESETRDYLPGFLYKDSSIPSVNTFLQLISIRRIGITPVLLVPIHDSANADIIVLSDRPWLLHAARHSLAYSSISFLSASHVTPVSSVDCPNGLLFVAESCLHLVELVHGKRLNAQKFSIGGTPRKVLYHNESRTLLVLRTGLNGASSSSDVVQVDPQNGVLLSRYKCEPGETAKCMQIAKIGNDQVLIVGTTKSAGRPMMSNGEAESIKGRLIVLSLEAVESPRESSSFIPTFSFNPSSHSGSPFHEIVGYTTEEFSSNSMCSSPDEFSCNQIQAEQMTGQLRSLTQYILNGAVLALCPYLDRYVLAAAGNMIYVFGFTNENPHRIKKCAVGRTRFTITCLKTFASRIAVGDCRDGVLFYSYNESHRKLELVYSDPAHRLVGDIALLNCETAVVSDRRGSISVLSCTRLEVSESPQKNLAVNCSFYMGETAMSIQKAAFRYRLPIDDDTDPVLETVYNCIVASTMLGSLFVMIPLSSEEHQLLQDVQEKLSVHPLTAPVLGNDHAEFRQRGTPSVVPPILDGDMLVQFLELTGEQQQAILTHALPGKGQHRPLSVFQVLQTLERVHYALN

SEQ ID NO: 189916 - protein, 1098 aa, Zea Mays
MKPSTAGDASAAAAASSSGPSTSASTSASTSTADATHYIAKRVLRGSAVLHVAEGCFRSPDSADVVLAKETSLELVAVGDDGVLQSICEQDIFGIIKDIGVLQWHSRHNGLIPQIECKDLLVVLSDSGKLSLLYFCSEMHRFFAIANIELSKPGNLRHHLGRILAIDRESNFVAVSSYEDKFALIHVSVSQSGSGSGIISEKKYFYPPENEDDARIITSSRTSIRGTIWTMRFISVPQDEEYYPVLAMIINRKGSDVNDLSLFGYDSSSCVINHLSSYSEIGPLVLDVSEIPETFGFALLLRVGDALLLDLRNPTNVCCIQRVSLTTNLIGEPITVEDPCPGLDVDDDVAACALLELRDSGNNIMKDDGYMDIDGVDSRSNVKPRIVCSWSWEPPDPVRRGCARLLFCLDDGEFHILEFTLDVEGAKLYTFEYIDRTLPCRPLFWMKNRMIIGFVEMGDGMIFKLGHRRLLHKSTIQNVAPILDLAIADYHGEKQDQMFACCGMSPEGSLRVLRNGVNVDRLLKTEAIYQGVTGLWTLRMKATDAYHSFLVLSFVEETRILSVGLSFNDISDAVGFQPDVCTLACGLVADNLLVQIYSKGVKVCLPTVYAHPEGAPLTSPICTDWYPAITISVGAVGHNIVVVATSNPCCLYVLGVRSSSSYQYELYATHHVQLQYEVSCISIPQEDCIHDNVSFSCGEGDDICKNPPPKVNVCKFAVIGTHRPSVEIISLEPGEALRVLTIGTVSVNNALGAPMSGCIPENVRFVAAERFYILAGLRNGMLLRFESETRDYLPGFLYKDSSIPSVNTFLQLISIRRIGITPVLLVPIHDSANADIIVLSDRPWLLHAARHSLAYSSISFLSASHVTPVSSVDCPNGLLFVAESCLHLVELVHGKRLNAQKFSIGGTPRKVLYHNESRTLLVLRTGLNGASSSSDVVQVDPQNGVLLSRYKCEPGETAKCMQIAKIGNDQVLIVGTTKSAGRPMMSNGEAESIKGRLIVLSLEAVESPRESSSFIPTFSFNPSSHSGSPFHEIVGYTTEEFSSNSMCSSPDEFSCNQIQAEQMTGQLRSLTQYILNGAVLALCPYLDRYVLAAAGNMV

SEQ ID NO: 189917 - protein, 739 aa, Zea Mays
MKPSTAGDASAAAAASSSGPSTSASTSASTSTADATHYIAKRVLRGSAVLHVAEGCFRSPDSADVVLAKETSLELVAVGDDGVLQSICEQDIFGIIKDIGVLQWHSRHNGLIPQIECKDLLVVLSDSGKLSLLYFCSEMHRFFAIANIELSKPGNLRHHLGRILAIDRESNFVAVSSYEDKFALIHVSVSQSGSGSGIISEKKYFYPPENEDDARIITSSRTSIRGTIWTMRFISVPQDEEYYPVLAMIINRKGSDVNDLSLFGYDSSSCVINHLSSYSEIGPLVLDVSEIPETFGFALLLRVGDALLLDLRNPTNVCCIQRVSLTTNLIGEPITVEDPCPGLDVDDDVAACALLELRDSGNNIMKDDGYMDIDGVDSRSNVKPRIVCSWSWEPPDPVRRGCARLLFCLDDGEFHILEFTLDVEGAKLYTFEYIDRTLPCRPLFWMKNRMIIGFVEMGDGMIFKLGHRRLLHKSTIQNVAPILDLAIADYHGEKQDQMFACCGMSPEGSLRVLRNGVNVDRLLKTEAIYQGVTGLWTLRMKATDAYHSFLVLSFVEETRILSVGLSFNDISDAVGFQPDVCTLACGLVADNLLVQIYSKGVKVCLPTVYAHPEGAPLTSPICTDWYPAITISVGAVGHNIVVVATSNPCCLYVLGVRSSSSYQYELYATHHVQLQYEVSCISIPQEDCIHDNVSFSCGEGDDICKNPPPKVNVCKFAVIGTHRPSVEIISLEPGEALRA

SEQ ID NO: 189918 - protein, 1046 aa, Zea Mays
MRFISVPQDEEYYPVLAMIINRKGSDVNDLSLFGYDSSSCVINHLSSYSEIGPLVLDVSEIPETFGFALLLRVGDALLLDLRNPTNVCCIQRVSLTTNLIGEPITVEDPCPGLDVDDDVAACALLELRDSGNNIMKDDGYMDIDGVDSRSNVKPRIVCSWSWEPPDPVRRGCARLLFCLDDGEFHILEFTLDVEGAKLYTFEYIDRTLPCRPLFWMKNRMIIGFVEMGDGMIFKLGHRRLLHKSTIQNVAPILDLAIADYHGEKQDQMFACCGMSPEGSLRVLRNGVNVDRLLKTEAIYQGVTGLWTLRMKATDAYHSFLVLSFVEETRILSVGLSFNDISDAVGFQPDVCTLACGLVADNLLVQIYSKGVKVCLPTVYAHPEGAPLTSPICTDWYPAITISVGAVGHNIVVVATSNPCCLYVLGVRSSSSYQYELYATHHVQLQYEVSCISIPQEDCIHDNVSFSCGEGDDICKNPPPKVNVCKFAVIGTHRPSVEIISLEPGEALRVLTIGTVSVNNALGAPMSGCIPENVRFVAAERFYILAGLRNGMLLRFESETRDYLPGFLYKDSSIPSVNTFLQLISIRRIGITPVLLVPIHDSANADIIVLSDRPWLLHAARHSLAYSSISFLSASHVTPVSSVDCPNGLLFVAESCLHLVELVHGKRLNAQKFSIGGTPRKVLYHNESRTLLVLRTGLNGASSSSDVVQVDPQNGVLLSRYKCEPGETAKCMQIAKIGNDQVLIVGTTKSAGRPMMSNGEAESIKGRLIVLSLEAVESPRESSSFIPTFSFNPSSHSGSPFHEIVGYTTEEFSSNSMCSSPDEFSCNQIQAEQMTGQLRSLTQYILNGAVLALCPYLDRYVLAAAGNMIYVFGFTNENPHRIKKCAVGRTRFTITCLKTFASRIAVGDCRDGVLFYSYNESHRKLELVYSDPAHRLVGDIALLNCETAVVSDRRGSISVLSCTRLEVSESPQKNLAVNCSFYMGETAMSIQKAAFRYRLPIDDDTDPVLETVYNCIVASTMLGSLFVMIPLSRVNVNMKIIILRAVR

SEQ ID NO: 189919 - protein, 236 aa, Zea Mays
MVLGYGANGAIIHYRPTPESCSSVGSDNLFLLDSGAQYIDGTTDITRTVHFGEASPRQKECFTRVLQGHIALDQAVFPERTPGFVLDVLARSSLWKIGLDYRHGTGHGVGAALNVHEGPQSISYRYGNLTALQKGMIVSNEPGYYEDNSFGIRIENLLLVKELNLANSFGGISYLGFEKLTFVPIQSKLIESSLMSPSEINWVNDYHEEVWEKVSPLLSGHSRDWLWKNTRPLLDV

SEQ ID NO: 189920 - protein, 222 aa, Zea Mays
MKKKGKAGEEVGEKEASSNDRITGDPSVHNGVISAVYNVSPVALAKSVKNDAEIEGMKNSHLRDAAALAEFWCWLEEEICKSVPLTEVQIAEKLLEFRQKQDGFIETSFDTISGYGANGAIIHYRPTPESCSSVGSDNLFLLDSGAQYIDGTTDITRTVHFGEASPRQKECFTRVLQGHIALDQAVFPERTPGFVLDVLARSSLWKIGLDYRHGSNFFNYIK

SEQ ID NO: 189921 - protein, 553 aa, Zea Mays
MRSGNHGVPTTSEWLNDVLPSGCRVGIDPFLFSFDAAEELKDSIANKNHELVLVQGMNLVDEIWGDARPNPPKEPTRVHDIKYAGIDVPSKLSFIRSQLAENGCDAVVISMLDEVAWLLNMRGSDVPHSPVFYSYLIVEVSTATLFVDNSKVSKDVLEHLEQAGVKLKPYEAIISEVERLAEKGAKLWLDSSSVNAAIITAFKSSCDMKKKGKAGEEVGEKEASSNDRITGDPSVHNGVISAVYNVSPVALAKSVKNDAEIEGMKNSHLRDAAALAEFWCWLEEEICKSVPLTEVQIAEKLLEFRQKQDGFIETSFDTISGYGANGAIIHYRPTPESCSSVGSDNLFLLDSGAQYIDGTTDITRTVHFGEASPRQKECFTRVLQGHIALDQAVFPERTPGFVLDVLARSSLWKIGLDYRHGTGHGVGAALNVHEGPQSISYRYGNLTALQKGMIVSNEPGYYEDNSFGIRIENLLLVKELNLANSFGGISYLGFEKLTFVPIQSKLIESSLMSPSEINWVNDYHEEVWEKVSPLLSGHSRDWLWKNTRPLLDV

SEQ ID NO: 189922 - protein, 380 aa, Zea Mays
MMFYHLVAELVLIRMQFLFSFDAAEELKDSIANKNHELVLVQGMNLVDEIWGDARPNPPKEPTRVHDIKYAGIDVPSKLSFIRSQLAENGCDAVVISMLDEVAWLLNMRGSDVPHSPVFYSYLIVEVSTATLFVDNSKVSKDVLEHLEQAGVKLKPYEAIISEVERLAEKGAKLWLDSSSVNAAIITAFKSSCDMKKKGKAGEEVGEKEASSNDRITGDPSVHNGVISAVYNVSPVALAKSVKNDAEIEGMKNSHLRDAAALAEFWCWLEEEICKSVPLTEVQIAEKLLEFRQKQDGFIETSFDTISGYGANGAIIHYRPTPESCSSVGSDNLFLLDSGAQYIDGTTDITRTVHFGEASPRQKECFTRVLQAQAMELELR

SEQ ID NO: 189923 - protein, 224 aa, Zea Mays
MGRFCLISLPPSPTTSSFPTYSLGCSLMAIEAARLSPSIAAAAFLASRPPLALRPFSLRRRFPLLRVLANSSGGDGRVVALSSSELRKRRGLSSSSGAADSASDGDEKLRSLRRLFARPDVAIDAYIVPSQDAHQSEFIAECFTRRAYLTGFTGSAGTAVVTKNKAALWTDGRYFLQAEKELSHHWTLMRSGNHGVPTTSEWLNDVLPSGCRVGIDPDAVSFLI

SEQ ID NO: 189924 - protein, 452 aa, Zea Mays
MVGYPLPFRTLSQYYCSTRISTHMLSKKTTFGLSSLLSSTFFLSVTETHSLSLSPRRSASGSERRRQQQQPRPLSPCGVRGPPSLRSSPTIPGYHPKPHRKAGARTRTRQAWAPPPPLPSLAPGSPQGPGQESPPPNAFLHPLLPPQLPLLGPPLGVLLGAGDGGRRRDSRRRRGCRGNAGAAAGPGAAGLGPGRGPLRVARRHLRRRRRRGDRDRPAAPWAPGGLRRRRRAPRAGTPRPLRQLAQRRSPAGARRAHPPRVPRPLDERARRRRAARARRRVEAPVPEPLQQRAVRRHPRRAQGPQGAPGAADIGQQPDRRPPRLARGAAGPPRAVRLRERAVRPIGYVLYDDVALLLHQHLANGTLLQLLHDNGERRKADWPRLLSIAVDVAQGLAFLHQVATVHLDVCSGNVFLDSRYNALLGEVEISRLLDPCSGSPCCARSAPPRSGPG

SEQ ID NO: 189925 - protein, 382 aa, Zea Mays
MTSTAAEGAGSGSLNPPHSNPSGDGGPRIRSPPGKGNKPVALADITNTGKPNAARSITVPDLVKENTKLLTLLNEKTKIIDLSRVEIYKLRLALQASKQQNLHLTQTNSQMLAEINTGKDRIKMLQHELSCTTALLKVKDSELDRKKNAGNVQQKGVKSQVLKTKASTVAVEAHHVGDSVTSGVEHHVVESQSAVSSNTVCQEPPQDGKQKRMPQRRRSSRLNQGSCEIRGVSQNTLHENPVVPVAPSTLSLEKQYGQTTGKHMKSLQNECSATVHEVIMASEFEKTEINELPQKTDLKVWDTFNNQLKIKDGTICRFNLLVSYNVIQEIPEACSSETEVQSHKIGDKAFNSKQNHLTGSQSSLSFNTVDTPEPPEDNTVKR

SEQ ID NO: 189926 - protein, 353 aa, Zea Mays
MTSTAAEGAGSGSLNPPHSNPSGDGGPRIRSPPGKGNKPVALADITNTGKPNAARSITVPDLVKENTKLLTLLNEKTKIIDLSRVEIYKLRLALQASKQQNLHLTQTNSQMLAEINTGKDRIKMLQHELSCTTALLKVKDSELDRKKNAGNVQQKGVKSQVLKTKASTVAVEAHHVGDSVTSGVEHHVVESQSAVSSNTVCQEPPQDGKQKRMPQRRRSSRLNQGSCEIRGVSQNTLHENPVVPVAPSTLSLEKQYGQTTGKHMKSLQNECSATVHEVIMASEFEKTEINELPQKTDLKEIPEACSSETEVQSHKIGDKAFNSKQNHLTGSQSSLSFNTVDTPEPPEDNTVKR

SEQ ID NO: 189927 - protein, 340 aa, Zea Mays
MTSTAAEGAGSGSLNPPHSNPSGDGGPRIRSPPGKGNKPVALADITNTGKPNAARSITVPDLVKENTKLLTLLNEKTKIIDLSRVEIYKLRLALQASKQQNLHLTQTNSQMLAEINTGKDRIKMLQHELSCTTALLKVKDSELDRKKNAGNVQQKGVKSQVLKTKASTVAVEAHHVGDSVTSGVEHHVVESQSAVSSNTVCQEPPQDGKQKRMPQRRRSSRLNQGSCEIRGVSQNTLHENPVVPVAPSTLSLEKQYGQTTGKHMKSLQNECSATVHEVIMASEFEKTEINELPQKTDLKEIPEACSSETEVQSHKIGDKAFNSKQNHLTGSQCAQKNGHP

SEQ ID NO: 189928 - protein, 337 aa, Zea Mays
MTSTAAEGAGSGSLNPPHSNPSGDGGPRIRSPPGKGNKPVALADITNTGKPNAARSITVPDLVKENTKLLTLLNEKTKIIDLSRVEIYKLRLALQASKQQNLHLTQTNSQMLACHIGEMDTVNVNGPTLKKTLHTVLILWCEIEHCLIFLFCASLQEINTGKDRIKMLQHELSCTTALLKVKDSELDRKKNAGNVQQKGVKSQVLKTKASTVAVEAHHVGDSVTSGVEHHVVESQSAVSSNTVCQEPPQDGKQKRMPQRRRSSRLNQGSCEIRGVSQNTLHENPVVPVAPSTLSLEKQYGQTTGKHMKSLQNECSATVHEVIMASEFEVLYVYVAVF

SEQ ID NO: 189929 - protein, 367 aa, Zea Mays
MTSTAAEGAGSGSLNPPHSNPSGDGGPRIRSPPGKGNKPVALADITNTGKPNAARSITVPDLVKENTKLLTLLNEKTKIIDLSRVEIYKLRLALQASKQQNLHLTQTNSQMLAEINTGKDRIKMLQHELSCTTALLKVKDSELDRKKNAGNVQQKGVKSQVLKTKASTVAVEAHHVGDSVTSGVEHHVVESQSAVSSNTVCQEPPQDGKQKRMPQRRRSSRLNQGSCEIRGVSQNTLHENPVVPVAPSTLSLEKQYGQTTGKHMKSLQNECSATVHEVIMASEFEKTEINELPQKTDLKEIPEACSSETEVQSHKIGDKAFNSKQNHLTGSQCNDPHFSVFQQFLCVTYFIIIQFIPVETNSSIQFE

SEQ ID NO: 189930 - protein, 969 aa, Zea Mays
MRSWRMNAGGSGDVGRPKYDSGEIGLTKYDSGEIPRGYIPSVTNSQISGEIPGASPDHHMMSPTGNIGKRAPFPYVNHSPNPSREFSGSIGNVAWKERVDGWKMKQDKGTIPMTNGTSIAPSEGRGVGDIDASTDYNMEDALLNDETRQPLSRKVPLPSSRINPYRMVIVLRLIVLSIFLHYRITNPVRNAYPLWLLSVICEIWFALSWILDQFPKWFPINRETYLDRLALRYDREGEPSQLAAVDIFVSTVDPMKEPPLVTANTVLSILAVDYPVDKVSCYVSDDGAAMLTFDALAETSEFARKWVPFVKKYNIEPRAPEWYFSQKIDYLKDKVHPSFVKDRRAMKREYEEFKVRVNGLVAKAQKVPEEGWIMQDGTPWPGNNTRDHPGMIQVFLGHSGGLDTEGNELPRLVYVSREKRPGFQHHKKAGAMNALVRVSAVLTNGQYMLNLDCDHYINNSKALREAMCFLMDPNLGRSVCYVQFPQRFDGIDRNDRYANRNTVFFDINLRGLDGIQGPVYVGTGCVFNRTALYGYEPPIKQKKGGFLSSLCGGRKKASKSKKGSDKKKSQKHVDSSVPVFNLEDIEEGVEGAGFDDEKSLLMSQMSLEKRFGQSAAFVASTLMEYGGVPQSATPESLLKEAIHVISCGYEDKTEWGTEIGWIYGSVTEDILTGFKMHARGWRSIYCMPKRPAFKGSAPINLSDRLNQVLRWALGSVEILFSRHCPLWYGYGGRLKFLERFAYINTTIYPLTSIPLLIYCILPAICLLTGKFIIPEISNFASIWFISLFISIFATGILEMRWSGVGIDEWWRNEQFWVIGGISAHLFAVFQGLLKVLAGIDTNFTVTSKASDEDGDFAELYMFKWTTLLIPPTTILIINLVGVVAGISYAINSGYQSWGPLFGKLFFAFWVIVHLYPFLKGLMGRQNRTPTIVVVWAILLASIFSLLWVRIDPFTTRVTGPDTQTCGINC

SEQ ID NO: 189931 - protein, 870 aa, Zea Mays
MAQALLPLRVGVLVILMHQLITTWKMPYCEFQHPPSAHSCFTGWNDETRQPLSRKVPLPSSRINPYRMVIVLRLIVLSIFLHYRITNPVRNAYPLWLLSVICEIWFALSWILDQFPKWFPINRETYLDRLALRYDREGEPSQLAAVDIFVSTVDPMKEPPLVTANTVLSILAVDYPVDKVSCYVSDDGAAMLTFDALAETSEFARKWVPFVKKYNIEPRAPEWYFSQKIDYLKDKVHPSFVKDRRAMKREYEEFKVRVNGLVAKAQKVPEEGWIMQDGTPWPGNNTRDHPGMIQVFLGHSGGLDTEGNELPRLVYVSREKRPGFQHHKKAGAMNALVRVSAVLTNGQYMLNLDCDHYINNSKALREAMCFLMDPNLGRSVCYVQFPQRFDGIDRNDRYANRNTVFFDINLRGLDGIQGPVYVGTGCVFNRTALYGYEPPIKQKKGGFLSSLCGGRKKASKSKKGSDKKKSQKHVDSSVPVFNLEDIEEGVEGAGFDDEKSLLMSQMSLEKRFGQSAAFVASTLMEYGGVPQSATPESLLKEAIHVISCGYEDKTEWGTEIGWIYGSVTEDILTGFKMHARGWRSIYCMPKRPAFKGSAPINLSDRLNQVLRWALGSVEILFSRHCPLWYGYGGRLKFLERFAYINTTIYPLTSIPLLIYCILPAICLLTGKFIIPEISNFASIWFISLFISIFATGILEMRWSGVGIDEWWRNEQFWVIGGISAHLFAVFQGLLKVLAGIDTNFTVTSKASDEDGDFAELYMFKWTTLLIPPTTILIINLVGVVAGISYAINSGYQSWGPLFGKLFFAFWVIVHLYPFLKGLMGRQNRTPTIVVVWAILLASIFSLLWVRIDPFTTRVTGPDTQTCGINC

SEQ ID NO: 189932 - protein, 323 aa, Zea Mays
MILAADSSASDLIRGIATECGVDFDEDPEAMVIDHMNYAVTDVEGDHTLIAGDDLIHSDVILGSEKIEAPVLFRGIGHMANPSNSLVLSASPSAYSANPKTKLASPPSLTGSAISLVSVMQARNNARVLLSGSLDLFSNRFLKSGVQKADSKTRYERAGNEQFVAEISKWVFHERGHLKAVNVRHHKVGETNEPGMYRINDDLEYSVEIYEWSGTSWKPYVADDVQLQFFMMSPYVLKTMSTDNKGLYSTTFKVPDVYGVFQFKVEYQRLGYTGLSFTKQIPVRPYRHNEYERFITSAYPYYTASFSTMGAFFVFSFVYLYHK

SEQ ID NO: 189933 - protein, 446 aa, Zea Mays
MERADENLLPAVYKEVSAAFNAGPADLGYLTFVMNFLKSIASPLAGILALHYDRPIVLAIGTVFWALSTGAVGVSQRFGQVAFWRAVNGLGLAIVIPALQSFIADSYKDGTRGAGFGLLSLIGAVGGIGGSILATIMAGKDYWGFPGWRVAFMMVALVSLIIGILVYLYATDPRRIPGNRLLDEDEYERLHLSSKDVLPPPSIWRDSWVATRSVMKVKTFQIIVLQGIIGSLPWTAIVFFTMWFELIGFDNNSSAALNSLFAIGCASGAFIGGVIADHLSKYFPDSARVMCAQFSAFMGIPFSWILLTVIPQSVDYWYAFAVTLFFMGITISWCATSANNPMFAEVVPPKHRTMIYAFDRAFEGSFASLAAPAVGLITEKIYGYDTKTVNLANGSAEGAYALSRGLLTMMIVPFGVCVLFYSPLYLVFKHDRENAKFASFKEQELV

SEQ ID NO: 189934 - protein, 148 aa, Zea Mays
MHEYPFNIVEHRHFVEFIKSLKPTFPMKSCVTIRKEIMELYLHEKDVLCKYFKTLNCRMSATMDMWTSNQNKGYMCVTVHWVDDDWEIQKRIINFLHVPSRHSGSKAKSVAIPNMVCEMEELEALARNLSLEDEDLDDDHDDGPKASL

SEQ ID NO: 189935 - protein, 88 aa, Zea Mays
MTTPGVLEVIEDLCRSYPSLTFGVGTVLNAADARKAICAGAQFLMSPGTVLDILHDLKESNVLYIPGVLTSTEVLSACSAGAKVVKVS

SEQ ID NO: 189936 - protein, 219 aa, Zea Mays
MDLETENRLASLLLEEARRLQLEANREGVQAYLRKPNVRHRPNSRFLTATVRGVQQGEKRKSERNHSSSSRIEQEGTTYDTSYSDQEDGLRDDEIERFLYSRAKRGRGAVGSRMDEPGPYLDSLSHHQDNGPSPDIRVEEKWERRVQGPEKPPFWGCKSLDGHWRLGTLDGRPSSSEPQSKKEKKSKLDKKDKIEKRKEKGKKKSKHRHHRHRRSSRSE

SEQ ID NO: 189937 - protein, 222 aa, Zea Mays
MQELWDMVDQEHTEPDGEFVDSTEQFVVLLSQEASATKCSATTFKLHGTIQGVSLLVLLDSGSSHSFLNVAHHSLLSGFTVLQQPLHVLVANDSIIQCTEELLDAAWYLQGFQFRSTFKVIPIPCYDLILGMDWLEDHSPMHVDWKHKWMFIKYHDQPTVICYVQPVLPSGTLLEIRHIPDSASTTNQLCACWNSLSAARKPTRANGGDNRVACTGAIALLI

SEQ ID NO: 189938 - protein, 260 aa, Zea Mays
MEVLARKKAESEKAALEQRIAEMEEKMQEQRMGRDVEIISHDGSNTRHHPDTRSGQHVNETHNIAQFHEDEAYVEDEISNEGENLLGSNHVSVTPTVNPSQGNHINIGKDVILYAILRDHAMAKGTIISTNPSSVLGGVALGKQYCEVVVNVVLKRDALLPHPYGYLEKMGDADRMSIAWPYKRLKVSKTSKSSYSATDIVALWFDLSSSSKLVSLSFYKSNLGLLPAYFDLYCDKSKLVTFMYKCSTIVIAMNENMSYV

SEQ ID NO: 189939 - protein, 299 aa, Zea Mays
MEVLARKKAESEKAALEQRIAEMEEKMQEQRMGRDVEIISHDGSNTRHHPDTRSGQHVNETHNIAQFHEDEAYVEDEISNEGENLLGSNHVSVTPTVNPSQGNHINVTTPTQPSRKTTNASPIVQPSQGNTIRATPTILPLHTELIGKDVILYAILRDHAMAKGTIISTNPSSVLGGVALGKQYCEVVVNVVLKRDALLPHPYGYLEKMGDADRMSIAWPYKRLKVSKTSKSSYSATDIVALWFDLSSSSKLVSLSFYKSNLGLLPAYFDLYCDKSKLVTFMYKCSTIVIAMNENMSYV

SEQ ID NO: 189940 - protein, 357 aa, Zea Mays
MSKELGRPPRRDELYIKTHTRKNGVPTRHAEPVINKLKEIVEAHPELKERTIQECDAFAAICGEREPRGRVRVLGLGPTPQDIGTPGLRSYTPTRLQMEVLARKKAESEKAALEQRIAEMEEKMQEQRMGRDVEIISHDGSNTRHHPDTRSGQHVNETHNIAQFHEDEAYVEDEISNEGENLLGSNHVSVTPTVNPSQGNHINIGKDVILYAILRDHAMAKGTIISTNPSSVLGGVALGKQYCEVVVNVVLKRDALLPHPYGYLEKMGDADRMSIAWPYKRLKVSKTSKSSYSATDIVALWFDLSSSSKLVSLSFYKSNLGLLPAYFDLYCDKSKLVTFMYKCSTIVIAMNENMSYV

SEQ ID NO: 189941 - protein, 196 aa, Zea Mays
MEVLARKKAESEKAALEQRIAEMEEKMQEQRMGRDVEIISHDGSNTRHHPDTRSGQHVNETHNIAQFHEDEAYVEDEISNEGENLLGSNHVSVTPTVNPSQGNHINIGKDVILYAILRDHAMAKGTIISTNPSSVLGGVALGKQYCEVVVNVVLKRDALLPHPYGYLEKMGDADRMSIAWPYKRVISYFLIVFHIW

SEQ ID NO: 189942 - protein, 59 aa, Zea Mays
MVLQQGEPKVEVGKVQPFPAMGAGALLPTTHDFSTLTPFHVLHAVHNVPGGREICLHLH

SEQ ID NO: 189943 - protein, 274 aa, Zea Mays
MASAAARGAAVRSPLLVHHRVPLVHPSGGGSLRVGWPGIGPGREGRRRGAPVGARVFARYSQAQDFSTRLQDRAGELPKLVEDLIQTSISTGPRGAFRMAQGIQAVLGVGGEWLNDLSKTANTSAGIPSQMQLGLLSPLYLRRLFERMGATYIKLGQFVASAPTLFPAEYVEEFQKCFDQAPAVPYDVIESILREELQRPLDSVYEYIDPVPIASASIAQVHGARLKSSQKDVVIKVLKPGIEDTLVADLNFIYVVARVLEFLNPELQRTSLAL

SEQ ID NO: 189944 - protein, 402 aa, Zea Mays
MLPFLGWSFEFVASAPTLFPAEYVEEFQKCFDQAPAVPYDVIESILREELQRPLDSVYEYIDPVPIASASIAQVHGARLKSSQKDVVIKVLKPGIEDTLVADLNFIYVVARVLEFLNPELQRTSLVGIVKDIKESMLEEVDFRKEAANIQAFQGYIDAMGFDRQAKAPFVYQHCSTKRVLTMERLYGVPLTDLDSIRSLVPDPELTLVTALNVWFGSLISCESFHADVHAGNLWLLRDGRIGFIDFGIVGRISPRTWAAMEVFLASFATEDYDAMASALSEMGATGNDINTNEFAKDLRKIFSSIQDLDTEIIVATARTPDATAVSANVVLDERQMNALFLDLVRVSESYGLKFPREFALLMKQLLYFDRYTRLLAPSMNMLRDERINISTNRQPRRTDRFQ

SEQ ID NO: 189945 - protein, 267 aa, Zea Mays
MLEEVDFRKEAANIQAFQGYIDAMGFDRQAKAPFVYQHCSTKRVLTMERLYGVPLTDLDSIRSLVPDPELTLVTALNVWFGSLISCESFHADVHAGNLWLLRDGRIGFIDFGIVGRISPRTWAAMEVFLASFATEDYDAMASALSEMGATGNDINTNEFAKDLRKIFSSIQDLDTEIIVATARTPDATAVSANVVLDERQMNALFLDLVRVSESYGLKFPREFALLMKQLLYFDRYTRLLAPSMNMLRDERINISTNRQPRRTDRFQ

SEQ ID NO: 189946 - protein, 427 aa, Zea Mays
MASAAARGAAVRSPLLVHHRVPLVHPSGGGSLRVGWPGIGPGREGRRRGAPVGARVFARYSQAQDFSTRLQDRAGELPKLVEDLIQTSISTGPRGAFRMAQGIQAVLGVGGEWLNDLSKTANTSAGIPSQMQLGLLSPLYLRRLFERMGATYIKLGQFVASAPTLFPAEYVEEFQKCFDQAPAVPYDVIESILREELQRPLDSVYEYIDPVPIASASIAQVHGARLKSSQKDVVIKVLKPGIEDTLVADLNFIYVVARVLEFLNPELQRTSLVGIVKDIKESMLEEVDFRKEAANIQAFQGYIDAMGFDRQAKAPFVYQHCSTKRVLTMERLYGVPLTDLDSIRSLVPDPELTLVTALNVWFGSLISCESFHADVHAGNLWLLRDGRIGFIDFELGQLWRSFWLLLQLRIMMLWPLPSLKWVLQGMI

SEQ ID NO: 189947 - protein, 434 aa, Zea Mays
MASAAARGAAVRSPLLVHHRVPLVHPSGGGSLRVGWPGIGPGREGRRRGAPVGARVFARYSQAQDFSTRLQDRAGELPKLVEDLIQTSISTGPRGAFRMAQGIQAVLGVGGEWLNDLSKTANTSAGIPSQMQLGLLSPLYLRRLFERMGATYIKLGQVGIVKDIKESMLEEVDFRKEAANIQAFQGYIDAMGFDRQAKAPFVYQHCSTKRVLTMERLYGVPLTDLDSIRSLVPDPELTLVTALNVWFGSLISCESFHADVHAGNLWLLRDGRIGFIDFGIVGRISPRTWAAMEVFLASFATEDYDAMASALSEMGATGNDINTNEFAKDLRKIFSSIQDLDTEIIVATARTPDATAVSANVVLDERQMNALFLDLVRVSESYGLKFPREFALLMKQLLYFDRYTRLLAPSMNMLRDERINISTNRQPRRTDRFQ

SEQ ID NO: 189948 - protein, 205 aa, Zea Mays
MGKNTKFTTGCPSLPSQMKAVVCGMEDLQCQPDGPSSEEDDNDIRDESQDNGEEPPDSPIRDGFSYSDYCFQQPSSDQAQPMDEQTISAGSGVEDDFVDEFASSMERSEILGTRRGLNGPRTSPLCSLGACSNDDGLEEEAGLMSPLLMPNASSDAGDGRHILNGNHVVDLVTPTPLGRLRRRDCISSICPKIIDLTSSPIVIQL

SEQ ID NO: 189949 - protein, 167 aa, Zea Mays
MAAPPSMPAPPPPEPSGGIVSPVAVVASHFCAPYVVQLAVKEKKVSLREGDFTITDTNGAVVVTVKGALISIHNRRRLLDAAGNPLLCLREKHAQHVGSVQRGQHEIERPALHRQEILHHPAVQDRDAHLPGLQHLARGLRLHHEGQLQGEVLLFLPRRQQLQRLDR

SEQ ID NO: 189950 - protein, 415 aa, Zea Mays
MKHISVINLFGAYSKPRMILFPWWRGSKKFPTCSCIVQIIELWFPMSKFSRNELQRTKCFCLHYSLIHLPIKKLDKLKEEETEECCHGHYTYGDLGDRCFGTIGRCLTETLVLVSQAGGSVAYLIFIGQNLHSTFSQLMSPAGFIFAILLPLQIALSFIRSLSSLSPFSIFADVCNVLAMAIVIKEDLQLFDHPFSNRSAFNGLWAVPFTFGVAVFCFEGFSMTLALEASMADRRKFRSVLSQAVAAIIAVYVCFGVCGYLAYGEATKDIITLNLPNNWSSAAVKVGLCIALAFTFPVMMHPIHEIVETRFRSNRCFRKLSHNDGGAEWIGLHASRVLVVAVLTVVASFIPFFGSFISFVGSTMCALLSFVLPALFHLSIVGSSIPLWRRVLDYGILLFGLAFAGYGLVTALSSH

SEQ ID NO: 189951 - protein, 217 aa, Zea Mays
MRKKHVPVRAQPSSPSSCAGRWAAACPCWGGACRRCALTGTCSSSSRRSRRGSSWAGHGVHPHPPRRVREAHVRLPLRRAVAGLPLRGARRHGGRHRHARRRHRRHGLLHARPLQGQRRRRRGRRRRRRRGATAAAGGVGAARRRRSRRRRPRPRRARAHAHARDARALARRLGLGGCIVQVIIKNPMVQSRGKLQLAINAFMLFCAGRMATLAKWT

SEQ ID NO: 189952 - protein, 97 aa, Zea Mays
MNAYEFYAYVLCLHTSKGMKPHCTPPRATYDAKLYRYGRTKGHDKTSDASEACNVYGMLHLSIYFTSFIYNRNLKQYFVYLQIQYKHQIILRSPSGV

SEQ ID NO: 189953 - protein, 177 aa, Zea Mays
MAAPPARARADYDFLIKLLLIGDSGVGKSCLLLRFSDGSFTTSFITTIGIDFKIRTVELDGKRIKLQIWDTAGQERFRTITTAYYRGAMGILLVYDVTDESSFNNIRNWIRNIEQHASDNVNKILVGNKADMDESKRAVPTSKGQALADEYGIKFFETAKTIRVAHDCCSCRVRRPT

SEQ ID NO: 189954 - protein, 126 aa, Zea Mays
MGILLVYDVTDESSFNNIRNWIRNIEQHASDNVNKILVGNKADMDESKRAVPTSKGQALADEYGIKFFETSAKTNLNVEQVFFSIARDIKQRLSESDSKPEDRTISINRPDGGEASASQKSACCGS

SEQ ID NO: 189955 - protein, 122 aa, Zea Mays
MDDDICICNQIVGMCLSPPISLVDEGGLVSVIFVAVLLVLVAYPVAVEIVGGDLQGCERQPRRGRLLSWQRQQRQMRRRCVLSAIGHGLGRTRSCSEDNATRLADAQMSEKKYRHSKFSIRA

SEQ ID NO: 189956 - protein, 109 aa, Zea Mays
MCLSPPISLVDEGGLVSVIFVAVLLVLVAYPVAVEIVGGDLQGCERQPRRGRLLSWQRQQRQMRRRCVLSAIGHGLGRTRSCSEDNATRLADAQMSEKKYRHSKFSIRA

SEQ ID NO: 189957 - protein, 167 aa, Zea Mays
MAGDDGRAPSGLRVVMFPFPFWSHINQMLQLGKLLRARGLGVTMLHTDFNAPDPALHPDITFVSIRESLPAEVVANPDMVEQMMQLNAVCEAPFQAALAGELLARGTTTGGPREVACVVVDGQWYKMLGAATRVAVPALVLRADGAATLLSMLATPCRRSRRSSARR

SEQ ID NO: 189958 - protein, 511 aa, Zea Mays
MAYPAAPHTSAAFLASFATPLPARRASPPTRRRAVSVAAIATTTTCVFADAPRGIKADSGAQAAAAAAARRDVSPDTVASIILGGGAGTRLFPLTRTRAKPAVPVGGCYRLIDIPMSNCINSKINKIYVLTQFNSQSLNRHIARTYNFGEGVGFSGGSVEVLAATQTAGESGKKWFQGTADAVRQFLWLFEDARLKCIENILILSGDHLYRMDYMDFVQKHVDSGADISVACVPMDESRASDFGLMKADRNGHITDFLEKPKGADLESMQVDMGLFGLSPEFASTYKYMASMGIYVFKADVLRKLLRGHYPTANDFGLEVIPMAAKDYDVQAYLFDGYWEDIGTIKSFFEANLALTDQSPNFYFYDPVKPIFTSPRFLPPTKVENCKVLNSIVSHGCFLTECSVEHSVIGIRSRLEPGVQLKDTMMMGADYYQTEAERLSELSVGKVPVGVGENTKIRNCIIDKNARIGKNVVIMNSENVQEADRPAEGYYIRSGITVVLKNAVILNGTKI

SEQ ID NO: 189959 - protein, 414 aa, Zea Mays
MAYPAAPHTSAAFLASFATPLPARRASPPTRRRAVSVAAIATTTTCVFADAPRGIKEEQADSGAQAAAAAAARRDVSPDTVASIILGGGAGTRLFPLTRTRAKPAVPVGGCYRLIDIPMSNCINSKINKIYVLTQFNSQSLNRHIARTYNFGEGVGFSGGSVEVLAATQTAGESGKKWFQGTADAVRQFLWLFEDARLKCIENILILSGDHLYRMDYMDFVQKHVDSGADISVACVPMDESRASDFGLMKADRNGHITDFLEKPKGADLESMQVDMGLFGLSPEFASTYKYMASMGIYVFKADVLRKLLRGHYPTANDFGLEVIPMAAKDYDVQAYLFDGYWEDIGTIKSFFEANLALTDQSPNFYFYDPVKPIFTSPRFLPPTKVLNSIVSHGCFLTECSVEHSVIGIRSRTP

SEQ ID NO: 189960 - protein, 110 aa, Zea Mays
MIPLPISASMEVSIEHIQTISTSVAQAFLQLVLTLTYHVYHRSGQSPCMAINPTHAHFCNTYLLNMSSFCRPTFYTIQHSKSNRRLCFLGMYCPSSGQNSNRLTLIQISN

SEQ ID NO: 189961 - protein, 417 aa, Zea Mays
MARCSVAKPLCATTATPRLTRRCRQLSANATTPAMATSKARLPALNKPAKPPPPLLSRPKLPVPTNTATDTTSGKDCTKKPPPEATDSHPPSSGAGDVLRLMDALGIPPDEDIYISLLRECADAAEVASVHAHITARRASDGLPSPVANRLLLSYAACGDIEAARRVFDGMPTTNGMAWATMVSAYSDGCLHHEAMRLFAHMCHGTPVLDGDCYSHAIVAVLRSCTRAGELRLGEQLYCDGGGFHRSARRVLATTMQHHCQEPVPEAAWTSLITSCHRESLLSEAVDVFRDMASSGVPRSSFSLSSILAVFAESQDPGCCCGQQVHADAIKRGVDTNQFVGSGLIHMYAKQGQLADATRAFETIGGKPDAACWSALAMAYARGGRYREATRIMYQMKAAGMNPSKEMADAVRLACFR

SEQ ID NO: 189962 - protein, 401 aa, Zea Mays
MHGSCGCEFSCGSLDGWESRWVKSEWKKDENMAGEWNHTSGKWNGDAEDKGIQTSEDYRFYAISAEYPEFSNKDKTLVLQFSVKHEQKLDCGGGYVKLLGGGDVDQKKFGGDTSYSIMFGPDICGYSTKKVHTILTKDGKNHLIKKDVPCETDQLTHVYTLIIRPDATYSILIDNEDKQTGSIYEHWDILPPKKIKDPEAKKPEDWDDKEYIPDPEDKKPEGYDDIPKEIPDPDAKKPEDWDDEEDGEWTAPTIPNPEYKGPWKQKKIKNPNYQGKWKAPMIDNPDFKDDPYIYAFDSLKYIGIELWQVKSGTLFDNIIITDDPALAKTFAEETWGKHKEAEKAAFDEAEKKKEEEDAAKGGDDEDDDLEDEEDDEKADEDKADSDAEDGKDSDDEKHDEL

SEQ ID NO: 189963 - protein, 357 aa, Zea Mays
MAGKVGGSSPSGRRMRTWLVNGTTPRENGMEMPRTKFSVKHEQKLDCGGGYVKLLGGGDVDQKKFGGDTSYSIMFGPDICGYSTKKVHTILTKDGKNHLIKKDVPCETDQLTHVYTLIIRPDATYSILIDNEDKQTGSIYEHWDILPPKKIKDPEAKKPEDWDDKEYIPDPEDKKPEGYDDIPKEIPDPDAKKPEDWDDEEDGEWTAPTIPNPEYKGPWKQKKIKNPNYQGKWKAPMIDNPDFKDDPYIYAFDSLKYIGIELWQVKSGTLFDNIIITDDPALAKTFAEETWGKHKEAEKAAFDEAEKKKEEEDAAKGGDDEDDDLEDEEDDEKADEDKADSDAEDGKDSDDEKHDEL

SEQ ID NO: 189964 - protein, 164 aa, Zea Mays
MAIRKGSSYAVAALLALASVAAVAGEVFFQEKFEDGWESRWVKSEWKKDENMAGEWNHTSGKWNGDAEDKGIQTSEDYRFYAISAEYPEFSNKDKTLVLQFSVKHEQKLDCGGGYVKLLGGGDVDQKKFGGDTSYRYLWVQHQEGSHYPDQGWQEPLDQEGCAL

SEQ ID NO: 189965 - protein, 274 aa, Zea Mays
MRGWRIGDVTNSRPYFCLGDLWEAFNEWSFYGAGVPLVISGSESVIQYYVPYLSAIQLYADPLKLPSRISEGSSETDDIRLRSLTVEATHRLDGGFQRDGDEMHSPSTRPIFEYLETDPPFGREPLTDKVSVLASRFPDLKKFRSCDLLPTSWMSVAWYPIYRIPTGPTLKDLDACFLTFHYLSTPSKDTDPSTPPCPNLGGLNCNMNAAGKLTLPVFGLASYKLKSSIWSSNRPEEQQLAASLTQTADDWLRHRQVYHPDFRFFLTHFNTALR

SEQ ID NO: 189966 - protein, 160 aa, Zea Mays
MRGWRIGDVTNSRPYFCLGDLWEAFNEWSFYGAGVPLVISGSESVIQYYVPYLSAIQLYADPLKLPSRISEGSSETDDIRLRSLTVEATHRLDGGFQRDGDEMHSPSTRPIFEYLETDPPFGREPLTDKVSVLASRFPDLKKFRSCDLLPTSWMSVAWYV

SEQ ID NO: 189967 - protein, 63 aa, Zea Mays
MQIETKYQNLSTIRDYVCKLLYLRVGGLWHIFLFIQRLMFLQETITRVYNVVQYETGSRSREL

SEQ ID NO: 189968 - protein, 317 aa, Zea Mays
MEIAARRGSGRWCTHQSTGRCLDKAAVIKDPASAFRAPAGQPQGHSSSKPNPWRLCTLTQVEELKCILRLVPIWLCSILYSTSYSQMSSVFIEQAQTMDDSLSKLTIPPAGMDVFEILGVTAFVFIYRFCIVRVMAKISHEPTELQRMGTGLVISAAAMVASGVVEQQRLARATAGVDASSSLSILWQIPQYLLIGASEVFMYVTMTEFFNDQLPEGLRSLGSAMSVASMSAGSFASSLLVTLVMAITCRGGRPGWIPQDLNKGHVDWFFYLIAALNAVDLLAFVVFAKRYRPAPVIIHGEDETGGVEKAQDAEECI

SEQ ID NO: 189969 - protein, 111 aa, Zea Mays
MEGVITGLPKKLWFPKMKTQWQTMAAETMASDQTKDMHKQILETIKQNNVTNNSCNLAYFAISIVCFDSRIFSGQQVTNLHFYHHILMQTSTPVISSCTWEEENFTKCRLR

SEQ ID NO: 189970 - protein, 251 aa, Zea Mays
MDVGAELREAHRLTGHADRVWALAWNPAPGPGSSPVLASCSGDKTVRIWKRAPDGAWQCSDVLEDTHNRTVRSCAWSPNGKLLATASFDATTAVWEYNGADFECVATLEGHDNEVKSVSWSPSGSLLATCSRDKMVWIWEVLPGNEFECVSVLPGHTQDVKMVQWHPILDILVSVSYDNSIRVWAGDGDDEWHCVQTLTEANNCGHSSTVWALSFNLKGDRMVTCSDDQTLKIWDTSADLSQPKTGEGHDS

SEQ ID NO: 189971 - protein, 256 aa, Zea Mays
MDVGAELREAHRLTGHADRVWALAWNPAPGPGSSPVLASCSGDKTVRIWKRAPDGAWQCSDVLEDTHNRTVRSCAWSPNGKLLATASFDATTAVWEYNGADFECVATLEGHDNEVKSVSWSPSGSLLATCSRDKMVWIWEVLPGNEFECVSVLPGHTQDVKMVQWHPILDILVSVSYDNSIRVWAGDGDDEWHCVQTLTEANNCGHSSTVWALSFNLKGDRMVTCSDDQTLKIWDTSADLSQPKTGEGHDSWTAQW

SEQ ID NO: 189972 - protein, 60 aa, Zea Mays
MLIILSQEKNIQQLNQLIESLQRQLLHCRGSNNTVHAAAAVATEASEVEGHEVIEDENRR

SEQ ID NO: 189973 - protein, 357 aa, Zea Mays
MASLQVTPTSAFTEWNELKFEGLYLFHTPLGSGANQARVIDNKAPIGIGATVVNNWTVYDGPGPNAKLVARAQGLHIQAGNWVNSFSLVFVDQRFSGSTLEVTGIVVESGEWAIVGGTGQFAMANGVIFKKFHEQRSEGNIIQLTIHAFCPVLGPRKRSAAKVGPWGGSGGSPVDITAEPQRLKSITVATGIAVTSIAFSYVDSAGQTQSAGRWGGSGGETEPVIQLGDSEVLTELSGTIGNVDGHTVITSIKFVTSLKTYGPFGAWGDGSDTPFAIPVQQGSAIVGFFARAGVYLDALGVYDANILDVFVSRVRQTFDTREEAYLFYLDYAKLAGFSVRTKRCNCNCWCGVIATPH

SEQ ID NO: 189974 - protein, 168 aa, Zea Mays
MAHGGGAGKAKVTPNLAVDGEGTRTLNRTVLQRLDPAVEDILITAAHVTLYDFDTDVNQWRRKDVEGSLFVVKRNAQPRFQFIVMNRRNTDNLVEDLLGDFEYQLQAPYIMYRNAAQEVIGIWFYNSQECQEVANLFSRILNAFSKVPPKPKIPPVQRQLQMLVATLL

SEQ ID NO: 189975 - protein, 186 aa, Zea Mays
MAWIADESLLFFPILSSLVLVQILPSRCAAPSASPPQHAVPSSPARLFPARAKLSARRRIACSLSTPWRRLPPIPPLNSQARQRSSSLLSPSPNITACSSGREFLPVCARAPLLGPSSFSSSLSHSAIRRHRSVTRQADCVSCVAHLRSSTARCSPLHWVRQNRLFPIQCSRSFLLASTSPQPAWP

SEQ ID NO: 189976 - protein, 415 aa, Zea Mays
MCIRLLYVICSYRDSLRFQPLVPHPRVGGGPHHRLQHSSAPGPTEIRGAEAGVPDLDAGVRHGGVLLRGAELREAAGGGRGQGALHPQAQGRRRHRGRHCAPRSSRHAAQPVPALRAGAVEEDAVVGEGDQGRVPVLPLRERLRAVRGAAHQHRRHLRLRHRLLLRQPVARGRRQVQRPLARLFLLPPQERAGQVQFDRVRRGALGVWPELHHNRHLLRPVHHAGFSGHQDEEVAEEPDDTLHRHRAQPSRLHHRRLQWRRPSHHHRFDDPVLRAAVRSHPAPQVQQQQQQDGAPQELHLYHRVLVAAGADDHRHQHVLPEHQLRGVARPQLAPQVRQRARRPARLPPHARLRRRRHLPHLQEGHRRHLRRRLRPAGRGRRREGQQGGGGRRRRRRRPARAVPAGPRGHPSAGVA

SEQ ID NO: 189977 - protein, 277 aa, Zea Mays
MDAAHCSSLVFVIKRCSSSWQLDDAAAPSHPSRARPSQHRCARRCARFSILTVQHNHGRTPAWSPARVDMASPWSLLTAAAPQLVVPAVPFASTLLRWPRSPKLASVGRCLCSTRLHPTLAHTFLVLALLRLLPRRSTGRHPVAAPRPQLPAHSPAAPACCALAAVACPCLLHALAAPGSRSIYLARPQHMSYSSPPCRAQERVCRASLLSWPSASRLSKFSSPASLLPSHHWSSICQPHCSSSGTIINHVIQKTTQVHPNRGLIRKMMLMDEPEDG

SEQ ID NO: 189978 - protein, 260 aa, Zea Mays
MDAAHCSSLVFVIKRCSSSWQLDDAAAPSHPSRARPSQHRCARRCARFSILTVQHNHGRTPAWSPARVDMASPWSLLTAAAPQLVVPAVPFASTLLRWPRSPKLASVGRCLCSTRLHPTLAHTFLVLALLRLLPRRSTGRHPVAAPRPQLPAHSPAAPACCALAAVACPCLLHALAAPGSRSIYLARPQHMSYSSPPCRAQERVCRASLLSWPSASRLSKFSSPASLLPSHHWSSICQPHCSSSGEPPSFLPRLAFLVLD

SEQ ID NO: 189979 - protein, 236 aa, Zea Mays
MRVAAATYLKNFTRRNLETRLCSSEVYKEFRDQLAQALLRVEPAILRVLIEVFRQVVEKDFVKDNLWPELIPQLKLVIQSSNLISPGQHPEWNTINALTVLQSVVRPFQYFLNPKVVKESVPQQLEQIAAEILVPLQVTFHHFSDKVLLSPDGTNLEYEQLLLITCKCMYFTVRSYMPSRVKQILPSFCKDMFRILDSLNFNSLIEDGSTMKLKIAKRCLIIFCALVTRHRKHTDN

SEQ ID NO: 189980 - protein, 230 aa, Zea Mays
MDIETHAAALARDELRRLLAATLSPDKASVDTAAAGLDALSSDPRFPLAILAVAAGDDDHGMRVAAATYLKNFTRRNLETRLCSSEVYKEFRDQLAQALLRVEPAILRVLIEVFRQVVEKDFVKDNLWPELIPQLKLVIQSSNLISPGQHPEWNTINALTVLQSVVRPFQYFLNPKVVKESVPQQLEQIAAEILVPLQVTFHHFSDKVLLSPDGTNLEYEQLLLITCKCM

SEQ ID NO: 189981 - protein, 351 aa, Zea Mays
MPSVSNAQTSMADVALLRSNQLPFLLLCPADAPPSIFLSAATLPRLCPCFHGELAPAPTSDVPSPSRPAPPSPWFPPSSDQVSEFLDSKSETDVDVDYNSLYSKQDFLQGDDDHGMRVAAATYLKNFTRRNLETRLCSSEVYKEFRDQLAQALLRVEPAILRVLIEVFRQVVEKDFVKDNLWPELIPQLKLVIQSSNLISPGQHPEWNTINALTVLQSVVRPFQYFLNPKVVKESVPQQLEQIAAEILVPLQVTFHHFSDKVLLSPDGTNLEYEQLLLITCKCMYFTVRSYMPSRVKQILPSFCKDMFRILDSLNFNSLIEDGSTMKLKIAKRCLIIFCALVTRHRKHTDN

SEQ ID NO: 189982 - protein, 220 aa, Zea Mays
MDQCLGSSHMDGDQQTPPRLPLLTALFDQHRQQVDRTLQEHNEQVRLQLQQQISAQNETLLNLAESMARDALAEKNGEVSRLRMELKSTQELLRTALQERDEVQYLAKGFYEMNRWLIMSRLPPVLQATTSVVHALDDGSSSTGSCSQAPNVEGASVGRSTTRVVVTRLLCKVCCARDACMLILPCQHLCACESCGISLTVCPLCYLAKDNVMEVEARFG

SEQ ID NO: 189983 - protein, 65 aa, Zea Mays
MSSYCTFSKLTTPSLQRKNKKAYVRWGKFRQCREYLEHILEYLTSFLYRTEPLQDVDKIFFKAEE

SEQ ID NO: 189984 - protein, 62 aa, Zea Mays
MKFFQDCLEQFFGHILDAFLKIITKSSRLNITMATNGLTTLLIARLDHSNLVVAKVWRLEFI

SEQ ID NO: 189985 - protein, 147 aa, Zea Mays
MQKAQLKLLPKILRTSSSALSSTSSSGAEAADRPARIFWRRRAFSASERVVSASIARTAATSSPPAAGAAGATGSPEQSGQLQIAASDSAGGFERHGECHGVAQVEHRSRSTSDGAATPQTMQTPASSQGRSAAIVVVGAAASLRRG

SEQ ID NO: 189986 - protein, 176 aa, Zea Mays
MGNAPRSRSGTKRSTRWLAPVPTPKSESMAVLRASPPPFLPHPLSRPSQCKRRPTCRVVAATARPSPAPSRPRSGGVHGGRPKRGLLAARRRPAEGRVPCLRATEAGVGAAGVAKEEDEYLAREAGWGVRRMARVGEEMRRVAQVQAEAFHVPVALFNDFFFDFFKPRCCRRSSTE

SEQ ID NO: 189987 - protein, 751 aa, Zea Mays
MDGDKVKESAPDCASGAAEPTKKQDKRKRAYAEFDVVDKKSVSAEWQQEMDALYKYYKEVSGHQLNPEELSCTTNDSIIACLLEESSLSCAKLTDGIYKRMKLQYGVTESSVRTSVLNIGRRSSYGISAMDVNGLEDESDSSLWCWETEDLALLPLHLRSSLSIRRTARKLIHKRILVLSGKLATKDASNACSNQNSLMENAGEALDLDEIRSIIESKHKNDDDIKTEAQDFQAIRKAVKKQQMMVGHIQTEKNKKERELRHIYEKTEREAKRIERENKRLKKHQEEEERAKKKKEKEEAELKRKASIQKQANLMERFFKRKADSNIGSSDSHHMERTTCSKSTGNIEELAVAATSAMDCTLCKENHLSMEELRMIHVAKWRTLFQHNRLRHWGVRRSPKIQLFLELRLQKPSTPIASDSMSTPTKEQSSLESTGNLDITKLLDELEIPSRSQNSTSSSVLLVKKLLQFDNSSRPAYYGTWRKKSSTVSARQPFQRDEELNYDVESDEEWEEVDPGDPGERLSDYEEDDEKTMNEHDAMIDAEKETENSFIVPNDYLSDDEGMQCESVCVRFDGISSLLSIPGVTVEELNALLQRQKALHIITEHALKIDRPLVICNLDHRKLGLLNAEGITGMLKMEKICLQALCMKKYPGSPIIDVPVVNTTIEDGFCRSNKKSPRTPVSSKAISESDMPEFGESNWWSCYMRHFHMSPRHDLRTKLGRLLSLPKTGGRLSRISWIGTIYLFLQIKVKA

SEQ ID NO: 189988 - protein, 513 aa, Zea Mays
MDGDKVKESAPDCASGAAEPTKKQDKRKRAYAEFDVVDKKSVSAEWQQEMDALYKYYKEVSGHQLNPEELSCTTNDSIIACLLEESSLSCAKLTDGIYKRMKLQYGVTESSVRTSVLNIGRRSSYGISAMDVNGLEDESDSSLWCWETEDLALLPLHLRSSLSIRRTARKLIHKRILVLSGKLATKDASNACSNQNSLMENAGEALDLDEIRSIIESKHKNDDDIKTEAQDFQAIRKAVKKQQMMVGHIQTEKNKKERELRHIYEKTEREAKRIERENKRLKKHQEEEERAKKKKEKEEAELKRKASIQKQANLMERFFKRKADSNIGSSDSHHMERTTCSKSTGNIEELAVAATSAMDCTLCKENHLSMEELRMIHVAKWRTLFQHNRLRHWGVRRSPKIQLFLELRLQKPSTPIASDSMSTPTKEQSSLESTGNLDITKLLDELEIPSRSQNSTSSSVLLVKKLLQFDNSSRPAYYGTWRKKSSTVSARQPFQRDEELNYDVESDEEWEES

SEQ ID NO: 189989 - protein, 485 aa, Zea Mays
MDGDKVKESAPDCASGAAEPTKKQDKRKRAYAEFDVVDKKSVSAEWQQEMDALYKYYKEVSGHQLNPEELSCTTNDSIIACLLEESSLSCAKLTDGIYKRMKLQYGVTESSVRTSVLNIGRRSSYGISAMDVNGLEDESDSSLWCWETEDLALLPLHLRSSLSIRRTARKLIHKRILVLSGKLATKDASNACSNQNSLMENAGEALDLDEIRSIIESKHKNDDDIKTEAQDFQAIRKAVKKQQMMVGHIQTEKNKKERELRHIYEKTEREAKRIERENKRLKKHQEEEERAKKKKEKEEAELKRKASIQKQANLMERFFKRKADSNIGSSDSHHMERTTCSKSTGNIEELAVAATSAMDCTLCKENHLSMEELRMIHVAKWRTLFQHNRLRHWGVRRSPKIQLFLELRLQKPSTPIASDSMSTPTKEQSSLESTGNLDITKLLDELEIPSRSQNSTSSSVLLVKKLLQFDNSSRPAYYGTWRKKS

SEQ ID NO: 189990 - protein, 259 aa, Zea Mays
MQCESVCVRFDGISSLLSIPGVTVEELNALLQRQKALHIITEHALKIDRPLVICNLDHRKLGLLNAEGITGMLKMEKICLQALCMKKYPGSPIIDVPVVNTTIEDGFCRSNKKSPRTPVSSKAISESDMPEFAKLVASCPQGRVKLVELLHETFPYVSKARLKNKVGEIAEFTKNRWQVKQDILDRYNLSLSPDKGEGLKCAASCCSQQCQPPNESGNTGESSSPQCSLKSEMVRQQLGAQGSSHGSARHPSTKMAGGQ

SEQ ID NO: 189991 - protein, 250 aa, Zea Mays
MERFFKRKADSNIGSSDSHHMERTTCSKSTGNIEELAVAATSAMDCTLCKENHLSMEELRMIHVAKWRTLFQHNRLRHWGVRRSPKIQLFLELRLQKPSTPIASDSMSTPTKEQSSLESTGNLDITKLLDELEIPSRSQNSTSSSVLLVKKLLQFDNSSRPAYYGTWRKKSSTVSARQPFQRDEELNYDVESDEEWEEVDPGDPGERLSDYEEDDEKTMNEHDAMIDAEKETENSFIVPNDYLSDDEVIP

SEQ ID NO: 189992 - protein, 507 aa, Zea Mays
MERFFKRKADSNIGSSDSHHMERTTCSKSTGNIEELAVAATSAMDCTLCKENHLSMEELRMIHVAKWRTLFQHNRLRHWGVRRSPKIQLFLELRLQKPSTPIASDSMSTPTKEQSSLESTGNLDITKLLDELEIPSRSQNSTSSSVLLVKKLLQFDNSSRPAYYGTWRKKSSTVSARQPFQRDEELNYDVESDEEWEEVDPGDPGERLSDYEEDDEKTMNEHDAMIDAEKETENSFIVPNDYLSDDEGMQCESVCVRFDGISSLLSIPGVTVEELNALLQRQKALHIITEHALKIDRPLVICNLDHRKLGLLNAEGITGMLKMEKICLQALCMKKYPGSPIIDVPVVNTTIEDGFCRSNKKSPRTPVSSKAISESDMPEFAKLVASCPQGRVKLVELLHETFPYVSKARLKNKVGEIAEFTKNRWQVKQDILDRYNLSLSPDKGEGLKCAASCCSQQCQPPNESGNTGESSSPQCSLKSEMVRQQLGAQGSSHGSARHPSTKMAGGQ

SEQ ID NO: 189993 - protein, 257 aa, Zea Mays
MQCESVCVRFDGISSLLSIPGVTVEELNALLQRQKALHIITEHALKIDRPLVICNLDHRKLGLLNAEGITGMLKMEKICLQALCMKKYPGSPIIDVPVVNTTIEDGFCRSNKKSPRTPVSSKAISESDMPEFAKLVASCPQGRVKLVELLHETFPYVSKARLKNKVGEIAEFTKNRWQQDILDRYNLSLSPDKGEGLKCAASCCSQQCQPPNESGNTGESSSPQCSLKSEMVRQQLGAQGSSHGSARHPSTKMAGGQ

SEQ ID NO: 189994 - protein, 514 aa, Zea Mays
MERFFKRKADSNIGSSDSHHMERTTCSKSTGNIEELAVAATSAMDCTLCKENHLSMEELRMIHVAKWRTLFQHNRLRHWGVRRSPKIQLFLELRLQKPSTPIASDSMSTPTKEQSSLESTGNLDITKLLDELEIPSRSQNSTSSSVLLVKKLLQFDNSSRPAYYGTWRKKSSTVSARQPFQRDEELNYDVESDEEWEEVDPGDPGERLSDYEEDDEKTMNEHDAMIDAEKETENSFIVPNDYLSDDEGMQCESVCVRFDGISSLLSIPGVTVEELNALLQRQKALHIITEHALKIDRPLVICNLDHRKLGLLNAEGITGMLKMEKICLQALCMKKYPGSPIIDVPVVNTTIEDGFCRSNKKSPRTPVSSKAISESNMPLVFSLDILQAKLVASCPQGRVKLVELLHETFPYVSKARLKNKVGEIAEFTKNRWQVKQDILDRYNLSLSPDKGEGLKCAASCCSQQCQPPNESGNTGESSSPQCSLKSEMVRQQLGAQGSSHGSARHPSTKMAGGQ

SEQ ID NO: 189995 - protein, 91 aa, Zea Mays
MIPTHCLSCTSQSTTMDSPMNHTLNRLVHLEQVVNERNMMCPVLKTHLKSNCMTLWSELSGPSFTAVSCMEDIHQSAPSCIDDILALQPYE

SEQ ID NO: 189996 - protein, 348 aa, Zea Mays
MASKKASDLLLLLNAATTGSIRTVVRQLFSRLVFSLQMECSLSMEIVSFWLWLEGNGHPDFLARVESLDNHRLRGIAFAGKMFIEGLRRRSSGGHLNSRGSVEEEEEEEEGYFQEEAMEGIVFYLNNFCYEALEDILEIAEAKERVVYHRARGNQVQQQQQQSSKGKAPMMMSTKDLLSKIKASFTTAARSSHEEGSTSSRSMPSPKKQVLRDIENPIDQCLSTTTYPLATLFDSLKLRDDDPEADPAIIKVPRRRQPSIVPRDERTLFVTFSNGYPFTADELNFGGVEVICVEDPIEPRPPLYAHITFFTQETILHILRGSARVKFVIRGKHLWARQFVPKRKKVRN

SEQ ID NO: 189997 - protein, 159 aa, Zea Mays
MYFMMYSWIGGLTKVSTVTLDNCSTNDNVMKEMQYKGMLLSKALKMQQDIKDKRNEIIIEGLEDKIKKLEDSLKEKDNLLQSAEGSLVEARSQNDKLSEELIEARATLNERSERFDHETKELKAKVEAEAERKAKLSETIKNLRDKCSDFAAQCINRLK

SEQ ID NO: 189998 - protein, 1257 aa, Zea Mays
MSGFHASQCGFCTPGMCMSIFTSLIKADKSKRPEPPKGFSKLKVSEAGKAFSGNLCRCTGYRPIVDACKSFASDVDLEDLGLNIFWKKGDRNPDVSELPSYTLGGGVCTFPDFLKTELKSSLDHLNNPCIAASGEGWYHPKSIKEYYELINSCLFSDSVKVVVGNTSSGVPGYKDQDIYSKYIDIGGIPELSNIVRMGSGIEIGVATSISRTIEILEEECESISSPNGSVVFRKLANHMSKVATPFVRNTASIGGNIVLAQKFPFPSDIATILLGAGATVCLQVVAERRQITLEEFLEQPPIDATTLLLSIFIPNWISDSGANISLLFETYRAAPRPLGNAVSYVNCAFLGHASLDEQSDTLVLSNLRLAFGAYGTEHAIRATRVEEFLTGKSLTASVVLGAIQLLRETVVPMEGTSHPEYRVSAAVGFLFSFLSPFSKCIPEPGKSLASSSTDSADTDDVRNLPLSTRRETFSSDEYKPVGEPIKKYGVELQASGEAVYVDDIPAPKNCLYGEFIYSTQPLAYVKSIKFKSSLASEKIISFVSAKDIPSGGLNIGSSSTFGDEPLFGDPIAEYAGQALGIVIAETQRYADMAAKQVVIEYDTEDLSPPIITVEQAVEKSSYFDVPPEFYPKEVGDVSKGMAEADHKIPSTEVKLASEYYFYMETQTALAVPDEDNTLVVYSSSQYPELAQSVIARCLGIPFSNVRVITRRVGGGFGGKAFRSFQVATAAALCAYKLRRPVRMYLNRNTDMVMVGGRHPVKAHYTVGFKNDGNVTALHLDLLINAGISPDASPIIPGTIISSVKKYNWGALSFDIKLCRTNNSSKSVMRAPGDTQGSLIADAVIEHVASVLSLDANSVREKNFHTYGTLQSFYPDSAGEASTYTLHSIFDRLVSTSSYLDRAESIKEFNSNSKWRKRGISCVPLIFKVEPRAAPGRVSVLKDGSVVVEVGGIEIGQGLWTKVQQMTAFALGRLWPDADGGGECLLGRVRVLQADTLNLVQGGLTAGSTASESSCAATLQACNTLYDRLKLVLDRLQQRSENVSWDTLVSQAYEDDVDLSASAYWVPGQASNKYLNYGAGISEVEIDLLTGAITIIRGDLVYDCGKSLNPAVDLGQIEGSFVQGIGFFVYEEYTTNSDGLMISNSTWDYKIPSVDIIPRQFNAEVLNTGYHKNRVLSSKASGEPALVLASSVHCALREAIRAARVEFADSTVSSGHSPLEFQMGVPAPMTLVKELCGLDIVDRYLEGLSTCERAAGGA

SEQ ID NO: 189999 - protein, 745 aa, Zea Mays
MAAIDRVVFALNGQRYEVGGVDPSTRLLEFIRTQTPFTGPKLGCGEGGCGACVVLIAKYNPKTDEVTEFTASSCLTLLYTINFCSVITTEGLGDSQYGFHAVQERMSGFHASQCGFCTPGMCMSIFTSLIKADKSKRPEPPKGFSKLKVSEAGKAFSGNLCRCTGYRPIVDACKSFASDVDLEDLGLNIFWKKGDRNPDVSELPSYTLGGGVCTFPDFLKTELKSSLDHLNNPCIAASGEGWYHPKSIKEYYELINSCLFSDSVKVVVGNTSSGVPGYKDQDIYSKYIDIGGIPELSNIVRMGSGIEIGVATSISRTIEILEEECESISSPNGSVVFRKLANHMSKVATPFVRNTASIGGNIVLAQKFPFPSDIATILLGAGATVCLQVVAERRQITLEEFLEQPPIDATTLLLSIFIPNWISDSGANISLLFETYRAAPRPLGNAVSYVNCAFLGHASLDEQSDTLVLSNLRLAFGAYGTEHAIRATRVEEFLTGKSLTASVVLGAIQLLRETVVPMEGTSHPEYRVSAAVGFLFSFLSPFSKCIPEPGKSLASSSTDSADTDDVRNLPLSTRRETFSSDEYKPVGEPIKKYGVELQASGEAVYVDDIPAPKNCLYGEFIYSTQPLAYVKSIKFKSSLASEKIISFVSAKDIPSGGLNIGSSSTFGDEPLFGDPIAEYAGQALGIVIAETQRYADMAAKQVVIEYDTEDLSPPIITVEQAVEKSKTCLRVLLLHGNTDSTSSSR

SEQ ID NO: 190000 - protein, 371 aa, Zea Mays
MDVLLDKHRKILVDKLNDGEISSGRGQNQETSLARPGDTRWGSHYKTLLRIETMWESIIEVLGIVNQGQRNPSRGGGLVANMESFCFVLIMKMMLQILRITNKLSLLLQKKDQNIVQAMFLVDVRIRLNDLGSEGWDPLFEEVKAFCVEAGIDIPDMDGPIPRFGQSRRGRNNITQDHFYRVDIFYSAIDSLIAELDHRFNEVSSELLTRFACLDPRDSFSKFDVNKLARLTEIYLEDFSFDDRKLIKDQLLTFIVHVRRVDEFKACHDLASLAKTMVEIGRDIVFPLVYRLIELALLLPVAMATVERVFSATKIIKTELRNKMGDYWLNDLMVIYIERELFKGLDLQNIKKAFQKNKDRQMQLPRSPRHI

SEQ ID NO: 190001 - protein, 123 aa, Zea Mays
MCLYSRHIKSNHHDYITGFLYWYLSFATILISTLSLSSYSVLPIHCLLWSAIHPHAVSVSTDPLKSFHILLQLPPRRLARVARPHSFSLPEAPLLLQLHGTGEILSKKQVCIITIRTTFHRLS

SEQ ID NO: 190002 - protein, 60 aa, Zea Mays
MVLLPCQSRLGQPLNLSKSGLQIQLGLPPNPTRRQSRWSASCCQAAYSSRAPMKPSLKVN

SEQ ID NO: 190003 - protein, 56 aa, Zea Mays
MATNDLCVCVCGGGGGGSILSHKVYAICESQRYAKVSTGCTVPRTGVEYPINLCKS

SEQ ID NO: 190004 - protein, 241 aa, Zea Mays
MWSTWAPPKCHFFIWLVLHNKCWTTDRLAKKDANNIVDSSYGFSVVDSNSLEFLFNNAPEAAKWLKDNSELSFEEKYRSDRSSWLALYPVPFLFSGSLKFQAQTEEIKKYYQHFPQLAVQEIWDNNGQRRVHLKLALGSLSEIWTSVLNITGPLSNWSFADNMLPAPQTVSGGPPSYICRLSGKSDVDWSFWLEANSSESLRVDVAVLDQYLVDSTKKLKSLFPSWADLTAFTTFFSTYHL

SEQ ID NO: 190005 - protein, 317 aa, Zea Mays
MTPCLLYGLYYGGFLIQFLIEKMGMMGSLPKPYGYFVPDVIVGAVVGLVVGWCFGPLSPVASRWLSKTSIIHGFLQITVVALAISSQLFPYSTGAPKRVVLQHTFVTDANNIVDSSYGFSVVDSNSLEFLFNNAPEAAKWLKDNSELSFEEKYRSDRSSWLALYPVPFLFSGSLKFQAQTEEIKKYYQHFPQLAVQEIWDNNGQRRVHLKLALGSLSEIWTSVLNITGPLSNWSFADNMLPAPQTVSGGPPSYICRLSGKSDVDWSFWLEANSSESLRVDVAVLDQYLVDSTKKLKSLFPSWADLTAFTTFFSTYHL

SEQ ID NO: 190006 - protein, 443 aa, Zea Mays
MVLHTFGVILAIFIPALAAALRLLFTKNAMNWFAHPYLAFLMFVPTSLIGLLLPRLTWGLSEQAHFWGAFGLYSLITMVYTLAGLSGGFLTFFISMSMLLGRFVSRIIRKQWSQQSPRSLVAYVLPMTPCLLYGLYYGGFLIQFLIEKMGMMGSLPKPYGYFVPDVIVGAVVGLVVGWCFGPLSPVASRWLSKTSIIHGFLQITVVALAISSQLFPYSTGAPKRVVLQHTFVTDANNIVDSSYGFSVVDSNSLEFLFNNAPEAAKWLKDNSELSFEEKYRSDRSSWLALYPVPFLFSGSLKFQAQTEEIKKYYQHFPQLAVQEIWDNNGQRRVHLKLALGSLSEIWTSVLNITGPLSNWSFADNMLPAPQTVSGGPPSYICRLSGKSDVDWSFWLEANSSESLRVDVAVLDQYLVDSTKKLKSLFPSWADLTAFTTFFSTYHL

SEQ ID NO: 190007 - protein, 501 aa, Zea Mays
MLLKENEISNKAAKDGIEDVGAVFFDYLTWFMVFYSRDISLILHSLPIAIFLLVPLFLKFPNITLMSWFVTLLGFMRGMVLHTFGVILAIFIPALAAALRLLFTKNAMNWFAHPYLAFLMFVPTSLIGLLLPRLTWVYTLAGLSGGFLTFFISMSMLLGRFVSRIIRKQWSQQSPRSLVAYVLPMTPCLLYGLYYGGFLIQFLIEKMGMMGSLPKPYGYFVPDVIVGAVVGLVVGWCFGPLSPVASRWLSKTSIIHGFLQITVVALAISSQLFPYSTGAPKRVVLQHTFVTDANNIVDSSYGFSVVDSNSLEFLFNNAPEAAKWLKDNSELSFEEKYRSDRSSWLALYPVPFLFSGSLKFQAQTEEIKKYYQHFPQLAVQEIWDNNGQRRVHLKLALGSLSEIWTSVLNITGPLSNWSFADNMLPAPQTVSGGPPSYICRLSGKSDVDWSFWLEANSSESLRVDVAVLDQYLVDSTKKLKSLFPSWADLTAFTTFFSTYHL

SEQ ID NO: 190008 - protein, 576 aa, Zea Mays
MANSVAQDMFGIIPGDTDYRIFAEDITNIPGLDIIFVLGGYFYHTSYDTLENLLPGSIQARGENLFNLVKAFTNPMLLKENEISNKAAKDGIEDVGAVFFDYLTWFMVFYSRDISLILHSLPIAIFLLVPLFLKFPNITLMSWFVTLLGFMRGMVLHTFGVILAIFIPALAAALRLLFTKNAMNWFAHPYLAFLMFVPTSLIGLLLPRLTWVYTLAGLSGGFLTFFISMSMLLGRFVSRIIRKQWSQQSPRSLVAYVLPMTPCLLYGLYYGGFLIQFLIEKMGMMGSLPKPYGYFVPDVIVGAVVGLVVGWCFGPLSPVASRWLSKTSIIHGFLQITVVALAISSQLFPYSTGAPKRVVLQHTFVTDANNIVDSSYGFSVVDSNSLEFLFNNAPEAAKWLKDNSELSFEEKYRSDRSSWLALYPVPFLFSGSLKFQAQTEEIKKYYQHFPQLAVQEIWDNNGQRRVHLKLALGSLSEIWTSVLNITGPLSNWSFADNMLPAPQTVSGGPPSYICRLSGKSDVDWSFWLEANSSESLRVDVAVLDQYLVDSTKKLKSLFPSWADLTAFTTFFSTYHL

SEQ ID NO: 190009 - protein, 602 aa, Zea Mays
MANSVAQDMFGIIPGDTDYRIFAEDITNIPGLDIIFVLGGYFYHTSYDTLENLLPGSIQARGENLFNLVKAFTNPMLLKENEISNKAAKDGIEDVGAVFFDYLTWFMVFYSRDISLILHSLPIAIFLLVPLFLKFPNITLMSWFVTLLGFMRGMVLHTFGVILAIFIPALAAALRLLFTKNAMNWFAHPYLAFLMFVPTSLIGLLLPRLTWVFPYKHGLSEQAHFWGAFGLYSLITMVYTLAGLSGGFLTFFISMSMLLGRFVSRIIRKQWSQQSPRSLVAYVLPMTPCLLYGLYYGGFLIQFLIEKMGMMGSLPKPYGYFVPDVIVGAVVGLVVGWCFGPLSPVASRWLSKTSIIHGFLQITVVALAISSQLFPYSTGAPKRVVLQHTFVTDANNIVDSSYGFSVVDSNSLEFLFNNAPEAAKWLKDNSELSFEEKYRSDRSSWLALYPVPFLFSGSLKFQAQTEEIKKYYQHFPQLAVQEIWDNNGQRRVHLKLALGSLSEIWTSVLNITGPLSNWSFADNMLPAPQTVSGGPPSYICRLSGKSDVDWSFWLEANSSESLRVDVAVLDQYLVDSTKKLKSLFPSWADLTAFTTFFSTYHL

SEQ ID NO: 190010 - protein, 718 aa, Zea Mays
MVSSNVSEDDDPSLLVNGHFDSPLGSPGAADCGSCVASMLELSRLLIDSGWVPPRPVIFLFNGAEELFLLGSHGFIKTHRWNRTIRAFINIEASGSGGTDLVCQSGPGSWPSRVYAQTAKYPMANSVAQDMFGIIPGDTDYRIFAEDITNIPGLDIIFVLGGYFYHTSYDTLENLLPGSIQARGENLFNLVKAFTNPMLLKENEISNKAAKDGIEDVGAVFFDYLTWFMVFYSRDISLILHSLPIAIFLLVPLFLKFPNITLMSWFVTLLGFMRGMVLHTFGVILAIFIPALAAALRLLFTKNAMNWFAHPYLAFLMFVPTSLIGLLLPRLTWGLSEQAHFWGAFGLYSLITMVYTLAGLSGGFLTFFISMSMLLGRFVSRIIRKQWSQQSPRSLVAYVLPMTPCLLYGLYYGGFLIQFLIEKMGMMGSLPKPYGYFVPDVIVGAVVGLVVGWCFGPLSPVASRWLSKTSIIHGFLQITVVALAISSQLFPYSTGAPKRVVLQHTFVTDANNIVDSSYGFSVVDSNSLEFLFNNAPEAAKWLKDNSELSFEEKYRSDRSSWLALYPVPFLFSGSLKFQAQTEEIKKYYQHFPQLAVQEIWDNNGQRRVHLKLALGSLSEIWTSVLNITGPLSNWSFADNMLPAPQTVSGGPPSYICRLSGKSDVDWSFWLEANSSESLRVDVAVLDQYLVDSTKKLKSLFPSWADLTAFTTFFSTYHL

SEQ ID NO: 190011 - protein, 660 aa, Zea Mays
MLELSRLLIDSGWVPPRPVIFLFNGAEELFLLGSHGFIKTHRWNRTIRAFINIEASGSGGTDLVCQSGPGSWPSRVYAQTAKYPMANSVAQDMFGIIPGDTDYRIFAEDITNIPGLDIIFVLGGYFYHTSYDTLENLLPGSIQARGENLFNLVKAFTNPMLLKENEISNKAAKDGIEDVGAVFFDYLTWFMVFYSRDISLILHSLPIAIFLLVPLFLKFPNITLMSWFVTLLGFMRGMVLHTFGVILAIFIPALAAALRLLFTKNAMNWFAHPYLAFLMFVPTSLIGLLLPRLTWVYTLAGLSGGFLTFFISMSMLLGRFVSRIIRKQWSQQSPRSLVAYVLPMTPCLLYGLYYGGFLIQFLIEKMGMMGSLPKPYGYFVPDVIVGAVVGLVVGWCFGPLSPVASRWLSKTSIIHGFLQITVVALAISSQLFPYSTGAPKRVVLQHTFVTDANNIVDSSYGFSVVDSNSLEFLFNNAPEAAKWLKDNSELSFEEKYRSDRSSWLALYPVPFLFSGSLKFQAQTEEIKKYYQHFPQLAVQEIWDNNGQRRVHLKLALGSLSEIWTSVLNITGPLSNWSFADNMLPAPQTVSGGPPSYICRLSGKSDVDWSFWLEANSSESLRVDVAVLDQYLVDSTKKLKSLFPSWADLTAFTTFFSTYHL

SEQ ID NO: 190012 - protein, 680 aa, Zea Mays
MLELSRLLIDSGWVPPRPVIFLFNGAEELFLLGSHGFIKTHRWNRTIRAFINIEASGSGGTDLVCQSGPGSWPSRVYAQTAKYPMANSVAQDMFGIIPGDTDYRIFAEDITNIPGLDIIFVLGGYFYHTSYDTLENLLPGSIQARGENLFNLVKAFTNPMLLKENEISNKAAKDGIEDVGAVFFDYLTWFMVFYSRDISLILHSLPIAIFLLVPLFLKFPNITLMSWFVTLLGFMRGMVLHTFGVILAIFIPALAAALRLLFTKNAMNWFAHPYLAFLMFVPTSLIGLLLPRLTWGLSEQAHFWGAFGLYSLITMVYTLAGLSGGFLTFFISMSMLLGRFVSRIIRKQWSQQSPRSLVAYVLPMTPCLLYGLYYGGFLIQFLIEKMGMMGSLPKPYGYFVPDVIVGAVVGLVVGWCFGPLSPVASRWLSKTSIIHGFLQITVVALAISSQLFPYSTGAPKRVVLQHTFVTDANNIVDSSYGFSVVDSNSLEFLFNNAPEAAKWLKDNSELSFEEKYRSDRSSWLALYPVPFLFSGSLKFQAQTEEIKKYYQHFPQLAVQEIWDNNGQRRVHLKLALGSLSEIWTSVLNITGPLSNWSFADNMLPAPQTVSGGPPSYICRLSGKSDVDWSFWLEANSSESLRVDVAVLDQYLVDSTKKLKSLFPSWADLTAFTTFFSTYHL

SEQ ID NO: 190013 - protein, 718 aa, Zea Mays
MMFLRHRVTLGYRNHKNIVMRVSSNVSEDDDPSLLVNGHFDSPLGSPGAADCGSCVASMLELSRLLIDSGWVPPRPVIFLFNGAEELFLLGSHGFIKTHRWNRTIRAFINIEASGSGGTDLVCQSGPGSWPSRVYAQTAKYPMANSVAQDMFGIIPGDTDYRIFAEDITNIPGLDIIFVLGGYFYHTSYDTLENLLPGSIQARGENLFNLVKAFTNPMLLKENEISNKAAKDGIEDVGAVFFDYLTWFMVFYSRDISLILHSLPIAIFLLVPLFLKFPNITLMSWFVTLLGFMRGMVLHTFGVILAIFIPALAAALRLLFTKNAMNWFAHPYLAFLMFVPTSLIGLLLPRLTWVYTLAGLSGGFLTFFISMSMLLGRFVSRIIRKQWSQQSPRSLVAYVLPMTPCLLYGLYYGGFLIQFLIEKMGMMGSLPKPYGYFVPDVIVGAVVGLVVGWCFGPLSPVASRWLSKTSIIHGFLQITVVALAISSQLFPYSTGAPKRVVLQHTFVTDANNIVDSSYGFSVVDSNSLEFLFNNAPEAAKWLKDNSELSFEEKYRSDRSSWLALYPVPFLFSGSLKFQAQTEEIKKYYQHFPQLAVQEIWDNNGQRRVHLKLALGSLSEIWTSVLNITGPLSNWSFADNMLPAPQTVSGGPPSYICRLSGKSDVDWSFWLEANSSESLRVDVAVLDQYLVDSTKKLKSLFPSWADLTAFTTFFSTYHL

SEQ ID NO: 190014 - protein, 446 aa, Zea Mays
MLELSRLLIDSGWVPPRPVIFLFNGAEELFLLGSHGFIKTHRWNRTIRAFINIEASGSGGTDLVCQSGPGSWPSRVYAQTAKYPMANSVAQDMFGIIPGDTDYRIFAEDITNIPGLDIIFVLGGYFYHTSYDTLENLLPGSIQARGENLFNLVKAFTNPMLLKENEISNKAAKDGIEDVGAVFFDYLTWFMVFYSRDISLILHSLPIAIFLLVPLFLKFPNITLMSWFVTLLGFMRDANNIVDSSYGFSVVDSNSLEFLFNNAPEAAKWLKDNSELSFEEKYRSDRSSWLALYPVPFLFSGSLKFQAQTEEIKKYYQHFPQLAVQEIWDNNGQRRVHLKLALGSLSEIWTSVLNITGPLSNWSFADNMLPAPQTVSGGPPSYICRLSGKSDVDWSFWLEANSSESLRVDVAVLDQYLVDSTKKLKSLFPSWADLTAFTTFFSTYHL

SEQ ID NO: 190015 - protein, 361 aa, Zea Mays
MLELSRLLIDSGWVPPRPVIFLFNGAEELFLLGSHGFIKTHRWNRTIRAFINIEASGSGGTDLVCQSGPGSWPSRVYAQTAKYPMANSVAQDMFGIIPGDTDYRIFAEDITNIPGLDIIFVLGGYFYHTSYDTLENLLPGSIQARGENLFNLVKAFTNPMLLKENEISNKAAKDGIEDVGAVFFDYLTWFMVFYSRDISLILHSLPIAIFLLVPLFLKFPNITLMSWFVTLLGFMRGMVLHTFGVILAIFIPALAAALRLLFTKNAMNWFAHPYLAFLMFVPTSLIGLLLPRLTWVFPYKHGLSEQAHFWGAFGLYSLITMVYTLAGLSGGFLTFFISMSMLLGRFVSRIIRKQWSQQSPR

SEQ ID NO: 190016 - protein, 537 aa, Zea Mays
MPPRAPPRRRPAPAAGGPGFGDSARVLLALAALYAAMSLLAYRVIHMRHVAPLGADAPRGNFSEGRVLQHLRRLAVDIPGRQEGSPGLEAAAQYIKGELQGLAARAGPEYRIEVEETLVSGSFSMMFLRHRVTLGYRNHKNIVMRVSSNVSEDDDPSLLVNGHFDSPLGSPGAADCGSCVASMLELSRLLIDSGWVPPRPVIFLFNGAEELFLLGSHGFIKTHRWNRTIRAFINIEASGSGGTDLVCQSGPGSWPSRVYAQTAKYPMANSVAQDMFGIIPGDTDYRIFAEDITNIPGLDIIFVLGGYFYHTSYDTLENLLPGSIQARGENLFNLVKAFTNPMLLKENEISNKAAKDGIEDVGAVFFDYLTWFMVFYSRDISLILHSLPIAIFLLVPLFLKFPNITLMSWFVTLLGFMRGMVLHTFGVILAIFIPALAAALRLLFTKNAMNWFAHPYLAFLMFVPTSLIGLLLPRLTWGLSEQAHFWGAFGLYSLITMVYTLAGLSGGFLTFFISMSMLLGRFVSRIIRKQWSQQSPR

SEQ ID NO: 190017 - protein, 231 aa, Zea Mays
MPHLKSSQVAVKGKVEPATLVGFIHKCTGRRAAIIRAEPLDDVLLPQPPNPPAAPPASKAESKKDEPPAENPPAKVEEPNEENRGGGEKDNADDDNPKTEKPASDGHGAGAAEEHGAHATTEGPDRDNDDDAGDGLVLENHTKAAVDRLFAVPTPAGVVTVVAPEMALGSRSYCYPAYPCAQYYYPYQPHLYPPQPYPAASAYSPVAMYGYPASYPPEAFSEENPNACTIV

SEQ ID NO: 190018 - protein, 323 aa, Zea Mays
MAKQDKAASGGNGGGDGAVLVSPSPPEKLLLPARSSAPKAKGGETNTNKDIGNELPELDMKMVTVLKINLHCDACSEEIKRRILKITGVEEAMPHLKSSQVAVKGKVEPATLVGFIHKCTGRRAAIIRAEPLDDVLLPQPPNPPAAPPASKAESKKDEPPAENPPAKVEEPNEENRGGGEKDNADDDNPKTEKPASDGHGAGAAEEHGAHATTEGPDRDNDDDAGDGLVLENHTKAAVDRLFAVPTPAGVVTVVAPEMALGSRSYCYPAYPCAQYYYPYQPHLYPPQPYPAASAYSPVAMYGYPASYPPEAFSEENPNACTIV

SEQ ID NO: 190019 - protein, 285 aa, Zea Mays
MAKGGETNTNKDIGNELPELDMKMVTVLKINLHCDACSEEIKRRILKITGVEEAMPHLKSSQVAVKGKVEPATLVGFIHKCTGRRAAIIRAEPLDDVLLPQPPNPPAAPPASKAESKKDEPPAENPPAKVEEPNEENRGGGEKDNADDDNPKTEKPASDGHGAGAAEEHGAHATTEGPDRDNDDDAGDGLVLENHTKAAVDRLFAVPTPAGVVTVVAPEMALGSRSYCYPAYPCAQYYYPYQPHLYPPQPYPAASAYSPVAMYGYPASYPPEAFSEENPNACTIV

SEQ ID NO: 190020 - protein, 393 aa, Zea Mays
MAKDKAASGGNGGGDGAAAPAGEQLVIRAPVHCDGCGRKLRRSLQRLEGVGEVTVDSRADTVVVRGRGAVENAAEVVQVVERKTGEKAVLVSPSPPEKLLLPARSSAPKAKGGETNTNKDIGNELPELDMKMVTVLKINLHCDACSEEIKRRILKITGVEEAMPHLKSSQVAVKGKVEPATLVGFIHKCTGRRAAIIRAEPLDDVLLPQPPNPPAAPPASKAESKKDEPPAENPPAKVEEPNEENRGGGEKDNADDDNPKTEKPASDGHGAGAAEEHGAHATTEGPDRDNDDDAGDGLVLENHTKAAVDRLFAVPTPAGVVTVVAPEMALGSRSYCYPAYPCAQYYYPYQPHLYPPQPYPAASAYSPVAMYGYPASYPPEAFSEENPNACTIV

SEQ ID NO: 190021 - protein, 314 aa, Zea Mays
MAKVQQDKAVLVSPSPPEKLLLPARSSAPKAKGGETNTNKDIGNELPELDMKMVTVLKINLHCDACSEEIKRRILKITGVEEAMPHLKSSQVAVKGKVEPATLVGFIHKCTGRRAAIIRAEPLDDVLLPQPPNPPAAPPASKAESKKDEPPAENPPAKVEEPNEENRGGGEKDNADDDNPKTEKPASDGHGAGAAEEHGAHATTEGPDRDNDDDAGDGLVLENHTKAAVDRLFAVPTPAGVVTVVAPEMALGSRSYCYPAYPCAQYYYPYQPHLYPPQPYPAASAYSPVAMYGYPASYPPEAFSEENPNACTIV

SEQ ID NO: 190022 - protein, 298 aa, Zea Mays
MAKLLLPARSSAPKAKGGETNTNKDIGNELPELDMKMVTVLKINLHCDACSEEIKRRILKITGVEEAMPHLKSSQVAVKGKVEPATLVGFIHKCTGRRAAIIRAEPLDDVLLPQPPNPPAAPPASKAESKKDEPPAENPPAKVEEPNEENRGGGEKDNADDDNPKTEKPASDGHGAGAAEEHGAHATTEGPDRDNDDDAGDGLVLENHTKAAVDRLFAVPTPAGVVTVVAPEMALGSRSYCYPAYPCAQYYYPYQPHLYPPQPYPAASAYSPVAMYGYPASYPPEAFSEENPNACTIV

SEQ ID NO: 190023 - protein, 394 aa, Zea Mays
MAKQDKAASGGNGGGDGAAAPAGEQLVIRAPVHCDGCGRKLRRSLQRLEGVGEVTVDSRADTVVVRGRGAVENAAEVVQVVERKTGEKAVLVSPSPPEKLLLPARSSAPKAKGGETNTNKDIGNELPELDMKMVTVLKINLHCDACSEEIKRRILKITGVEEAMPHLKSSQVAVKGKVEPATLVGFIHKCTGRRAAIIRAEPLDDVLLPQPPNPPAAPPASKAESKKDEPPAENPPAKVEEPNEENRGGGEKDNADDDNPKTEKPASDGHGAGAAEEHGAHATTEGPDRDNDDDAGDGLVLENHTKAAVDRLFAVPTPAGVVTVVAPEMALGSRSYCYPAYPCAQYYYPYQPHLYPPQPYPAASAYSPVAMYGYPASYPPEAFSEENPNACTIV

SEQ ID NO: 190024 - protein, 159 aa, Zea Mays
MAYVSGNPIMTDDEFDQLKLRLKVYSDLTVDYLKMLLLNVPAAVVALALFFFLDDFTGFEITYLLELPEPFSFIFTWFAALPLIFWVAQAITNVIVKDFLILKGPCPNCGNENLSFFGTILSVPSGGSKNSVKCASCGTELEYDSSTRLITLPEPAEAK

SEQ ID NO: 190025 - protein, 118 aa, Zea Mays
MGVVSAAADAIVAVFSLTIVVAAPLLDAQSVLPHTLYPAPLLELKRWYAAEFGDYLVAQSPGFFRGLVCLELAFQWPLAVATLYGILTRRRWAATTSLMAGVGTLTSMSAILEGLDQQ

SEQ ID NO: 190026 - protein, 79 aa, Zea Mays
MSALGLPPSRVAMYTIASPFSTGRNSSLFLSLPQEGWIRRHIARRDSWINLVLNRCPVGWFLPQAPMAGCPGARGSAQC

SEQ ID NO: 190027 - protein, 230 aa, Zea Mays
MSSGKRSFFAPKKKATNPFDSDSDDDKPQQRPARASSVPPPDEQRGSSSLFGAGDRGGLFSSAANHHYRNDFRDAGGLEGQSVQELEGYAAYKAEETTRRTRGCVRIAEEMRDTASKTLVTVHQQGQQIHRTHMMAVDIDQDLSRSEKLLGDLGGLFSKKWKPKKNGAIRGPMLTRDDSFIRKGSHLEQRQKLGLADHPPPSNARQFRSEPSSALEKVERRQSRMMICLI

SEQ ID NO: 190028 - protein, 1031 aa, Zea Mays
MEASAGLVAGSHNRNELVVIRRDGDPGPKPPREQNGQVCQICGDDVGLAPGGDPFVACNECAFPVCRDCYEYERREGTQNCPQCKTRYKRLKGCQRVTGDEEEDGVDDLDNEFNWDGHDSQSVAESMLYGHMSYGRGGDPNGAPQAFQLNPNVPLLTNGQMVDDIPPEQHALVPSFMGGGGKRIHPLPYADPSLPVQPRSMDPSKDLAAYGYGSVAWKERMENWKQRQERMHQTGNDGGGDDGDDADLPLMDEARQQLSRKIPLPSSQINPYRMIIIIRLVVLGFFFHYRVMHPVNDAFALWLISVICEIWFAMSWILDQFPKWFPIERETYLDRLSLRFDKEGQPSQLAPIDFFVSTVDPLKEPPLVTTNTVLSILSVDYPVDKVSCYVSDDGAAMLTFEALSETSEFAKKWVPFCKRYNIEPRAPEWYFQQKIDYLKDKVAANFVRERRAMKREYEEFKVRINALVAKAQKVPEEGWTMQDGTPWPGNNVRDHPGMIQVFLGQSGGLDCEGNELPRLVYVSREKRPGYNHHKKAGAMNALVRVSAVLTNAPYLLNLDCDHYINNSKAIKEAMCFMMDPLLGKKVCYVQFPQRFDGIDRHDRYANRNVVFFDINMKGLDGIQGPIYVGTGCVFRRQALYGYDAPKTKKPPSRTCNCWPKWCFCCCCFGNRKQKKTTKPKTEKKKLLFFKKEENQSPAYALGEIDEAAPGAENEKAGIVNQQKLEKKFGQSSVFVTSTLLENGGTLKSASPASLLKEAIHVISCGYEDKTDWGKEIGWIYGSVTEDILTGFKMHCHGWRSIYCIPKRVAFKGSAPLNLSDRLHQVLRWALGSIEIFFSNHCPLWYGYGGGLKFLERFSYINSIVYPWTSIPLLAYCTLPAICLLTGKFITPEGLLKVIAGVDTSFTVTSKGGDDEEFSELYTFKWTTLLIPPTTLLLLNFIGVVAGVSNAINNGYESWGPLFGKLFFAFWVIVHLYPFLKGLVGRQNRTPTIVIVWSILLASIFSLLWVRIDPFLAKDDGPLLEECGLDCN

SEQ ID NO: 190029 - protein, 126 aa, Zea Mays
MDRDAAMLPSLELHRHLGELLQKGTGADVTFHVSGEKFAAHKAILASRSPVFMAELFGGMKEEASRHIEVKDIKPAAFKAVLRFIYTGTAPELDKKGDGGTSLAQHLLAGADRMMMLRNDEPKLVK

SEQ ID NO: 190030 - protein, 334 aa, Zea Mays
MRQWLCCNCHFDDEEDGHDKEQAKAQSNKIDPKQKSSKPPVSQPEPEFSPPTIDVPELSLDDLKQKTDDFGSSALIGEGSYGRVYHAALDDGRQAAVKKLDASENEPNDEFLKQVSLASKLKHENLVEMLGYCVDGNYRILAYEFATMGSLHDVLHGRKGVQGAQPGPVLDWMQRVKIVIEAAKDFNLLNQAPDMAARLHSTRVLGTFGYHAPEYAMTGQLTQKSDVYSFGVVLLELLTGRKPVDHTMPRGQQSLVTWATPRLSEDKVKQCVDPRLKGEYPPKGVAKLAAVAALCVQYEAEFRPNMSIVVKALSPLLQQRPAPGTAEPAPQPVS

SEQ ID NO: 190031 - protein, 304 aa, Zea Mays
MDSPDAGGEDQSDSFAGPRHSCFEPREREVPIEDMSVSGNGEGKHDKKGWFSNWGKRSQVSKSEGVKKMASPRNSLCVDDKVSDLVIESPSNVQTRPGRHSVDVVRPDDNRRIRERDSRRHVASAENGHRRKEGSKESEYKKGLRPVLWLSPNFPLRTEELLPLLDILANKVKAIRRLRDLLTTKLPPGTFPVKVAIPVVPTIRVLVTFTKFEELQPLDEFTTPPSSPDNSKSPAVQPSSSSWIQWIKAPYLQNLSTAPGPSSRVEDIQDPFAIPSNYVWTTPEEKKKKTQENKNKSKKGRSGA

SEQ ID NO: 190032 - protein, 466 aa, Zea Mays
MTLAGFDGFKIQRSDQTILFLGEGSEDGKVPPGSLCMINHKDKEIMNALEGAGTPASDAEVQQEVAAMSQTNIFRPGIDVTQALLLPQLTWRRQERTEAVGPWKAKVYEMNHVVVSVKSRRVPGAMTDEEFFSSCNDNDIESEGFDDVLTEEEKKQLEAALKMDSPDAGGEDQSDSFAGPRHSCFEPREREVPIEDMSVSGNGEGKHDKKGWFSNWGKRSQVSKSEGVKKMASPRNSLCVDDKVSDLVIESPSNVQTRPGRHSVDVVRPDDNRRIRERDSRRHVASAENGHRRKEGSKESEYKKGLRPVLWLSPNFPLRTEELLPLLDILANKVKAIRRLRDLLTTKLPPGTFPVKVAIPVVPTIRVLVTFTKFEELQPLDEFTTPPSSPDNSKSPAVQPSSSSWIQWIKAPYLQNLSTAPGPSSRVEDIQDPFAIPSNYVWTTPEEKKKKTQENKNKSKKGRSGA

SEQ ID NO: 190033 - protein, 289 aa, Zea Mays
MTPLSSSGSPAATAAPSSAASPTRSVPSDSSWNPTTAPCRACDTTTTRGQRCHISSSSIHRLELDFPSREIPKATMSETSRPHCSYRNSSSSDHPEYLANPFYIGGDSYVGKIVPFLGQMISEGIELGRRPFPNLKGYLVGNPITGESIDFTSRVPYAHGVGIISDQLYETILGHCQGEDYTSPANALCAQALDTFNNLINEVQNAQILLDTCVYASPAPNVLSRPVDGGRRILRAAGMGGGATLNHPPARPRFGCITYGYYLSYFWANDERTRTALGIKKANLKQSDP

SEQ ID NO: 190034 - protein, 240 aa, Zea Mays
MTTAAWPRPRFLVLPQPGFLRSVCHGLCARCLFCFLLLLAFACSSSSGRVVVTSLPGFDGDLPFHLETGYVEVEEDAGVELFYYFVQAESGAAAAADDTPFLFWLTGGDRCSVFSGLAYEIGPIRFVLEPYNGTLPRLRYNHNSWSKVSHILFVDSPVGAGFSFSRDPKGYDVGDISASLQLQEFLIKWFSDHPEYLANPFYIGGDSYVGKIVPFLGQMISEGIELGRRPFPNLKVLNLS

SEQ ID NO: 190035 - protein, 141 aa, Zea Mays
MTPLSSSGSPAATAAPSSAASPTRSVPSDSSWNPTTAPCRACDTTTTRGQRCHISSSSIHRLELDFPSREIPKATMSETSRPHCSYRNSSSSDHPEYLANPFYIGGDSYVGKIVPFLGQMISEGIELGRRPFPNLKVLNLS

SEQ ID NO: 190036 - protein, 565 aa, Zea Mays
MAAVKPQPHFSPHATFSAPDAGPADTGFAVFRLLLPSSFSDADTMRLYAAVNPLRRRTATLQVRVEPLDPASAGGRVVAAIVGPTVPVRRVEASSSSAEPLALSPAQEALVAVIDTEGALCCAVEKEARGKARPGCITCLLLVDADRLEASTGRGVMERIALEAGADVRVAMWEEGAQPPRGQPLEEVVEITGDRTAVRKALVALSSFLQGDLPIGNSTTYVKKEGSILPWASSEVPGPNMGASCSEASTEFAQGSVAKTHCPEGNTGDAQSKTLQQVSFRLLLPTYLAGGLIGKKGLIIKGIEVETGACIDVGAPVAGCKERVITICALESPDSEYHIVQSALLLIFDRMMEMETNTHSTFEKASQFLVRVLVLKNQFGCLVGLGGSIIKEMVNTTGARIQILDDTEIPACASTFELVVQITGELMNIRNALSLVFWKLRNHIFSNETDYNNSHISSSEIAESNATSQANIYSTIQYSVDNGHKVDHRSPLSYGVDSVEKSFSDLELSSSEIQVSGADIIVYNPPSEGNEAMIVVSGPPDQAQSAQRLLVELILQGHPGTCLSA

SEQ ID NO: 190037 - protein, 585 aa, Zea Mays
MGSHAAYPPWAMHPPSGAVVYPPYPMQGMPFYPGVNPYYPPYPPVDDPRYHYSGRKSSRKHSSDSKDSETLDVESDHCSSDRGSSHGRKSHRKGKRSGKKKPSVVVIKNVNVTSKKHGSSESESQSSSEVESADSDNSHSKSSERKHKSSSSKKKEGRRTTFASGDEYSKDEMSNGHDAEQGNWSAFQNFLLRAEEKTRSSDADLFAGEKEPPSRRKQNVNTADPILLAERDGGIVHERNIVGFDSANGRTRAIRVMSNDELVMSGEGRNYMHSEIKEIEAGGGRYRRGTGDDYMVYGQGSQIARHSLLDPLAEAQYKNPVQQDKNRNGVADESFMIPLRSSLHDNIGAESRTTIDIDVELPSRIHKASDEKAGHQLFYEPDELVPERGSEDVSFGYDPAMDYDSHMQTTVKVEDEKTEDDLPVADNDVQKVEKEKLRNAKDGSDKRRKDALLRRLSAPRTPLNDAQKRAQNLRAYKADLQKLKKEQEEEQIKRLERLKLERQKRIAARGNGKGPGNGSPKANGTNGLSKSVPTFTGLKKEKNGTTESLSDRLKRLSEPKSIAGAEHSLNPKSTGADHSRRRSMA

SEQ ID NO: 190038 - protein, 789 aa, Zea Mays
MRSDARLDSVVFQLTPTRTRFDLVLIANGRKEKFASGLLKPFVAHLKAAQDQIAKGGYSITLEPSSGFDVPWFTRGTVERFVRFVSTPEVLERVRTLESEILQLEDAIAIQSNDSLGLKSVEDHGRKLTESNGGGRANYDPDSATAIVVYKPGSNPTPQIQNETAAHEENSKVQLLRVLETRKTMLRKEQAMAFARAVAAGFDIDNLGYLIAFAERFGAARLMKACSHFIELWKQKHETGQWIEVEPEAMSTRSEFPPFNASGIVFMGDNMKPNLESGSINGEANGEDGAKADQKSSQQMGSHAAYPPWAMHPPSGAVVYPPYPMQGMPFYPGVNPYYPPYPPVDDPRYHYSGRKSSRKHSSDSKDSETLDVESDHCSSDRGSSHGRKSHRKGKRSGKKKPSVVVIKNVNVTSKKHGSSESESQSSSEVESADSDNSHSKSSERKHKSSSSKKKEGRRTTFASGDEYSKDEMSNGHDAEQGNWSAFQNFLLRAEEKTRSSDADLFAGEKEPPSRRKQNVNTADPILLAERDGGIVHERNIVGFDSANGRTRAIRVMSNDELVMSGEGRNYMHSEIKEIEAGGGRYRRGTGDDYMVYGQGSQIARHSLLDPLAEAQYKNPVQQDKNRNGVADESFMIPLRSSLHDNIGAESRTTIDIDVELPSRIHKASDEKAGHQLFYEPDELVPERGSEDVSFGYDPAMDYDSHMQTTVKVEDEKTEDDLPVADNDVQKVEKEKLRNAKDGSDKRRKDALLRRLSAPRTPLNDAQKRAQNLRAYKADLQKLKKEQKSK

SEQ ID NO: 190039 - protein, 152 aa, Zea Mays
MLEVGNGGMAYNEYVVHFSLWAIAKAPLVIGCDVTRVSNETLGILSNAEVIAISQDRLGVQGQKVSKYGNDLEVWAGQLSGHRKAVLLLNRGATRSASITAAWPDVGIRRGVAVEARDVWKHETLPGWFTGSLTAVVGPHSCKLFVLTPVPS

SEQ ID NO: 190040 - protein, 93 aa, Zea Mays
MSSSAVNVATASSTRSGPAGTFNRRSKLLVGRPSWAFASKAAQPSRQPVSSLLSRRRCVLTRSLLSRQPVLKVSRSAAQLRLQQLSNMKRAEE

SEQ ID NO: 190041 - protein, 84 aa, Zea Mays
MTSEAQSVSVIHEAREGEGSKSRKHKQSHVGAALEDYVEFKKSQTNKTLDALKELSMRKCMKKMEAMDGFTDEKKSYAVEVFKS

SEQ ID NO: 190042 - protein, 78 aa, Zea Mays
MLLYLLIILLLLLLFLLLLLLLLLLLFLQLELYMKQEREKVAKAESISRAMLEQLSKTMWSSKRAKLTRHLMLLKNFP

SEQ ID NO: 190043 - protein, 71 aa, Zea Mays
MGISSQPPNASIHCVDGGRLRWGDDRDGSIAMPPSAAPTFDSPSSIVPPSPAITSMTSLAVVPSVSSPSLV

SEQ ID NO: 190044 - protein, 61 aa, Zea Mays
MVSCSPRSNMFYMWHEYHTEIYQFITCTGFLVWKDKGDFSVEMILVCVYTSYQSKNMRAYC

SEQ ID NO: 190045 - protein, 397 aa, Zea Mays
MAALSAKTIQNAFLAQHTRNRHGARYPSDFCSLNTRSMHSFQECRLAVADSSAKWLNTTSTLWTSFNKQAGISCNAAQGGTVVCSSEKVEFLKLQNGSDIRGVAVAGVEGEPVNLTEDVTKAIAAAFAAWLLNKKPDGLRRLRISVGHDSRISAHKLQNAVTHGITTAGHDILQFGLASTPAMFNSTLTEDERSHLPVDGAIMITASHLPYNRNGLKFFTSDGGLNKADIKDILERASKIYEESAHNNLKEQGEASKGVVTNVDYMSIYASDLVQAVRKSAGDKEKPLEELHIVVDAGNGAGGFFVDKVLKPLGAVTTGSQFLEPDGLFPNHIPNPEDKTAMKFITQAVLDNKADLGIIFDTDVDRSAAVDSRGRELNRNRLIALMAAIVLEEELQL

SEQ ID NO: 190046 - protein, 433 aa, Zea Mays
MFNSTLTEDERSHLPVDGAIMITASHLPYNRNGLKFFTSDGGLNKADIKDILERASKIYEESAHNNLKEQGEASKGVVTNVDYMSIYASDLVQAVRKSAGDKEKPLEELHIVVDAGNGAGGFFVDKVLKPLGAVTTGSQFLEPDGLFPNHIPNPEDKTAMKFITQAVLDNKADLGIIFDTDVDRSAAVDSRGRELNRNRLIALMAAIVLEEHPGTTVVTDSVTSDGLTVFIENKLGGKHHRFKRGYKNVIDEAIRLNSIGEESHLAMETSGHGALKENHWLDDGAYLMVKLLNKLAAARTLGSSIGSKVLTDLVEGLEEADVTVEIRLKIDQNHADLKGGSFRDYGESVLRHLENAISKDPNLRKAPVNHEGVRVSGYGGWFLLRLSLHDPVLPLNIEAQSNDDAIKLGLAVLAAVNEFPALDVTALNKFVHQ

SEQ ID NO: 190047 - protein, 263 aa, Zea Mays
MATARLPSRSFLSPAQQSYPRLPASVRLCLSHHEQPPTGPKRHRRAATSHPAFSAAARGRAKKIPIADTDEPAAGVRVTDRGISYRLDGAPFEFQYSYTEAPRARPVALREAPFMPFGPEATPRPWTGRKPLPKSRKELPEFDSFVLPAPGKKGVKPVQSPGPFLAGMEPRYQSVSREDILGEPLTKEEVSELVKGSLKSKRQLNMGRDGLTHNMLENIHSHWKRKRVCKIKCKGVCTIDMDNICHQLEGTSGASIGGSHESL

SEQ ID NO: 190048 - protein, 256 aa, Zea Mays
MATARLPSRSFLSPAQQSYPRLPASVRLCLSHHEQPPTGPKRHRRAATSHPAFSAAARGRAKKIPIADTDEPAAGVRVTDRGISYRLDGAPFEFQYSYTEAPRARPVALREAPFMPFGPEATPRPWTGRKPLPKSRKELPEFDSFVLPAPGKKGVKPVQSPGPFLAGMEPRYQSVSREDILGEPLTKEEVSELVKGSLKSKRQLNMGRDGLTHNMLENIHSHWKRKRVCKIKCKGVCTIDMDNICHQLEVLGSRAR

SEQ ID NO: 190049 - protein, 50 aa, Zea Mays
MLRCVRERSRSSSLSQLWVVGPFSPFDVIIYLFCIELLLYSKDVIFDHVP

SEQ ID NO: 190050 - protein, 72 aa, Zea Mays
MATAAAGLAPAKEVVEKKVELLKEIRAHEVAIAELDNLNPSRVSLFPSVSLPCLRRCTRKLATSSSVRASNR

SEQ ID NO: 190051 - protein, 255 aa, Zea Mays
MDLDRKIRRGRERLAHDSAVPMPIPGKIAEQLSAREEQVKKLLEQIEELGEAGKVDEAEALMKRVDILNAEKTALSNQADSKVAMLEKKMELCETCGSFLVADDALERTQSHVTGKQHIGYGMVRDFLVEYKAAIEKSKEEDRLAREQKAEERRKQRGKEYDNGGRDRDTRREKSGERDYDRDRQYERSRGRDRSYDYRERGSEHRSNLYRNGRDSERGGHRYRSGDMTNDRGRMRSRSRSPTRHGYGRSGSPNH

SEQ ID NO: 190052 - protein, 271 aa, Zea Mays
MQRFEAELAQQCEKLVMDLDRKIRRGRERLAHDSAVPMPIPGKIAEQLSAREEQVKKLLEQIEELGEAGKVDEAEALMKRVDILNAEKTALSNQADSKVAMLEKKMELCETCGSFLVADDALERTQSHVTGKQHIGYGMVRDFLVEYKAAIEKSKEEDRLAREQKAEERRKQRGKEYDNGGRDRDTRREKSGERDYDRDRQYERSRGRDRSYDYRERGSEHRSNLYRNGRDSERGGHRYRSGDMTNDRGRMRSRSRSPTRHGYGRSGSPNH

SEQ ID NO: 190053 - protein, 171 aa, Zea Mays
MLEKKMELCETCGSFLVADDALERTQSHVTGKQHIGYGMVRDFLVEYKAAIEKSKEEDRLAREQKAEERRKQRGKEYDNGGRDRDTRREKSGERDYDRDRQYERSRGRDRSYDYRERGSEHRSNLYRNGRDSERGGHRYRSGDMTNDRGRMRSRSRSPTRHGYGRSGSPNH

SEQ ID NO: 190054 - protein, 285 aa, Zea Mays
MIRSSRKALRNLPGMILICKGLRQSLHNNVMDLDRKIRRGRERLAHDSAVPMPIPGKIAEQLSAREEQVKKLLEQIEELGEAGKVDEAEALMKRVDILNAEKTALSNQADSKVAMLEKKMELCETCGSFLVADDALERTQSHVTGKQHIGYGMVRDFLVEYKAAIEKSKEEDRLAREQKAEERRKQRGKEYDNGGRDRDTRREKSGERDYDRDRQYERSRGRDRSYDYRERGSEHRSNLYRNGRDSERGGHRYRSGDMTNDRGRMRSRSRSPTRHGYGRSGSPNH

SEQ ID NO: 190055 - protein, 51 aa, Zea Mays
MVALLSRVVTPRIGPYGEVLRKNGLSPLKCHKNIIIIIITVSYHKYSHHVH

SEQ ID NO: 190056 - protein, 177 aa, Zea Mays
MESTGKAAISEQSSESSSASGADSSENANGSPEWRSFDMHSVIAATEDLFDFILSRKGWRVRVFLVQDIVNASDVFLQEATFPYVYAKVGKIGDLNPERSKMIRRLVNTVQSFRQAINLAPDAWSAMLIRTLLKPESQKFVLDVFLALANHSSYKIPETFWLFMSRFLNYLDKQDIL

SEQ ID NO: 190057 - protein, 370 aa, Zea Mays
MCFTVFRGLYCSLRQLLEEGFFHADPHPGNLVATEGGSLAYFDFGMMGDIPRHYRVGLIQMLVHYVNRDSLGLANDFHSLGFVPEGTDLLAVADALRFSFGDVRRQSNDFQGVMNHLYDVMYEFSFSLPPDYALVIRALGSLEGTAKALDPEFKVIESAYPFVIGRLLADPSPDMRKILRELLICDDGSIRWNRLERLIAAISEQSSESSSASGADSSENANGSPEWRSFDMHSVIAATEDLFDFILSRKGWRVRVFLVQDIVNASDVFLQEATFPYVYAKVGKIGDLNPERSKMIRRLVNTVQSFRQAINLAPDAWSAMLIRTLLKPESQKFVLDVFLALANHSSYKIPETFWLFMSRFLNYLDKQDIL

SEQ ID NO: 190058 - protein, 310 aa, Zea Mays
MFDEIDYILEGKNAERFATLYSHVDFLAGSSGVNSEASTSIKVPKVYWNYTCKTILTLEWIDGIKLTDAERISKANLNRKRMIDEGLYCSLRQLLEEGFFHADPHPGNLVATEGGSLAYFDFGMMGDIPRHYRVGLIQMLVHYVNRDSLGLANDFHSLGFVPEGTDLLAVADALRFSFGDVRRQSNDFQGVMNHLYDVMYEFSFSLPPDYALVIRALGSLEGTAKALDPEFKVIESAYPFVIGRLLADPSPDMRKILRELLICDDGSIRWNRLERLLYLNSHQNLQAHQELTPVRTPMEVLSGDHLICIL

SEQ ID NO: 190059 - protein, 155 aa, Zea Mays
MFDEIDYILEGKNAERFATLYSHGSSGVNSEASTSIKVPKVYWNYTCKTILTLEWIDGIKLTDAERISKANLNRKRMIDEGLYCSLRQLLEEGFFHADPHPGNLVATEGGSLAYFDFGMMGDIPRHYRVGLIQMLQMRCGFPLVMSGGNQMISRA

SEQ ID NO: 190060 - protein, 159 aa, Zea Mays
MFDEIDYILEGKNAERFATLYSHGSSGVNSEASTSIKVPKVYWNYTCKTILTLEWIDGIKLTDAERISKANLNRKRMIDEGLYCSLRQLLEEGFFHADPHPGNLVATEGGSLAYFDFGMMGDIPRHYRVGLIQMIYLQLQMRCGFPLVMSGGNQMISRA

SEQ ID NO: 190061 - protein, 198 aa, Zea Mays
MAPLLTLDALLFHMIGGQMKRFAKARKDLLVAVNEIVRHMFDEIDYILEGKNAERFATLYSHGSSGVNSEASTSIKVPKVYWNYTCKTILTLEWIDGIKLTDAERISKANLNRKRMIDEGLYCSLRQLLEEGFFHADPHPGNLVATEGGSLAYFDFGMMGDIPRHYRVGLIQMIYLQLQMRCGFPLVMSGGNQMISRA

SEQ ID NO: 190062 - protein, 225 aa, Zea Mays
MHSFDTSSNAAHLRSGELVAVKVQRPGMAPLLTLDALLFHMIGGQMKRFAKARKDLLVAVNEIVRHMFDEIDYILEGKNAERFATLYSHGSSGVNSEASTSIKVPKVYWNYTCKTILTLEWIDGIKLTDAERISKANLNRKRMIDEGLYCSLRQLLEEGFFHADPHPGNLVATEGGSLAYFDFGMMGDIPRHYRVGLIQMIYLQLQMRCGFPLVMSGGNQMISRA

SEQ ID NO: 190063 - protein, 344 aa, Zea Mays
MAPLLTLDALLFHMIGGQMKRFAKARKDLLVAVNEIVRHMFDEIDYILEGKNAERFATLYSHGSSGVNSEASTSIKVPKVYWNYTCKTILTLEWIDGIKLTDAERISKANLNRKRMIDEGLYCSLRQLLEEGFFHADPHPGNLVATEGGSLAYFDFGMMGDIPRHYRVGLIQMLVHYVNRDSLGLANDFHSLGFVPEGTDLLAVADALRFSFGDVRRQSNDFQGVMNHLYDVMYEFSFSLPPDYALVIRALGSLEGTAKALDPEFKVIESAYPFVIGRLLADPSPDMRKILRELLICDDGSIRWNRLERLLYLNSHQNLQAHQELTPVRTPMEVLSGDHLICIL

SEQ ID NO: 190064 - protein, 352 aa, Zea Mays
MHSFDTSSNAAHLRSGELVAVKVQRPGMAPLLTLDALLFHMIGGQMKRFAKARKDLLVAVNEIVRHMFDEIDYILEGKNAERFATLYSHGSSGVNSEASTSIKVPKVYWNYTCKTILTLEWIDGIKLTDAERISKANLNRKRMIDEGLYCSLRQLLEEGFFHADPHPGNLVATEGGSLAYFDFGMMGDIPRHYRVGLIQMLVHYVNRDSLGLANDFHSLGFVPEGTDLLAVADALRFSFGDVRRQSNDFQGVMNHLYDVMYEFSFSLPPDYALVIRALGSLEGTAKALDPEFKVIESAYPFVIGRLLADPSPDMRKILRELLICDDGSIRWNRLERLFHGPILSVNMITNLW

SEQ ID NO: 190065 - protein, 170 aa, Zea Mays
MASIIVQAVVILLDVIAFGLGVAAEQRRSRATVTPDAAKEYDYCVYDSDIATGYGVGALLLLAAAQGDLPHRGGVPAGGISTQRVPHPVQGRILRRVPLMRDGAEGRLRCWRGIYLLHGHPGRGILPQLLQIPRCRWWCWLQHWHGPLQLKELDRGRQAAPVFSTLLRGG

SEQ ID NO: 190066 - protein, 284 aa, Zea Mays
MEPQCNVGMFTRAELLEASVELRHHALGCVKSTALRCAVKLGVANAIQRRGGRASVEDLLTELSLDASRLRCLHSVMRALAALGVFKEGSDGEYGLTAISSLLVDDDSSVRGSLRPITLLYLEPAFVAPVLNLADWALAGVDGSDDDNNCSARGTAFKMTHGEDVWDVLARDAFLGDFFNGALASETRFLMDIAIRGSPQVFEGIASLVDAGGGTGAAAQAVAAAFPDTRCTVLELPQVVDAAPIDGPVRFVGGDMTKFIPPADAVLLKETPNMLNTYIHRGTR

SEQ ID NO: 190067 - protein, 150 aa, Zea Mays
MSFKLIFSSAIIFSAICFGPINILCTLPIYSWDCNCKACNSSHMCLVPAVVAMEQKIHVNPLKILSQTKCTHIQNSSSSCPNQLRRIRMPWILRGRSPPIARSLCKLMQMRQLPRLRLLTMTLSCKAHYPLCCPLMDPGPVVEAEESERP

SEQ ID NO: 190068 - protein, 143 aa, Zea Mays
MSFKLIFSSAIIFSAICFGPINILCTLPIYSWDCNCKACNSSHMCLVPAVVAMEQKIHVNPLKILSQTKCTHIQNSSSSCPNQLRRIRMPWILRGRSPPIARSLCKLMQMRQLPRLRLLVIIFISFFFTDLLLACLVKTFYWL

SEQ ID NO: 190069 - protein, 91 aa, Zea Mays
MEVLKSRLGLGTGDVLPRLIKDYRECRLVDRGPFNWPHASSWVSFVSVGPIPERPPHNVSGEMARIACTLRGKRLDGGVFVLSVGVNPFWS

SEQ ID NO: 190070 - protein, 579 aa, Zea Mays
MVHVKTGNAVVIVSVVILIGLFSMQHFGTDKVSWLFAPIVFVWFILIGVLGAVNISKYDQSVLKAFNPIYVYRYFKRGKTSWASLGGIMLSITGTEALFADLSYFPVQAIQIAFTVVVFPCLLLQYTGQAAYIAQNKDHVSHAFYFSLPDSVLWPSFIVATAAAIVASQATISMTYSIIKQALALGCFPRVRIIHTSKKYLGQIYSPDINWILLVFCIAVTAGFKNQSQIANAYGTAVIMVMLVTTFLMIPIMLLVWRSHWTLVILFTVLSLFVEIPYFTAVVRKIDQGGWVPLVFAVAFLIIMYVWHYGTLKRYEFEMHSKVSMAWILGLGPSLGLVRVPGVGLVYTELASGVPHIFSHFITNLPAIHSTLVFVCVKYLPVYTVPLDERFLVKRIGPKNFHMFRCVARYGYKDIHKKDDDFEQMLFDSLMLFVRLESMMEEYTDSDEYSTRETNLSGSANPRINGISAGSNMDLSYTSHDSIIQVQSPNYTGNSQAVSPGQLYHTVGDEIAFLNACRDAGVVHILGNTVIRARRDSGFIKKIAINYLYAFLRKICRENSAIFNVPHESLLNVGQVFYV

SEQ ID NO: 190071 - protein, 773 aa, Zea Mays
METTSTTNEQTDRGAMWELERNLDQPMDAEAGRLRNMYREKSYPTLVLLQLAFQSLGVVFGDLGTSPLYVFSNIFPHEIEDTEQIIGALSLVIYSLTLIPLVKYVFIVLRANDNGQGGTFALYSLLCRHAKINTIPNQHRTDEELTTYSRHTYDEKSLAAKIKRWLEGHQFRKNVILILVLFGTCMAVGDGILTPAISVLSATGGIQVEEKKMKNDAVVIVSVVILIGLFSMQHFGTDKVSWLFAPIVFVWFILIGVLGAVNISKYDQSVLKAFNPIYVYRYFKRGKTSWASLGGIMLSITGTEALFADLSYFPVQAIQYTGQAAYIAQNKDHVSHAFYFSLPDSVLWPSFIVATAAAIVASQATISMTYSIIKQALALGCFPRVRIIHTSKKYLGQIYSPDINWILLVFCIAVTAGFKNQSQIANAYGTAVIMVMLVTTFLMIPIMLLVWRSHWTLVILFTVLSLFVEIPYFTAVVRKIDQGGWVPLVFAVAFLIIMYVWHYGTLKRYEFEMHSKVSMAWILGLGPSLGLVRVPGVGLVYTELASGVPHIFSHFITNLPAIHSTLVFVCVKYLPVYTVPLDERFLVKRIGPKNFHMFRCVARYGYKDIHKKDDDFEQMLFDSLMLFVRLESMMEEYTDSDEYSTRETNLSGSANPRINGISAGSNMDLSYTSHDSIIQVQSPNYTGNSQAVSPGQLYHTVGDEIAFLNACRDAGVVHILGNTVIRARRDSGFIKKIAINYLYAFLRKICRENSAIFNVPHESLLNVGQVFYV

SEQ ID NO: 190072 - protein, 423 aa, Zea Mays
MADHDDAAVLSDVDEDLLPSSSPSISSASSHKTLPQAQPLPQSDAQAQQQRLLALAAELEEERRLRHAAEASIAGAESRVARYKAFAQDVLRKSDALTAEAADSARSLAALQAEATTASSMLSSGFERISAKASPSAAAAPLPTSQKYSSGLPALAYGVLKRANDIVDDLLAQINAANRDRDRAREQMEHRNYQIAIEVSELEASLASRSAEGESLSKSLSQREAEISELRDKITSLEGKLDAQRPVLAEQIECTSKLYHEMRQVVKLVDAEAASALSDSVFVWKESDVEESLKVSLEGTKLAYELAAMALEKVGACINDKESKLMRLEDRVDELIKEKEHISVLLRSALQATTSEVLKVAEDGLREAGIEIGLDERKVHGPGNVEKDEVYTLAGALENTMKESQVRIIELQHLVEALRIWFT

SEQ ID NO: 190073 - protein, 707 aa, Zea Mays
MVETLKSWRKRWLSCGDTENLFRDNPSNQMQGVMQLKATNSGMPMKVAQRIDVSKFMSYIKVSRTQLNHIKRLKQSGDGIQTKHVSRVIGGLDKSHVKPYGALLEDEQRRLREHWLEMSCNDLPAAFEVLRERKVLMEKSIKLLGLELQQKNVSVLRKADQLTDIMKGLGQPGASENDGTPVFQNDQVECSPQSILQGGHVQSTSLHHQDDEQSVYHIHRMNVEDHDLMVVRGIDITSQSEKNSDVPDQSRNGISCVDKGIYCCANNPDKQSDVLMDIKLCKGGLVVYNPDCKNTQLEDLDGVSYKGPSVHACDQDQDLESIGHAVVNHNCHNSPNISSEMSHPTTNAVIDQETENVMEPSCSSSQLPKSSGEQMHVEDFLYLNDQAAKFEKVSGQLAGPLGPPENMMYNDSGDLQIKQTYLSSGQHFSSVYLNNGILSHQQPQLATPAFALDNPASFIEPFSNLQSNRQPETEKDIGAVFYPFRHATNIKQSASLHCLVNKGLAQSASFPRLLQERHQLIDQSDSDLYAQPHEDYCTDVSCPTKVNLHISEQHSYTAFASMDHRYNWFPEGCQSHNNNDNLLGLQSGNFLPQALPSGSSTDGALFSTASQYNQPSVHMGHGGSNRSQLIEPRNQFGPPQNFLSKSQDTNPMFPDMYGFTQNIASGTSSQVAPIGSLDCSHWTNFIQQNSGMPSDFTNRPSRGPWTR

SEQ ID NO: 190074 - protein, 896 aa, Zea Mays
MTCRMTASKQNKRQTNCTNSEQCRPGKKAKFDTSHCLVSLKPHISLKWDQYLRKVVPEKEQVGILWSDLAPFMESQKHCSGLADVMYVPPEIFSLKSLKGVLSYEAWSTSLTEAERKFLIQFLPSETDAEENVKLLLTGQNHHFGNPFLSWSSSLCYGDIHPDALLNKEKHIKKDEKAYHVNLLNYHSNMVETLKSWRKRWLSCGDTENLFRDNPSNQMQGVMQLKATNSGMPMKVAQRIDVSKFMSYIKVSRTQLNHIKRLKQSGDGIQTKHVSRVIGGLDKSHVKPYGALLEDEQRRLREHWLEMSCNDLPAAFEVLRERKVLMEKSIKLLGLELQQKNVSVLRKADQLTDIMKGLGQPGASENDGTPVFQNDQVECSPQSILQGGHVQSTSLHHQDDEQSVYHIHRMNVEDHDLMVVRGIDITSQSEKNSDVPDQSRNGISCVDKGIYCCANNPDKQSDVLMDIKLCKGGLVVYNPDCKNTQLEDLDGVSYKGPSVHACDQDQDLESIGHAVVNHNCHNSPNISSEMSHPTTNAVIDQETENVMEPSCSSSQLPKSSGEQMHVEDFLYLNDQAAKFEKVSGQLAGPLGPPENMMYNDSGDLQIKQTYLSSGQHFSSVYLNNGILSHQQPQLATPAFALDNPASFIEPFSNLQSNRQPETEKDIGAVFYPFRHATNIKQSASLHCLVNKGLAQSASFPRLLQERHQLIDQSDSDLYAQPHEDYCTDVSCPTKVNLHISEQHSYTAFASMDHRYNWFPEGCQSHNNNDNLLGLQSGNFLPQALPSGSSTDGALFSTASQYNQPSVHMGHGGSNRSQLIEPRNQFGPPQNFLSKSQDTNPMFPDMYGFTQNIASGTSSQVAPIGSLDCSHWTNFIQQNSGMPSDFTNRPSRGPWTR

SEQ ID NO: 190075 - protein, 729 aa, Zea Mays
MTCRMTASKQNKRQTNCTNSEQCRPGKKAKFDTSHCLVSLKPHISLKWDQYLRKVVPEKEQVGILWSDLAPFMESQKHCSGLADVMYVPPEIFSLKSLKGVLSYEAWSTSLTEAERKFLIQFLPSETDAEENVKLLLTGQNHHFGNPFLSWSSSLCYGDIHPDALLNKEKHIKKDEKAYHVNLLNYHSNMVETLKSWRKRWLSCGDTENLFRDNPSNQMQGVMQLKATNSGMPMKVAQRIDVSKFMSYIKVSRTQLNHIKRLKQSGDGIQTKHVSRVIGGLDKSHVKPYGALLEDEQRRLREHWLEMSCNDLPAAFEVLRERKVLMEKSIKLLGLELQQKNVSVLRKADQLTDIMKGLGQPGASENDGTPVFQNDQVECSPQSILQGGHVQSTSLHHQDDEQSVYHIHRMNVEDHDLMVVRGIDITSQSEKNSDVPDQSRNGISCVDKGIYCCANNPDKQSDVLMDIKLCKGGLVVYNPDCKNTQLEDLDGVSYKGPSVHACDQDQDLESIGHAVVNHNCHNSPNISSEMSHPTTNAVIDQETENVMEPSCSSSQLPKSSGEQMHVEDFLYLNDQAAKFEKVSGQLAGPLGPPENMMYNDSGDLQIKQTYLSSGQHFSSVYLNNGILSHQQPQLATPAFALDNPASFIEPFSNLQSNRQPETEKDIGAVFYPFRHATNIKQSASLHCLVNKGLAQSASFPRLLQERHQLIDQSDSDLYAQPHEDYCTDV

SEQ ID NO: 190076 - protein, 914 aa, Zea Mays
MSWHSRSVHQSHRQLNDQMTCRMTASKQNKRQTNCTNSEQCRPGKKAKFDTSHCLVSLKPHISLKWDQYLRKVVPEKEQVGILWSDLAPFMESQKHCSGLADVMYVPPEIFSLKSLKGVLSYEAWSTSLTEAERKFLIQFLPSETDAEENVKLLLTGQNHHFGNPFLSWSSSLCYGDIHPDALLNKEKHIKKDEKAYHVNLLNYHSNMVETLKSWRKRWLSCGDTENLFRDNPSNQMQGVMQLKATNSGMPMKVAQRIDVSKFMSYIKVSRTQLNHIKRLKQSGDGIQTKHVSRVIGGLDKSHVKPYGALLEDEQRRLREHWLEMSCNDLPAAFEVLRERKVLMEKSIKLLGLELQQKNVSVLRKADQLTDIMKGLGQPGASENDGTPVFQNDQVECSPQSILQGGHVQSTSLHHQDDEQSVYHIHRMNVEDHDLMVVRGIDITSQSEKNSDVPDQSRNGISCVDKGIYCCANNPDKQSDVLMDIKLCKGGLVVYNPDCKNTQLEDLDGVSYKGPSVHACDQDQDLESIGHAVVNHNCHNSPNISSEMSHPTTNAVIDQETENVMEPSCSSSQLPKSSGEQMHVEDFLYLNDQAAKFEKVSGQLAGPLGPPENMMYNDSGDLQIKQTYLSSGQHFSSVYLNNGILSHQQPQLATPAFALDNPASFIEPFSNLQSNRQPETEKDIGAVFYPFRHATNIKQSASLHCLVNKGLAQSASFPRLLQERHQLIDQSDSDLYAQPHEDYCTDVSCPTKVNLHISEQHSYTAFASMDHRYNWFPEGCQSHNNNDNLLGLQSGNFLPQALPSGSSTDGALFSTASQYNQPSVHMGHGGSNRSQLIEPRNQFGPPQNFLSKSQDTNPMFPDMYGFTQNIASGTSSQVAPIGSLDCSHWTNFIQQNSGMPSDFTNRPSRGPWTR

SEQ ID NO: 190077 - protein, 498 aa, Zea Mays
MPRTRFPQSRNWKYQHEQPVKMRKIDPIMTADGMPIEEMNEDYLCAKLHLVDLAGSERAKRTGSDGLRFKEGVHINRGLLALGNVISALGDEKKRKEGAHVPYRDSKLTRLLQDSLGGNSKTVMIACISPADINAEETLNTLKYANRARNIQNKPIVNRNPIADEMKRMRQQIEYLQAELVSARGGATSDDVQGLRERISWLEQTNEDLCRELYDSRNRSQNDPCEPEIQRTLNGFTKSEGLKRSLQSTDPFDVPMADSVRGNPKDIEDEVAKEWEHTMLQDSMGKELNELNRQLERKESEMKMYGCDTVALKQHFGKKLMELEEEKKAVQQERDRLLAEVESLSADGQTHKLRDAQLQKLKSLEAQILDLKKKHENQIQILKEKQKSDEAAKKLQEEIHFIKAQKVQLQHKIKQEAEQFRQWKATREKELLQLRKEGRRNEYERHKLQALNQRQKLVLQRKTEEAAMATKRLKEILEARKSSARDSSGWQQWYISRL

SEQ ID NO: 190078 - protein, 815 aa, Zea Mays
MPRTRFPQSRNWKYQHEQPVKMRKIDPIMTADGMPIEEMNEDYLCAKLHLVDLAGSERAKRTGSDGLRFKEGVHINRGLLALGNVISALGDEKKRKEGAHVPYRDSKLTRLLQDSLGGNSKTVMIACISPADINAEETLNTLKYANRARNIQNKPIVNRNPIADEMKRMRQQIEYLQAELVSARGGATSDDVQGLRERISWLEQTNEDLCRELYDSRNRSQNDPCEPEIQRTLNGFTKSEGLKRSLQSTDPFDVPMADSVRGNPKDIEDEVAKEWEHTMLQDSMGKELNELNRQLERKESEMKMYGCDTVALKQHFGKKLMELEEEKKAVQQERDRLLAEVESLSADGQTHKLRDAQLQKLKSLEAQILDLKKKHENQIQILKEKQKSDEAAKKLQEEIHFIKAQKVQLQHKIKQEAEQFRQWKATREKELLQLRKEGRRNEYERHKLQALNQRQKLVLQRKTEEAAMATKRLKEILEARKSSARDSSVIPKAILDITQMGERSLQKWFDQELEVMVHVHEVRNEYEKQSQLRAALGEELAILKQEDIRAGGSSPQRGKNGNSRTNTLSPNARQARIASLESMVTISSNTLVAMASQLSEAEERERAFSGRSRWNQLRSMGEAKSLLQYVFNVAADARCQVKEKEVEIKEMKEQMTELVGILRHSESRRREMEKQLKQREQTTPMATTPPKSGNGTTKHSADDPNTPLSPVAVPAQKQLKYSAGIVNSPSKGVAAIKKEQLKMVPIAQLSAGKRVSIAGHSGKLWRWKRSHHQWLMQFKWKWQKPWKLSEVIRHSDETITRIRPRPPLLPHKPHN

SEQ ID NO: 190079 - protein, 775 aa, Zea Mays
MPIEEMNEDYLCAKLHLVDLAGSERAKRTGSDGLRFKEGVHINRGLLALGNVISALGDEKKRKEGAHVPYRDSKLTRLLQDSLGGNSKTVMIACISPADINAEETLNTLKYANRARNIQNKPIVNRNPIADEMKRMRQQIEYLQAELVSARGGATSDDVQGLRERISWLEQTNEDLCRELYDSRNRSQNDPCEPEIQRTLNGFTKSEGLKRSLQSTDPFDVPMADSVRGNPKDIEDEVAKEWEHTMLQDSMGKELNELNRQLERKESEMKMYGCDTVALKQHFGKKLMELEEEKKAVQQERDRLLAEVESLSADGQTHKLRDAQLQKLKSLEAQILDLKKKHENQIQILKEKQKSDEAAKKLQEEIHFIKAQKVQLQHKIKQEAEQFRQWKATREKELLQLRKEGRRNEYERHKLQALNQRQKLVLQRKTEEAAMATKRLKEILEARKSSARDSSAGSNGTSQGYNMGERSLQKWFDQELEVMVHVHEVRNERAALGEELAILKQEDIRAGGSSPQRGKNGNSRTNTLSPNARQARIASLESMVTISSNTLVAMASQLSEAEERERAFSGRSRWNQLRSMGEAKSLLQYVFNVAADARCQVKEKEVEIKEMKEQMTELVGILRHSESRRREMEKQLKQREQTTPMATTPPKSGNGTTKHSADDPNTPLSPVAVPAQKQLKYSAGIVNSPSKGVAAIKKEQLKMVPIAQLSAGKRVSIAGHSGKLWRWKRSHHQWLMQFKWKWQKPWKLSEVIRHSDETITRIRPRPPLLPHKPHN

SEQ ID NO: 190080 - protein, 1025 aa, Zea Mays
MTMEHGEDCCVKVAVHARPLIGDEKLQGCKDCVAVVPGKPQVQIGSHSFTFDHVYGSTGTPSAAMFDECVAPLVDGLFQGYNATVLAYGQTGSGKTYTMGTACKEGSHIGIIPRAMAALFDKIENLKTQVEFQLRVSFIEILKEEVRDLLDPTAGTVGKAENGNGHAKLSVPGKPPVQIREASNGVITLAGSTEVHVTTQKEMAACLEQGSLSRATGSTNMNNQSSRSHAIFTITLEQMRKIDPIMTADGMPIEEMNEDYLCAKLHLVDLAGSERAKRTGSDGLRFKEGVHINRGLLALGNVISALGDEKKRKEGAHVPYRDSKLTRLLQDSLGGNSKTVMIACISPADINAEETLNTLKYANRARNIQNKPIVNRNPIADEMKRMRQQIEYLQAELVSARGGATSDDVQGLRERISWLEQTNEDLCRELYDSRNRSQNDPCEPEIQRTLNGFTKSEGLKRSLQSTDPFDVPMADSVRGNPKDIEDEVAKEWEHTMLQDSMGKELNELNRQLERKESEMKMYGCDTVALKQHFGKKLMELEEEKKAVQQERDRLLAEVESLSADGQTHKLRDAQLQKLKSLEAQILDLKKKHENQIQILKEKQKSDEAAKKLQEEIHFIKAQKVQLQHKIKQEAEQFRQWKATREKELLQLRKEGRRNEYERHKLQALNQRQKLVLQRKTEEAAMATKRLKEILEARKSSARDSSVIPKAILDITQMGERSLQKWFDQELEVMVHVHEVRNERAALGEELAILKQEDIRAGGSSPQRGKNGNSRTNTLSPNARQARIASLESMVTISSNTLVAMASQLSEAEERERAFSGRSRWNQLRSMGEAKSLLQYVFNVAADARCQVKEKEVEIKEMKEQMTELVGILRHSESRRREMEKQLKQREQTTPMATTPPKSGNGTTKHSADDPNTPLSPVAVPAQKQLKYSAGIVNSPSKGVAAIKKEQLKMVPIAQLSAGKRVSIAGHSGKLWRWKRSHHQWLMQFKWKWQKPWKLSEVIRHSDETITRIRPRPPLLPHKPHN

SEQ ID NO: 190081 - protein, 934 aa, Zea Mays
MGTACKEGSHIGIIPRAMAALFDKIENLKTQVEFQLRVSFIEILKEEVRDLLDPTAGTVGKAENGNGHAKLSVPGKPPVQIREASNGVITLAGSTEVHVTTQKEMAACLEQGSLSRATGSTNMNNQSSRSHAIFTITLEQMRKIDPIMTADGMPIEEMNEDYLCAKLHLVDLAGSERAKRTGSDGLRFKEGVHINRGLLALGNVISALGDEKKRKEGAHVPYRDSKLTRLLQDSLGGNSKTVMIACISPADINAEETLNTLKYANRARNIQNKPIVNRNPIADEMKRMRQQIEYLQAELVSARGGATSDDVQGLRERISWLEQTNEDLCRELYDSRNRSQNDPCEPEIQRTLNGFTKSEGLKRSLQSTDPFDVPMADSVRGNPKDIEDEVAKEWEHTMLQDSMGKELNELNRQLERKESEMKMYGCDTVALKQHFGKKLMELEEEKKAVQQERDRLLAEVESLSADGQTHKLRDAQLQKLKSLEAQILDLKKKHENQIQILKEKQKSDEAAKKLQEEIHFIKAQKVQLQHKIKQEAEQFRQWKATREKELLQLRKEGRRNEYERHKLQALNQRQKLVLQRKTEEAAMATKRLKEILEARKSSARDSSAGSNGTSQGYNMGERSLQKWFDQELEVMVHVHEVRNEYEKQSQLRAALGEELAILKQEDIRAGGSSPQRGKNGNSRTNTLSPNARQARIASLESMVTISSNTLVAMASQLSEAEERERAFSGRSRWNQLRSMGEAKSLLQYVFNVAADARCQVKEKEVEIKEMKEQMTELVGILRHSESRRREMEKQLKQREQTTPMATTPPKSGNGTTKHSADDPNTPLSPVAVPAQKQLKYSAGIVNSPSKGVAAIKKEQLKMVPIAQLSAGKRVSIAGHSGKLWRWKRSHHQWLMQFKWKWQKPWKLSEVIRHSDETITRIRPRPPLLPHKPHN

SEQ ID NO: 190082 - protein, 669 aa, Zea Mays
MLTGHVISKTSRLNPIADEMKRMRQQIEYLQAELVSARGGATSDDVQGLRERISWLEQTNEDLCRELYDSRNRSQNDPCEPEIQRTLNGFTKSEGLKRSLQSTDPFDVPMADSVRGNPKDIEDEVAKEWEHTMLQDSMGKELNELNRQLERKESEMKMYGCDTVALKQHFGKKLMELEEEKKAVQQERDRLLAEVESLSADGQTHKLRDAQLQKLKSLEAQILDLKKKHENQIQILKEKQKSDEAAKKLQEEIHFIKAQKVQLQHKIKQEAEQFRQWKATREKELLQLRKEGRRNEYERHKLQALNQRQKLVLQRKTEEAAMATKRLKEILEARKSSARDSSAGSNGTSQGYNMGERSLQKWFDQELEVMVHVHEVRNEYEKQSQLRAALGEELAILKQEDIRAGGSSPQRGKNGNSRTNTLSPNARQARIASLESMVTISSNTLVAMASQLSEAEERERAFSGRSRWNQLRSMGEAKSLLQYVFNVAADARCQVKEKEVEIKEMKEQMTELVGILRHSESRRREMEKQLKQREQTTPMATTPPKSGNGTTKHSADDPNTPLSPVAVPAQKQLKYSAGIVNSPSKGVAAIKKEQLKMVPIAQLSAGKRVSIAGHSGKLWRWKRSHHQWLMQFKWKWQKPWKLSEVIRHSDETITRIRPRPPLLPHKPHN

SEQ ID NO: 190083 - protein, 983 aa, Zea Mays
MTMEHGEDCCVKVAVHARPLIGDEKLQGCKDCVAVVPGKPQTGSGKTYTMGTACKEGSHIGIIPRAMAALFDKIENLKTQVEFQLRVSFIEILKEEVRDLLDPTAGTVGKAENGNGHAKLSVPGKPPVQIREASNGVITLAGSTEVHVTTQKEMAACLEQGSLSRATGSTNMNNQSSRSHAIFTITLEQMRKIDPIMTADGMPIEEMNEDYLCAKLHLVDLAGSERAKRTGSDGLRFKEGVHINRGLLALGNVISALGDEKKRKEGAHVPYRDSKLTRLLQDSLGGNSKTVMIACISPADINAEETLNTLKYANRARNIQNKPIVNRNPIADEMKRMRQQIEYLQAELVSARGGATSDDVQGLRERISWLEQTNEDLCRELYDSRNRSQNDPCEPEIQRTLNGFTKSEGLKRSLQSTDPFDVPMADSVRGNPKDIEDEVAKEWEHTMLQDSMGKELNELNRQLERKESEMKMYGCDTVALKQHFGKKLMELEEEKKAVQQERDRLLAEVESLSADGQTHKLRDAQLQKLKSLEAQILDLKKKHENQIQILKEKQKSDEAAKKLQEEIHFIKAQKVQLQHKIKQEAEQFRQWKATREKELLQLRKEGRRNEYERHKLQALNQRQKLVLQRKTEEAAMATKRLKEILEARKSSARDSSVIPKAILDITQMGERSLQKWFDQELEVMVHVHEVRNEYEKQSQLRAALGEELAILKQEDIRAGGSSPQRGKNGNSRTNTLSPNARQARIASLESMVTISSNTLVAMASQLSEAEERERAFSGRSRWNQLRSMGEAKSLLQYVFNVAADARCQVKEKEVEIKEMKEQMTELVGILRHSESRRREMEKQLKQREQTTPMATTPPKSGNGTTKHSADDPNTPLSPVAVPAQKQLKYSAGIVNSPSKGVAAIKKEQLKMVPIAQLSAGKRVSIAGHSGKLWRWKRSHHQWLMQFKWKWQKPWKLSEVIRHSDETITRIRPRPPLLPHKPHN

SEQ ID NO: 190084 - protein, 311 aa, Zea Mays
MATVACLRCSLGHLPPPVSHPCSSRLAARSSSFSARRLSPPVSVPSARSVLPGARSSAPTARSSSSRGSSSAGSAKSNLPGTSLSVRPWSSPSSDRDPLYSSSTSPMAPRPTSSTLRVSLRPVRISPKLLPSLCSVPTARPCASSTSSTFPLRRADLPRARPALGFHLPARASFSSAACSSLPVPKPSARSFASWPLLRYLHGPARHGRRSLARLPISLNLLSVFPAPFVAVQALELPRGDFPCRSPAHLSVFPWPRARLLGAEIPGELALPCTAFLPGSHAIRVPSLLFLPISFELAELFPLYGAQPAAP

SEQ ID NO: 190085 - protein, 75 aa, Zea Mays
MRARNALLHVENEEKLDVVEASQNIVSSIYRNVLRRLGAFMLVNLPKKKGVLRLQMLLVCLHCNRNSSQLNMLTC

SEQ ID NO: 190086 - protein, 84 aa, Zea Mays
MDSLSEMAQQGEFLIGLLNELACWALAPGAESFFRSLLLGRIWMRSLFECSKSENQAVFLLSTGMSSGGLEPSCWSIFPRRKVY

SEQ ID NO: 190087 - protein, 215 aa, Zea Mays
MSTPVHHIHMGGGAKTPPWSSSPSLRHWPQLLKPSCVATPAPNVPLLPHCSLQLLRSPCLPSLRTHHLPTIISPLGHEGGPKHSSSSTPSQGPSSTHLCSCSALTTAGKTHSVHLLPDGMVMSFYLFVALDSVCRGHRPPRLIHQVQVLFGHPVCCQCPSGRTGERVWRDDAGPGRLEGESKQQLLGCLMQLHQSKGASRVQKHSGICQGRRAPD

SEQ ID NO: 190088 - protein, 132 aa, Zea Mays
MALAPCLLAAPHHLPIRALAGRHPSSASRSATPSRCFPWTPELQGRTSVSMADQQTSMDELSSTFLSYGAPAPMDEAPVCRSPLCSMAEGPFPSTLLAWAGCGCSAPPYQPSPSSATPPRPCDSSRCSTKCL

SEQ ID NO: 190089 - protein, 513 aa, Zea Mays
MPLWATKHEQSTLQSLEQLLDTAGNCDPLCSADEVSSQYFEANYKPKNDLLKALTIIGTALTGAAAINHSWVAANQDIAMVLVFAIGYAGIVFEESLAFNKSGVALLMAVCLWVIRGIGAPSTDVAVQELSQSTSEVSEIVFFLLGAMTIVEIVDAHQGFKLVTDNISTRNPKTLLWVIGIVTFFLSSILDNLTSTIVMVSLLRKLVPPSEYRKLLGAVVVIAANAGGAWTPIGDVTTTMLWIHGQITTLKIMQGLFIPSTVSLAVPLALMSLTSEANGSSEKSSSLLSSEQVAPRGQLVLGVGIGALMFVPVFKALTGLPPFMGMLLGLGILWILTDAIHYGDSERQRLKVPQALSRIDTQGILFFLGILLSVGSLESAGILRQLANYLDANIPNADLIASAIGVASAIIDNVPLVAATMGMYDLTSFPQDSDFWQLVAFCAGTGGSMLIIGSAAGVAFMGVEKVDFFWYFRKVSGFAFAGYAAGIISYLAVQNLHLSLPTSLVEIPFISGS

SEQ ID NO: 190090 - protein, 406 aa, Zea Mays
MAVCLWVIRGIGAPSTDVAVQELSQSTSEVSEIVFFLLGAMTIVEIVDAHQGFKLVTDNISTRNPKTLLWVIGIVTFFLSSILDNLTSTIVMVSLLRKLVPPSEYRKLLGAVVVIAANAGGAWTPIGDVTTTMLWIHGQITTLKIMQGLFIPSTVSLAVPLALMSLTSEANGSSEKSSSLLSSEQVAPRGQLVLGVGIGALMFVPVFKALTGLPPFMGMLLGLGILWILTDAIHYGDSERQRLKVPQALSRIDTQGILFFLGILLSVGSLESAGILRQLANYLDANIPNADLIASAIGVASAIIDNVPLVAATMGMYDLTSFPQDSDFWQLVAFCAGTGGSMLIIGSAAGVAFMGVEKVDFFWYFRKVSGFAFAGYAAGIISYLAVQNLHLSLPTSLVEIPFISGS

SEQ ID NO: 190091 - protein, 315 aa, Zea Mays
MVSLLRKLVPPSEYRKLLGAVVVIAANAGGAWTPIGDVTTTMLWIHGQITTLKIMQGLFIPSTVSLAVPLALMSLTSEANGSSEKSSSLLSSEQVAPRGQLVLGVGIGALMFVPVFKALTGLPPFMGMLLGLGILWILTDAIHYGDSERQRLKVPQALSRIDTQGILFFLGILLSVGSLESAGILRQLANYLDANIPNADLIASAIGVASAIIDNVPLVAATMGMYDLTSFPQDSDFWQLVAFCAGTGGSMLIIGSAAGVAFMGVEKVDFFWYFRKVSGFAFAGYAAGIISYLAVQNLHLSLPTSLVEIPFISGS

SEQ ID NO: 190092 - protein, 361 aa, Zea Mays
MALSCYLLAGARAAASPSFSSSAAIRRRDHRLLTLSVVPLSLSQRCRHGLRVCCASSTSSSSPPPATPEEPDDYELLDTAGNCDPLCSADEVSSQYFEANYKPKNDLLKALTIIGTALTGAAAINHSWVAANQDIAMVLVFAIGYAGIVFEESLAFNKSGVALLMAVCLWVIRGIGAPSTDVAVQELSQSTSEVSEIVFFLLGAMTIVEIVDAHQGFKLVTDNISTRNPKTLLWVIGIVTFFLSSILDNLTSTIVMVSLLRKLVPPSEYRKLLGAVVVIAANAGGAWTPIGDVTTTMLWIHGQITTLKIMQGLFIPSTVSLAVPLALMSLTSEANGSSEKSSSLLSSEQMQYITETLKGSG

SEQ ID NO: 190093 - protein, 207 aa, Zea Mays
MTSVTQNQFDFMPGRSSMEAIFLLRQLMERFREQKKDLHMVFIDLEKAYDKVRRSVMWWALEKHKVSTKYINLIKDMYINVVTSVRTSDGDTDDFSINIGLHQGSALSPYLFALVIDEVTRDIQGDIPWCMLFADDVVLIEESRSGVPQKLELWRQTLEAKDFRLSRSKTEYMKYDFSAMGYEDGDVSLDGQVVPKKDTFRYLGSML

SEQ ID NO: 190094 - protein, 95 aa, Zea Mays
MDILYGRLEIGAAPGKRSMTNSTSISGGILGNSSRKTSGKSLTTRMLSPTNFSSTKNAASLMVVVTATSTSNLCPLELVSSTVPLAQCIYCLCLS

SEQ ID NO: 190095 - protein, 380 aa, Zea Mays
MVLNEQGPGRHPLSDAPSLDLEPVISEQGSGRRILSGVLHRRPCVVENEQGSLHLPRRVRRVRKLVEPTRVRVGSWNVGSLTGKLREIVDVAVRRRVNILCVQETKWKGQKAKEVEGTGFKLWYTRTATNKNGVGVLIDKSLKDGVVDVKRLGDRIILVKLVIGDLVLNVISAYAPQVGLNENSKREFWEGLEDMVSSVPVGEKLFIGGDLNGHVGTSSTSFEGVHGGFSFGTRNQEGEEILNFALAYDMFIANTFFRKRKSHLVTFSSGQCTSQIDFVLLRKEDMHACLDCKVIPGECVVTQHKLVVADFRFKIRLQRNKHNKVTRTKWWKLKGDVAQTFKERVIEEGPWAEEGDTNIMWRKMATCIRKITSEEFGLSQ

SEQ ID NO: 190096 - protein, 302 aa, Zea Mays
MSQKVTDGRIRRARGKKLRLFVEKEVSAIRHGYQSARIPFDEEAQIDMAMRNSLRDSFSTLEHDSCSPFDKSTGSASGAASCSTGKQSRLSRYYKNTQDTSRGPFDIDLARSRTQVQPHIDVMLERGHKEKLGIALAKKFHANDIPGRKADCPYFRSALKLAQQLGDGVPIPRGREIDGPLLDMNYANMVAHMAKFKEDWKDYGVTVMCDSCTGPTMMSIINFMIFCNGRMFFHKSVNATGLIQNSDYIYGVISEVVADIGIKHVVQIITNNGSNYKKACLDFTTKYPHCNALNLGVEFFLL

SEQ ID NO: 190097 - protein, 106 aa, Zea Mays
MDRQLRTQVLSRWKLLSRSSLKASCALDHFYLPNNVHVNHYDLYSFILMEPNRSPQFGYLYTLFTTELLGSTYYCFMWFWVLRYTLFMIMLLLSICYLLFMTRSLC

SEQ ID NO: 190098 - protein, 107 aa, Zea Mays
MSQMPRDKRVEFMRGLPPIFAHSADPMDAEDWLHTVERELHTAQCKDREKVLYGPRLLTGAAQSWWESYLATHANPEAITWEKFRENFCRYHVPEGLMIVKKGSSWH

SEQ ID NO: 190099 - protein, 165 aa, Zea Mays
MPRKRLAWMKNGQWHYKVSAKDELVPGDILFLPVNIQESSVTEKTKKFGNKNEIDFLRDLEIYKDRAIIVLNKPPGMPVQVHRLDRDCSGVLVLGRTQFSASLMHAIFREKTADALGDGTQQVLQRKYVALVIGRPRHPKGLLSAPLAKNQGNMFDLPLGYGKAI

SEQ ID NO: 190100 - protein, 362 aa, Zea Mays
MAIRMPALIFRRRAAAAAPKPIQQYLAGLSTAVEHVIPEDNGHIAGGEENKKRWVELPPFAPLDANATARAISRGDGGEGACSNATAIRWVRHCCPHVPASLVQKLFRLRKVKKNLVTADTSSTDSITLQLRLRRVSAKDELVPGDILFLPVNIQESSVTEKTKKFGNKNEIDFLRDLEIYKDRAIIVLNKPPGMPVQVHRLDRDCSGVLVLGRTQFSASLMHAIFREKTADALGDGTQQVLQRKYVALVIGRPRHPKGLLSAPLAKVVLQDGRSERLTVCAGSNTASVQDALTEYRVIESFPQAPSPLCGGSGNTHRWGLQVWTPSTPELDASPHATNNRQGNAEEEEASLWSYFGRWKRS

SEQ ID NO: 190101 - protein, 89 aa, Zea Mays
MAIRMPALIFRRRAAAAAPKPIQQYLAGLSTAVEHVIPEDNGHIAGGEENKKRWVELPPFAPLDANATARAISRGDGGEGACSNATAIR

SEQ ID NO: 190102 - protein, 92 aa, Zea Mays
MPRKRLAWMKNGQWHYKVSAKDELVPGDILFLPVNIQESSVTEKTKKFGNKNEIDFLRDLEIYKDRAIIVLNKPPGMPVQGGVGIKNSIDIL

SEQ ID NO: 190103 - protein, 210 aa, Zea Mays
MAIRMPALIFRRRAAAAAPKPIQQYLAGLSTAVEHVIPEDNGHIAGGEENKKRWVELPPFAPLDANATARAISRGDGGEGACSNATAIRWVRHCCPHVPASLVQKLFRLRKVKKNLVTADTSSTDSITLQLRLRRVSAKDELVPGDILFLPVNIQESSVTEKTKKFGNKNEIDFLRDLEIYKDRAIIVLNKPPGMPVQGGVGIKNSIDIL

SEQ ID NO: 190104 - protein, 156 aa, Zea Mays
MGHRGPSRGEPVPGVTGQNCCFNSSRIDYYLEYEPHPSSTKNLRHLFQMIRKGSFAKYDYGWWGNLRRYGQLRPPSFDLSSIPESLPIWMGYGGLDALADVTDVERTIKELRSTPELLYIGGYGHIDFIMSVKAKEDVYVDLMRFLRAQQGMHSSY

SEQ ID NO: 190105 - protein, 288 aa, Zea Mays
MVVDLGVDAGSKSWRMQQHQRWQLFWDWSWQDLAEYDVLAMLSYVYTVAQSKILYVGHSQGTIMGLAAFTMPETVKMISSAALLCPISYLDHVSASFVLRAVAMHLDEMLVIMGIHQLNFRSDMGVQILDSLCDDEHLDCNDLLSSITGQNCCFNSSRIDYYLEYEPHPSSTKNLRHLFQMIRKGSFAKYDYGWWGNLRRYGQLRPPSFDLSSIPESLPIWMGYGGLDALADVTDVERTIKELRSTPELLYIGGYGHIDFIMSVKAKEDVYVDLMRFLRAQQGMHSSY

SEQ ID NO: 190106 - protein, 172 aa, Zea Mays
MVQTDDGFLLSLQHIPHGRNGIADNTGPPVFLQHGLFQGGDTWFINSNEQSLGYILADNGFDVWVGNVRGTRWSKGHSTLSVHDKLFWDWSWQDLAEYDVLAMLSYVYTVAQSKILYVGHSQGTIMGLAAFTMPETVKMISSAALLCPISYLDHVSASFVLRAVAMHLDEVI

SEQ ID NO: 190107 - protein, 135 aa, Zea Mays
MVRPGKALAAPQLLLLVFLCQQLLLPQGYPCTEHTVQTDDGFLLSLQHIPHGRNGIADNTGPPVFLQHGLFQGGDTWFINSNEQSLGYILADNGFDVWVGNVRGTRWSKGHSTLSVHDKTKSAPLGSSHVDPLPQ

SEQ ID NO: 190108 - protein, 172 aa, Zea Mays
MRHKLRRKGADPRILGRCWDGVLDPLRAWQRLPQQARRAPRRPRSRRRSSTWRRVSRGARRGWRGDTFHRWSAGAMMAGAAMEDPWKGATESRAGGAWCTRGEVARARAHGGTTPWRGRTRREPSAAIQGGGCHGRGIWTRIAGESDDCGRQAGAVAAGRACRTVLNVNVYN

SEQ ID NO: 190109 - protein, 71 aa, Zea Mays
MRSSSYSASSLVTSCSNGLSLQLYTAMHTMSRSCLLPHHLLQQRVLASALHYDARHVMTVLQLILHAAPCG

SEQ ID NO: 190110 - protein, 145 aa, Zea Mays
MAIINVDGCVSKAWPVESSGDGKRSSDNSNKNPIYGPLNICRAESVNLQFGTFGISACPTDTGCTSEAGNADESYANAAEGSSRHVLSSSGSPKKSDGHCKEIKESSAAYCSDEVEEEEADVRPNSGSDEDLSEEDNREVDDEVR

SEQ ID NO: 190111 - protein, 134 aa, Zea Mays
MASAKLLYIVVVDEDASSFRYTRSLLHSTLQLMGCKRRHAFEVRCKVFDVIRGDQQGLGDTATSARVRRYEVAEATPTTSSRQFQFELYKRRTTVLLPRDLFLDLVLDLDALALYKFVAPNQRTDLMLACREAG

SEQ ID NO: 190112 - protein, 194 aa, Zea Mays
MAIINVDGCVSKAWPVESSGDGKRSSDNSNKNPIYGPLNICRAESVNLQFGTFGISACPTDTGCTSEAGNADESYANAAEGSSRHVLSSSGSPKKSDGHCKEIKESSAAYCSDEVEEEEADVRPNSGSDEDLSEEDNREVDDELLHCTLCSESHRKHIRGCLHDIWKGLSMRTATGPMRNMTTWPCWTVWRTAV

SEQ ID NO: 190113 - protein, 87 aa, Zea Mays
MEMDERLPSDMGASRARQKALNRRGHGRAGRELRGSQDEVVAGRAQQGGARMGFAGCGGPLSRKTAVVAGLKRCECTARRAAGGSSP

SEQ ID NO: 190114 - protein, 115 aa, Zea Mays
MIPFRIRCLLFQVGLQSFVCGAVVFEPAARIWETWVPPKCKFFLWLASLNRCWTADRLARRGLAHRKYRLLCDQEEETIQHLLVACVFARQTWFLVLSLIGLQQLAPDPGVSVFQ

SEQ ID NO: 190115 - protein, 485 aa, Zea Mays
MSWADASNCSGSNSGSPVVEPFGSFTMDLFTPHSDLDLSINFSANTDEQYTRKQMISIIKKFSKVLFSYQRSGIFCGVLPIVSARVPILKVIDRGTGVECDISVENKDGMTRSMIIKFVSSLDERFQILSYLVKFWAKVHDLNTPRQLTMSSMSIISLVAFHLQTRHPPILPAFSDLLKDGLDCESIERNALRFRDFGSRNKESVAELFVSLISKLLSAESLWEHGLCASNFEASWISKTWKKGVGNLSVEDFLDRSQNFARSVGKVQMQKICKCLRECALNLLDFMRGKMDTTKLKTLLFGRLSPDELVSKPRLKHVKRKRNWERTPQGGRCVLQKSAKHAGSATGSDSLPTPNKVLHHALHYRVAGHQSSIHQFVPIIRWPRIIPSGFGYGLSLGIPSVAPHLGKGILGKPPIIPSGFGYGLSLEIPSVAPHLGNGILGKPPSNITPLDQRSSTQLVHVRNPHQHTCQQSCGGAMEPSSSGVA

SEQ ID NO: 190116 - protein, 459 aa, Zea Mays
MDLFTPHSDLDLSINFSANTDEQYTRKQMISIIKKFSKVLFSYQRSGIFCGVLPIVSARVPILKVIDRGTGVECDISVENKDGMTRSMIIKFVSSLDERFQILSYLVKFWAKVHDLNTPRQLTMSSMSIISLVAFHLQTRHPPILPAFSDLLKDGLDCESIERNALRFRDFGSRNKESVAELFVSLISKLLSAESLWEHGLCASNFEASWISKTWKKGVGNLSVEDFLDRSQNFARSVGKVQMQKICKCLRECALNLLDFMRGKMDTTKLKTLLFGRLSPDELVSKPRLKHVKRKRNWERTPQGGRCVLQKSAKHAGSATGSDSLPTPNKVLHHALHYRVAGHQSSIHQFVPIIRWPRIIPSGFGYGLSLGIPSVAPHLGKGILGKPPIIPSGFGYGLSLEIPSVAPHLGNGILGKPPSNITPLDQRSSTQLVHVRNPHQHTCQQSCGGAMEPSSSGVA

SEQ ID NO: 190117 - protein, 258 aa, Zea Mays
MATLAAISSVSYDTDTDSDSSRCSEASTWDSQVLSRHAECLELEELTAISVNPSLLPALNQLLLEAYAILRPKPLDYDQRNTLVDVFRKMVNQRFGSNSGSPVVEPFGSFTMDLFTPHSDLDLSINFSANTDEQYTRKQMISIIKKFSKVLFSYQRSGIFCGVLPIVSARVPILKVIDRGTGVECDISVENKDGMTRSMIIKFVSSLDERFQILSYLVKFWAKVHDLNTPRQLTMSSMSIISLVAFHLQKKWILLHFP

SEQ ID NO: 190118 - protein, 263 aa, Zea Mays
MTQTPIPTPRGYSLSLISPSNPKFNLLHGRRSIWCSEASTWDSQVLSRHAECLELEELTAISVNPSLLPALNQLLLEAYAILRPKPLDYDQRNTLVDVFRKMVNQRFGSNSGSPVVEPFGSFTMDLFTPHSDLDLSINFSANTDEQYTRKQMISIIKKFSKVLFSYQRSGIFCGVLPIVSARVPILKVIDRGTGVECDISVENKDGMTRSMIIKFVSSLDERFQILSYLVKFWAKVHDLNTPRQLTMSSMSIISLVAFHLQMG

SEQ ID NO: 190119 - protein, 264 aa, Zea Mays
MATLAAISSVSYDTDTDSDSSRCSEASTWDSQVLSRHAECLELEELTAISVNPSLLPALNQLLLEAYAILRPKPLDYDQRNTLVDVFRKMVNQRFGSNSGSPVVEPFGSFTMDLFTPHSDLDLSINFSANTDEQYTRKQMISIIKKFSKVLFSYQRSGIFCGVLPIVSARVPILKVIDRGTGVECDISVENKDGMTRSMIIKFVSSLDERFQILSYLVKFWAKVHDLNTPRQLTMSSMSIISLVAFHLQCRPGILQYCLRSLTC

SEQ ID NO: 190120 - protein, 408 aa, Zea Mays
MDLFTPHSDLDLSINFSANTDEQYTRKQMISIIKKFSKVLFSYQRSGIFCGVLPIVSARVPILKVIDRGTGVECDISVENKDGMTRSMIIKFVSSLDERFQILSYLVKFWAKVHDLNTPRQLTMSSMSIISLVAFHLQLLSAESLWEHGLCASNFEASWISKTWKKGVGNLSVEDFLDRSQNFARSVGKVQMQKICKCLRECALNLLDFMRGKMDTTKLKTLLFGRLSPDELVSKPRLKHVKRKRNWERTPQGGRCVLQKSAKHAGSATGSDSLPTPNKVLHHALHYRVAGHQSSIHQFVPIIRWPRIIPSGFGYGLSLGIPSVAPHLGKGILGKPPIIPSGFGYGLSLEIPSVAPHLGNGILGKPPSNITPLDQRSSTQLVHVRNPHQHTCQQSCGGAMEPSSSGVA

SEQ ID NO: 190121 - protein, 590 aa, Zea Mays
MTQTPIPTPRGYSLSLISPSNPKFNLLHGRRSIWFPSLSLSGCSEASTWDSQVLSRHAECLELEELTAISVNPSLLPALNQLLLEAYAILRPKPLDYDQRNTLVDVFRKMVNQRFGSNSGSPVVEPFGSFTMDLFTPHSDLDLSINFSANTDEQYTRKQMISIIKKFSKVLFSYQRSGIFCGVLPIVSARVPILKVIDRGTGVECDISVENKDGMTRSMIIKFVSSLDERFQILSYLVKFWAKVHDLNTPRQLTMSSMSIISLVAFHLQTRHPPILPAFSDLLKDGLDCESIERNALRFRDFGSRNKESVAELFVSLISKLLSAESLWEHGLCASNFEASWISKTWKKGVGNLSVEDFLDRSQNFARSVGKVQMQKICKCLRECALNLLDFMRGKMDTTKLKTLLFGRLSPDELVSKPRLKHVKRKRNWERTPQGGRCVLQKSAKHAGSATGSDSLPTPNKVLHHALHYRVAGHQSSIHQFVPIIRWPRIIPSGFGYGLSLGIPSVAPHLGKGILGKPPIIPSGFGYGLSLEIPSVAPHLGNGILGKPPSNITPLDQRSSTQLVHVRNPHQHTCQQSCGGAMEPSSSGVA

SEQ ID NO: 190122 - protein, 495 aa, Zea Mays
MQQQQQQPERYSVTAGGLARGSNSGSPVVEPFGSFTMDLFTPHSDLDLSINFSANTDEQYTRKQMISIIKKFSKVLFSYQRSGIFCGVLPIVSARVPILKVIDRGTGVECDISVENKDGMTRSMIIKFVSSLDERFQILSYLVKFWAKVHDLNTPRQLTMSSMSIISLVAFHLQTRHPPILPAFSDLLKDGLDCESIERNALRFRDFGSRNKESVAELFVSLISKLLSAESLWEHGLCASNFEASWISKTWKKGVGNLSVEDFLDRSQNFARSVGKVQMQKICKCLRECALNLLDFMRGKMDTTKLKTLLFGRLSPDELVSKPRLKHVKRKRNWERTPQGGRCVLQKSAKHAGSATGSDSLPTPNKVLHHALHYRVAGHQSSIHQFVPIIRWPRIIPSGFGYGLSLGIPSVAPHLGKGILGKPPIIPSGFGYGLSLEIPSVAPHLGNGILGKPPSNITPLDQRSSTQLVHVRNPHQHTCQQSCGGAMEPSSSGVA

SEQ ID NO: 190123 - protein, 249 aa, Zea Mays
MILLFPCCRCSEASTWDSQVLSRHAECLELEELTAISVNPSLLPALNQLLLEAYAILRPKPLDYDQRNTLVDVFRKMVNQRFGSNSGSPVVEPFGSFTMDLFTPHSDLDLSINFSANTDEQYTRKQMISIIKKFSKVLFSYQRSGIFCGVLPIVSARVPILKVIDRGTGVECDISVENKDGMTRSMIIKFVSSLDERFQILSYLVKFWAKVHDLNTPRQLTMSSMSIISLVAFHLQCLSSNSLDAWLRR

SEQ ID NO: 190124 - protein, 519 aa, Zea Mays
MATLAAISSVSYDTDTDSDSSRCSEASTWDSQVLSRHAECLELEELTAISVNPSLLPALNQLLLEAYAILRPKPLDYDQRNTLVDVFRKMVNQRFGSNSGSPVVEPFGSFTMDLFTPHSDLDLSINFSANTDEQYTRKQMISIIKKFSKVLFSYQRSGIFCGVLPIVSARVPILKVIDRGTGVECDISVENKDGMTRSMIIKFVSSLDERFQILSYLVKFWAKVHDLNTPRQLTMSSMSIISLVAFHLQLLSAESLWEHGLCASNFEASWISKTWKKGVGNLSVEDFLDRSQNFARSVGKVQMQKICKCLRECALNLLDFMRGKMDTTKLKTLLFGRLSPDELVSKPRLKHVKRKRNWERTPQGGRCVLQKSAKHAGSATGSDSLPTPNKVLHHALHYRVAGHQSSIHQFVPIIRWPRIIPSGFGYGLSLGIPSVAPHLGKGILGKPPIIPSGFGYGLSLEIPSVAPHLGNGILGKPPSNITPLDQRSSTQLVHVRNPHQHTCQQSCGGAMEPSSSGVA

SEQ ID NO: 190125 - protein, 251 aa, Zea Mays
MATLAAISSVSYDTDTDSDSSRCSEASTWDSQVLSRHAECLELEELTAISVNPSLLPALNQLLLEAYAILRPKPLDYDQRNTLVDVFRKMVNQRFGSNSGSPVVEPFGSFTMDLFTPHSDLDLSINFSANTDEQYTRKQMISIIKKFSKVLFSYQRSGIFCGVLPIVSARVPILKVIDRGTGVECDISVENKDGMTRSMIIKFVSSLDERFQILSYLVKFWAKVHDLNTPRQLTMSSMSIISLVAFHLQMG

SEQ ID NO: 190126 - protein, 249 aa, Zea Mays
MATLAAISSVSYDTDTDSDSSRCSEASTWDSQVLSRHAECLELEELTAISVNPSLLPALNQLLLEAYAILRPKPLDYDQRNTLVDVFRKMVNQRFGSNSGSPVVEPFGSFTMDLFTPHSDLDLSINFSANTDEQYTRKQMISIIKKFSKVLFSYQRSGIFCGVLPIVSARVPILKVIDRGTGVECDISVENKDGMTRSMIIKFVSSLDERFQILSYLVKFWAKVPWVNYYFGLVIKLQVTVPLPFVLIN

SEQ ID NO: 190127 - protein, 328 aa, Zea Mays
MPKGLRHSLLVHRDKGLNSRACGLQDMAIGSQLGDAKGNYQQPPRRWFGSTKIHLQFGDQFNEPDDDWLKSVEATSDELLGSYSKTEDNALSAAFGNRKKKRLNRVFHAIGFMYPDYRYPLRGQKIKGATSEKDDASAAPSEPAPKRKKVKVLTNRPRFIEPATVPEFVSETSSATEAKEPALAQKTEELTVTPKVEKIEEPRAEGIITSEILSPSAGVEVPKTQKGLAVTPKRKRMVNVLDVLETIKSSSSTPRKIAEAPKTQTETTASEAEATQRQDETEAGPSEPAKEKSLETREKETEAAEQILAEKTATATPEAFSEALNYIL

SEQ ID NO: 190128 - protein, 162 aa, Zea Mays
MPIVSPSGFSHAQHLLRFSFHVLPLSSSYLSYSLETLIIAPSPPCSLSLTLVERHHPGSSSPRRCSLPCRSHRLGALRPGKTTAPAPALPTWPCVPAPSPPGACARGFLHAGAALVLGPCAEPCSASLVPTAAPSPLLADAMDSSWSLRCRVPVTISKPPSS

SEQ ID NO: 190129 - protein, 63 aa, Zea Mays
MLLALSFPSAGRFASRKNHRTSSRAPYPAVRPCSLATWCMRAAFYTPEQHLCLAPALNPAQLL

SEQ ID NO: 190130 - protein, 68 aa, Zea Mays
MACSILWHDQGMPHYGSVWFVANCATLCLRLVVQIEKLTLGRKVRQSVVIEVTNQTCPTYDPTTITRK

SEQ ID NO: 190131 - protein, 595 aa, Zea Mays
MSSEEVAKMEAEMAQMRRCSSPGQGGVPVTVVYYLCRSGRHLEHPHMLEMHLASPNQALYLRDVICRLDELRGKGMATMYSWSCKRRYKTRFVWHDVMEDDMLLPAQESEYVLKGSLLPLRHSTPPIVGAAPPTKDHDQLNIDTTIIPKAPCVKANPHEESPTHSQKGWTTNSSSSPPMVEDEEPPPVALHQGSQPALSSISPSSCCTTGDGDDETASPHPSCSGRPSSPNKSTTKGSSGGTLYPTPSSLALHSKQMMPGCCYVIAAAQDLATQTQGISTGKEIHKDTSCSTDSTPAKATIPTNNKQRDNAGYFYSRSGRSGTLESLIRAEAHGRRVATAKRTQEEDDDKEAVQSFATKLNPANLLMRLVACGSTMSARQHLPACSLMRTAHKPRYLTQHVEFLPSSPVLSPLGTLIMRPRSADEARGASDSGDCNHCRGKLLQTTENRCESGKVMSTIVRPSSHCDHNSVSEKEVPIANLDNLEDGSKLISQKIRMAPCQQHTSGTFVTTDVGGEQKSNTLSRSTSKKMINPSSRPSRVSFHDEREKVIKIEERNRIEYLANTNKAVWGRKFPPKVVLYRSINLHTIWLHCCYI

SEQ ID NO: 190132 - protein, 330 aa, Zea Mays
MCPRGMILERAFKQGETLRMETELDMDAELRVARDYQQQVAGDDAEQKNERKAMKELGLARARELGWPNTYVFTKALGEMMLARELGGVVPAVIVRPSIITSIHKEPLPGWMEGTRTIDAILIGYAKQSLSCFLADLQLTMDVIPGDMVVNAMMAATVAHASAPGGHKEESPTVYHATSSLRNPAPYAVLYRTGIRYFCDHPRVGKDGRPVRTRKVHFFGTVAAFTAYMLLRYRLPLELLRLLSLLSGGLLFSRLYADLDRKYRFVMHLVDLYGPFALFKGIFDDANMERLRMAMPVADRLEFNFDPNTIDWDDYFYKIHIPGVMKYVLK

SEQ ID NO: 190133 - protein, 73 aa, Zea Mays
MRNNQKLQRLGVTTLASILNHTSAKSKVDTHEKSGSLYEVQEGEGSEDEEVNQCATKRRNRLKRVLAPAQQDE

SEQ ID NO: 190134 - protein, 1088 aa, Zea Mays
MDRSWIKDRLFSDAHLDGVKEFMNLVSQRFDKNEEVLCPCRRCLNRVHQHKGEVYDHLLIHGMTSTYTRWVHHGEPFEAEINENYDHVDEYIGINEDDGMNENEEDEPDNRIPDMIRELYPTNDQGRGKSMFAALLEEMKHELYPGAPYTRFSFLVKLLHIKSFYRISNVAFTAILKLLSSAFPDCSLPASYHEAKNVINALGLGYDSIHVCPNNCVLFRKEYAKHDECLVCGASRWKDSTDGKKHIPEKVLRHFPIIPRLKRFFASKKISEETQWHLLKRKALENELSHPADGETWKDFDRKYEWFAKDGRNIRLGLATDGFNPFGKMNSSYSMWPIFIIPYNFPPWECVEQSNFMMGLLIPGPSCPGKDLDVFLEPLIEELQELWKGVSTFDALTGKDFDLHAVVIWCIHDYPALSTLSGRVTKGYYACVHCDKNPCSRRIKNKICYIGHRRFLPWDHIWRTKKWFDGKEDHLEKPEEFSTDELMQQLERVKDVRPGQHPQSKKRKREVDGQCWKRRSSLWDLPYWSNLKLRHNLDVMHIEKNICESIIGTFLGIIGKTKDTINARLDLEEMSIRKHLHLKRDGNSYTVPHAPYVMNRSQKLVFCDFLRRVKFPDGYASNLAKSITSDGCNLQGLKTHDCHILLQRILPVAIRGIMHRDIYEAIAELGKLFQQLCAKTLKLDVLHTMKAKIPVILCKLEKIFPPAFFDVMLHLAVHLPDEAILRGPVQYGWMYPVERRLLTLKRFVRNMARPEGSIAKAYVANECLTACSRYFDDIDTRHNREGRNKERVDLRKGDFSVFQHGVDLLGAPRLTYLEDNYDRMVWIYKEELADQGTPYVQKTHDKQFSFWFKKHIAKLRYVDGEDISDDLFALSCEPDLRVRIFSACLVDGVRYHTIDQIIELRYNSDMSKCRTVVLFRCDWFDTYSKKVRMKDDGYFRSINHGSCWYKDDPFILSTQATKVFYLDDTKHCESWRIVQKFTHRHLWNVTENENEETPMGLGLSYQDEICAGFHVQVNEGNLNDEVPDSEDCHHVNTSLVDEFRKPRQDNVQGDGTSDDEDETIWQYVSDDESPTILVEDDDDDSDAE

SEQ ID NO: 190135 - protein, 267 aa, Zea Mays
MRNNQMFQRLGINQLRTMMTATRVKSKYDGPEESGSLFDGEDSEGSEPEEDSHVAQGVRSHNPTHVADKPTQQTRDSKRVVAPDVHGQQIRFTRQRSAAINQQSSLSLTTTTQAGSRATTNQESTQNLAAATQFTSSVATEQDYTAGLTTTAQPTSPTQAEVNDNNRDEELVPRQRSRGKQLESLSRGLGTKIPIQISNGKRRPEPPIQTAKFASEGGIILRQHIPIFPHWKEYKKQENEGKITDYIGKLAVSHFSLTCSVTVHCPF

SEQ ID NO: 190136 - protein, 186 aa, Zea Mays
MRNNQMFQRLGINQLRTMMTATRVKSKYDGPEESGSLFDGEDSEGSEPEEDSHVAQGVRSHNPTHVADKPTQQTRDSKRVVAPDVHGQQIRFTRQRSAAINQQSSLSLTTTTQAGSRATTNQESTQNLAAATQFTSSVATEQDYTAGLTTTAQPTSPTQAEVNDNNRDEVAIYNIDKKPEHKDLRV

SEQ ID NO: 190137 - protein, 409 aa, Zea Mays
MPRPPVPSHGALPRPLLPQPRVPPARHLLEIALARCPVSFSIAPCSISPLCRVPWHLRAPRAPLPPAWIRPSFWQLATPLPLLLPRQRASSAKSSLARPGWHSSPCAQLRAPLCRSVLAVARAQLPYARLAWSSRSLARVFSMATRTSSSTLWCRTRASCSPLLGLCSPSACVELLCCVRESVVCAKFSACNGVSSFRVELLSSVPVVVSEPILGCRSIFSYPAASVVVKCVCCRELACGAHSVSGPRFLQLGQAGHRSVLCSPKSLPSNHRSRSTRQSHLGRLSIFYLPWYNTTIRSDLQTAMASVVLCSQPDLSVRSLFVHRASRVLAFIVGLLNPSFLACDFVIARALTGFVSSPAHSKFGLVVVPCVIKKSQESGEDEASRVIFTKYSTKARTSRRSTSSSTPSP

SEQ ID NO: 190138 - protein, 60 aa, Zea Mays
MTTSSDTNHRFNPACITYVITPKLSYAARRLRNRGHNYHAAGSPVFLQASNKYVPELHAE

SEQ ID NO: 190139 - protein, 106 aa, Zea Mays
MNLPIHTEINAKSGNTSLEREKRKHAPLGTPGCLIIKIERANDFFLFLPKNTSTLQEVVKAIIIFIYLLIQRQHRHQHFEIHGLHPLRPLRELPLIQTNRVPLIAI

SEQ ID NO: 190140 - protein, 89 aa, Zea Mays
MSTNHQCGTKHKHIMKQANMNPKKRIKEKTKGSGPLRMVDSVQNLLFSLRLSLAKYENWFSGTRLFNSGTRIFPKPAITNSNQIRKCTI

SEQ ID NO: 190141 - protein, 102 aa, Zea Mays
MRPLATPPRAQDPMSTETPLPSRQRGQVTEPRTRPRRRAAATLQHPSDPARPFLGVNGVYCVHFSLHSSSLNAMNGIHARSLSLSSRRLSLPPALYKSLVTP

SEQ ID NO: 190142 - protein, 98 aa, Zea Mays
MLKLRKMKKGIENRNQRETILFLACLSDVVHKKNLLNHSPVKRNCTHVYSWKTEKTLKSHKKIILRRKHPYLRNDCSCAMKNLGKLQVLLFDTFQIAS

SEQ ID NO: 190143 - protein, 81 aa, Zea Mays
MLEITLLFYRSGYQRTLDAYPPHANLKTSEAKRCQASARMRQITEQIRKEHLLLHYTYQMDVTKINFWKSMSLFIHVYMSK

SEQ ID NO: 190144 - protein, 73 aa, Zea Mays
MFFLGLEVYQDIIYEDNHKLVKLRNEHKVHQIHEVSWSIGQTKGHNQIFVKTISSSESGLGNIFRTDSYLVIT

SEQ ID NO: 190145 - protein, 59 aa, Zea Mays
MQLVDDLKNGGINQWMLAKRVPPSKHYLSVKLKASPGFMHNQLYYAILLHLMFVGLYCT

SEQ ID NO: 190146 - protein, 57 aa, Zea Mays
MCYIKVVDNFIILLVLKIGSHKPDRLGVVLFTSPAPESVEFLNSFHKLQWLLKFILK

SEQ ID NO: 190147 - protein, 54 aa, Zea Mays
MCLKLLVPEPYPSAVLKVQVHLMLHNSPAELDVPSSASSLQGPVSVEGIYNVSI

SEQ ID NO: 190148 - protein, 137 aa, Zea Mays
MGASRCGAERTPEHAANRERAEGEERNGWARRRLHGTGSNQDWAPWGKASGRREIHPGAMGASRTDPVTRQWRPEREREPQPWKRRRGRETLAAGRTALREGARSRRRGVDAHPPKHTGPDDSEGAKWRGAGPEGAR

SEQ ID NO: 190149 - protein, 104 aa, Zea Mays
MAIRIDYTQLRISNHTTYVALDPCICQLANRALKTRSGSRQPRAQIHHRPASCHGGYTLLSPSLHSHCVLSYSGISLPEAKLTHVEACDQLKGPRSASLHRDGP

SEQ ID NO: 190150 - protein, 250 aa, Zea Mays
MSSCKRYLPCLILLLLHGGRGAVAGKVSAIVVFGDSSVDTGNNNFIPTIARSNFWPYGRDYDDGLPTGRFSNGRLATDFISEAFGLPPSIPAYLDNNCTIDQLATGVSFASAATGLDNATAGVLSVITLDEQLAYFKEYTDRLKIAKGEAAAEEIISEALYICWDSPRPPYAACTPSAAAKWTSPGSRPWAASPPSGSATATTPGSATSSTTLLPGPSTPSCRSSSSSLTRNCWDCSSSSPTRTSSSPTS

SEQ ID NO: 190151 - protein, 1049 aa, Zea Mays
MRASASAVPMEASASARRSAASPDPGAKKPRLAQPPARDPRSYAAAAAASNGGASAAEQALVDELLGQYRTALGELTFNSKPIITNLTIIAGENLQAAKPIAAVICANILEVPSEQKLPSLYLLDSIVKNIGKDYVKHFSARLPEVFCKAYKQVDPSIHHSMRHLFGTWKGVFPLPPLQTIEKELGFQSSTNGLSGAAPSRTDSQSPRPSNSIHVNPKYLEARQQLNQPTKGILGSGAKTAVIADTDDDIERANRLGTERSAGRRLDAPNARPNIEHIQRDPFSNPIHEKLAGRDVRGLGFSNTSQQAVVGTGQVRSKPRGQDGIGGPYYASGVVSSEEKIDKRSNFYTSKDVRPSGSVHFDSALLPTRSINANRVGRPSSNKSWKHSEEEEYVWDDVPSKTTEYSGTHNIIKGEWMSDDGNAKFASLQSAKWADAGPVECIDPKTHKVDNVSRFGFAAGQERRISAYMDQEEYLLGKREVEARIDREIRPYGQQFPAARDSSLWVSQEKALPDNGLDPWVSKFSNQPAEMSICTGTMPASIISSVPVRLSGHYAGRSNLDTTNSVPIRSTEAFGQQKHRYWSSSPPQAHPPSSTAPFARQGSPNHDESDFYPSGSFSQLGQDPQEEYSQRALPVLAKGSHVVVHNDELTQGQPSLQATLQTQKYPIIQSKSHINPSDQLQASFLCENSPSLFRPSIQLGEVSLPSDSTPISSDLTSASNLLAGLIKSGFKPSNHSDAQPLGPSGSLLVASLSLQNAAGENTILQTQTPNTSRPPLPPGLPPPPSTQSAEKAAPLSSLLSSLVAKGLISSPASDSSDAVISQPNKESSINGKDVAASGVPLPALKSSFGKVSSSNSDSSAPPNASLPKAIEIEMGDLIGLEFKPEKLRKYHEHVISYLDDQSHQCKMCGNRFGLEELSLHTSSCGPRESRTIYTGIAPKRWYPSRNIYIDGSHEIEDSAEASDAGLGSAEVCEFMVHADERQIICALCGEPFDDVYSFEKGNWMYKDAVFLDYAKGKNSCGNNVKGEEHVPIVHVRCMPRGSNDGMDVD

SEQ ID NO: 190152 - protein, 1126 aa, Zea Mays
MRASASAVPMEASASARRSAASPDPGAKKPRLAQPPARDPRSYAAAAAASNGGASAAEQALVDELLGQYRTALGELTFNSKPIITNLTIIAGENLQAAKPIAAVICANILEVTFVFDSSYARQTAVSPSSSIHHVKVTLRRQASTGASFSKQCGKITKLKNKGFQKVLLQTEVYDTPSCTYEKYVHALVPSEQKLPSLYLLDSIVKNIGKDYVKHFSARLPEVFCKAYKQVDPSIHHSMRHLFGTWKGVFPLPPLQTIEKELGFQSSTNGLSGAAPSRTDSQSPRPSNSIHVNPKYLEARQQLNQPTKGILGSGAKTAVIADTDDDIERANRLGTERSAGRRLDAPNARPNIEHIQRDPFSNPIHEKLAGRDVRGLGFSNTSQQAVVGTGQVRSKPRGQDGIGGPYYASGVVSSEEKIDKRSNFYTSKDVRPSGSVHFDSALLPTRSINANRVGRPSSNKSWKHSEEEEYVWDDVPSKTTEYSGTHNIIKGEWMSDDGNAKFASLQSAKWADAGPVECIDPKTHKVDNVSRFGFAAGQERRISAYMDQEEYLLGKREVEARIDREIRPYGQQFPAARDSSLWVSQEKALPDNGLDPWVSKFSNQPAEMSICTGTMPASIISSVPVRLSGHYAGRSNLDTTNSVPIRSTEAFGQQKHRYWSSSPPQAHPPSSTAPFARQGSPNHDESDFYPSGSFSQLGQDPQEEYSQRALPVLAKGSHVVVHNDELTQGQPSLQATLQTQKYPIIQSKSHINPSDQLQASFLCENSPSLFRPSIQLGEVSLPSDSTPISSDLTSASNLLAGLIKSGFKPSNHSDAQPLGPSGSLLVASLSLQNAAGENTILQTQTPNTSRPPLPPGLPPPPSTQSAEKAAPLSSLLSSLVAKGLISSPASDSSDAVISQPNKESSINGKDVAASGVPLPALKSSFGKVSSSNSDSSAPPNASLPKAIEIEMGDLIGLEFKPEKLRKYHEHVISYLDDQSHQCKMCGNRFGLEELSLHTSSCGPRESRTIYTGIAPKRWYPSRNIYIDGSHEIEDSAEASDAGLGSAEVCEFMVHADERQIICALCGEPFDDVYSFEKGNWMYKDAVFLDYAKGKNSCGNNVKGEEHVPIVHVRCMPRGSNDGMDVD

SEQ ID NO: 190153 - protein, 198 aa, Zea Mays
MMAPPATWSVRALGRTRRRLLRGRGRVCLPRSRSSPSPWVGRGGDRRLRPGPSPSTGVGRGGVRRLPGPRPSPSPGVGRGGVRRHPGPTPSPSPRVGRGGVRRLLGPRPSPSPGVVQGGVRRLLGPRPSPSPWVGRGGVRRLPGPRSSPSPGVGRGRASYGARGQTWLLSASLCRVAQQSERRRRRCPLVRPVSGAAK

SEQ ID NO: 190154 - protein, 164 aa, Zea Mays
MSPARPPPPSARLRAFPRDGVLTSFYAGRFPSIPGCLNRRSCGRAGRVYCLFSGGDNRKKQDEARKALENALGKKAEFDKWGVEIERRQRGYPRDPAACGGGWSGGGSWFRRLTGGGFWDAAKQTVLTILGIIAALTVFSRAHWLKGLDQSQVPLALAMWLECL

SEQ ID NO: 190155 - protein, 206 aa, Zea Mays
MESSPPSMPVDSPVSLDALIADPAAAPAACTASSLAVITARNRIKLLFSLQDEARKALENALGKKAEFDKWGVEIERRQRGYPRDPAACGGGWSGGGSWFRRLTGGGFWDAAKQTVLTILGIIAAFFLIANFNILVASVINSLLLVLRQIRRILSFIAYCVFQGALVERSGPKSSTLGLSNVAGVPVKEKAGMSAKERVVGKWAMD

SEQ ID NO: 190156 - protein, 178 aa, Zea Mays
MSPARPPPPSARLRAFPRDGVLTSFYAGRFPSIPGCLNRRSCGRAGRVYCLFSGGDNRKKQDEARKALENALGKKAEFDKWGVEIERRQRGYPRDPAACGGGWSGGGSWFRRLTGGGFWDAAKQTVLTILGIIAAGALVERSGPKSSTLGLSNVAGVPVKEKAGMSAKERVVGKWAMD

SEQ ID NO: 190157 - protein, 104 aa, Zea Mays
MSPARPPPPSARLRAFPRDGVLTSFYAGRFPSIPGCLNRRSCGRAGRVYCLFSGGDNRKKQGALVERSGPKSSTLGLSNVAGVPVKEKAGMSAKERVVGKWAMD

SEQ ID NO: 190158 - protein, 1364 aa, Zea Mays
MEEVEKRLTEKFQQAWEASTATLMELSKKMDGLDTLSTKMSEMEKRQMEHEKITQYVQAKMDLSMKSLAQVSQDQARLSNVVANANRGGSVAQRGGTGDGLMGAHPQAIPPSFQTSQTAPHVSHPTGGSGNHSSGEEARFGQEEVNRRGIESDQHHRRTWLPKWDFPVFEGEEARVWIDNCEAYFLLYQIPEEFRVSAASLHLKGRAAHWYQSFRDSVGFVDWIQFKLEIRNEFDLTTHSDRMLELLTLRQTGTVLEYKTQFEKLVYCIRLFDKAVSETFLVTQFVLGLKHELKVGVEMQFPKTVAMAAQLALKHESLHSRHTAGTRKAVGVKGVPPVGFKEGTESQGELWKAKQLKDYRRANGLCFKLSLNAMSGTNNPRCVRIQALIKDQLILQLLDSGSSNTFISELACSRIGCETQNIEPVAVKVANEQIIYCQKKVVQLKWWCGGKTFTVDAFVLPATAYDMVLGMDWLEKFSPMLCDWDRKWVEFSYEGVRIRLQGVGNKSAALLPEASHEQIQRWHKGNEIWAVALLQQVTPELKVVTGQVPECVQEVLDQFKEVFKTPDSLPPSREYDHTISLLPGTTPVNVRPYRYSPLQKDEIERQVQEMLQAGTITRSVSPFASPVLLVKKKDGSWRFCVDYRKLNDITVKNKFPMPIIDEFIDELAGAKVFSKLDMAAGFHQIRMADQDEMKTAFKTHHGHFQFRVMPFGLTNAPATFQCLMNAVFQQLMRKCVLIFMDDILVYSPSLETHVVHLQQVFQVLETHQLYAKRSKCAFALTQIEYLGHIISDKGVSTDPSKTESMRRWPTPKSHTELRGFLGLTGYYRKFVKGYGILAKPLTVLLQQKQFGWPPSAQTAFEALKDAMITTPVLALPNFSETFVIETDACDTGIGAVLSQKGHPVAFYSKALGVKNSQLSTYEKEFLAILMAVEKWRCYLSRGPFVIRTDHRSLCHLQDQTLATDMQKKAMTKLAGLQFSVQYKKGAENKAADALSRVAHNMELSAISATTPVWLQEITNSYELDTHAQSLLAELAVSSPNEQGFELKNGLIYKNNRLVVGQNVGLQTKLISAFHASPLGGHSGIQATYQRVKKLFLWNGLKADVEQFVRQCHVCQQAKHEHCKYPGLLQPLPIPQSSWQDLSMDFIEGLPKSNGYSVILVVVDRLTKYAHFLAVKHPFTASHIAHLFFSQVVKLHGFPHTIVSDRDKVFTSTFWQELFKLSGTQLHLSSAYHPQSDGQTERVNQCLEMFLRCAVHNSPSQWAKWLDSAELWYNTSYHTSIKCSPFKALYGVEPNLGCIPVTDSLNPSEAQLTLQQRQEFLEVIKTNLASAQSRMKHYADLNRSFRQFQIGDLVYLKLQPFAQVS

SEQ ID NO: 190159 - protein, 515 aa, Zea Mays
MEPAAEDVAAAAPDSWESADIDGPISRLILSARRVSSSPDLADNPDPPQPPPALQPQGPPSVPSAAREDLMAQVDQFLREALEKPRERLSVLRMEQEILKFIGDPRFTEYEFNGLPTSYLRLAAHRLAQHYFLQSIAIPDNSLPDGTGSHIILRKTSSECQLPDVCLADIPVNLPQEENISVAKVAIKQRPQKNLHGMNSSSAHSFRDNHQKSVEERKEEYNKARARIFNNGVSNATDGRSAEEVTSLTTLHRSTSLELNSNNRMGQGAEITLERTLTTTSASSMSNRSKSDKEPAVNRNRQNNRVAIFRDRESERRDPDYDRSYDRYMQRFDPGFGFSGGSYTIRPLYAPAVNYNTEFPQLGSAHQSPVAVEQQPRPIAQHMPVTWSAAQATNAIGYGPDGVMGPYSPGHIRAPVRSSVFMHASQQYAIPSRPGVPFVHPQESMGPFAQVEMLKEHILPYLNGLCCRRTDDDDEKLGFAVSGRSGRRAKIGVVQYVNRRQGCGPIVHRMVAGLN

SEQ ID NO: 190160 - protein, 468 aa, Zea Mays
MEPAAEDVAAAAPDSWESADIDGPISRLILSARRVSSSPDLADNPDPPQPPPALQPQGPPSVPSAAREDLMAQVDQFLREALEKPRERLSVLRMEQEILKFIGDPRFTEYEFNGLPTSYLRLAAHRLAQHYFLQSIAIPDNSLPDGTGSHIILRKTSSECQLPDVCLADIPVNLPQEENISVAKVAIKQRPQKNLHGMNSSSAHSFRDNHQKSVEERKEEYNKARARIFNNGVSNATDGRSAEEVTSLTTLHRSTSLELNSNNRMGQGAEITLERTLTTTSASSMSNRSKSDKEPAVNRNRQNNRVAIFRDRESERRDPDYDRSYDRYMQRFDPGFGFSGGSYTIRPLYAPAVNYNTEFPQLGSAHQSPVAVEQQPRPIAQHMPVTWSAAQATNAIGYGPDGVMGPYSPGHIRAPVRSSVFMHASQQYAIPSRPGVPFVHPQESMGPFAQMVAGIKEPRGVRQSQPSI

SEQ ID NO: 190161 - protein, 257 aa, Zea Mays
MNSSSAHSFRDNHQKSVEERKEEYNKARARIFNNGVSNATDGRSAEEVTSLTTLHRSTSLELNSNNRMGQGAEITLERTLTTTSASSMSNRSKSDKEPAVNRNRQNNRVAIFRDRESERRDPDYDRSYDRYMQRFDPGFGFSGGSYTIRPLYAPAVNYNTEFPQLGSAHQSPVAVEQQPRPIAQHMPVTWSAAQATNAIGYGPDGVMGPYSPGHIRAPVRSSVFMHASQQYAIPSRPGVPFVHPQESMGPFAQPHCA

SEQ ID NO: 190162 - protein, 450 aa, Zea Mays
MEPAAEDVAAAAPDSWESADIDGPISRLILSARRVSSSPDLADNPDPPQPPPALQPQGPPSVPSAAREDLMAQVDQFLREALEKPRERLSVLRMEQEILKFIGDPRFTEYEFNGLPTSYLRLAAHRLAQHYFLQSIAIPDNSLPDGTGSHIILRKTSSECQLPDVCLADIPVNLPQEENISVAKVAIKQRPQKNLHGMNSSSAHSFRDNHQKSVEERKEEYNKARARIFNNGVSNATDGRSAEEVTSLTTLHRSTSLELNSNNRMGQGAEITLERTLTTTSASSMSNRSKSDKEPAVNRNRQNNRVAIFRDRESERRDPDYDRSYDRYMQRFDPGFGFSGGSYTIRPLYAPAVNYNTEFPQLGSAHQSPVAVEQQPRPIAQHMPVTWSAAQATNAIGYGPDGVMGPYSPGHIRAPVRSSVFMHASQQYAIPSRPGVPFVHPQESMGPFAQ

SEQ ID NO: 190163 - protein, 56 aa, Zea Mays
MSSPEPPERRLALLFIAALSNFRLIVARSSRTWPRRRHSSSWVASSSAGLSPLSPV

SEQ ID NO: 190164 - protein, 181 aa, Zea Mays
MAVVGLSSAFAPLRGSWIAVRIRQGGQRAGISLCPSPRSRRSCAAVVRAEVSFVDADEAKRLVGEEGYTVLDIRDRAQRERAHIKSSTHVPLFIENQDNDIGTIVKRQLHNNFAGLFFGLPFTKLNPDFALTVKDKFSPESKLLVVCQEGLSSCCRCTGERRLPKYCMHHIRSSNSEARNV

SEQ ID NO: 190165 - protein, 180 aa, Zea Mays
MAVVGLSSAFAPLRGSWIAVRIRQGGQRAGISLCPSPRSRRSCAAVVRAEVSFVDADEAKRLVGEEGYTVLDIRDRAQRERAHIKSSTHVPLFIENQDNDIGTIVKRQLHNNFAGLFFGLPFTKLNPDFALTVKDKFSPESKLLVVCQEGLSCCRCTGERRLPKYCMHHIRSSNSEARNV

SEQ ID NO: 190166 - protein, 102 aa, Zea Mays
MRGPRRPVRVRQPAGEQPRDDRPWKFPAPVPSLYAIAEIAIRFRASRDRRSRVGDQVIWFFEFYEAEDPEHLFGEGKCPLTHYVPFTLQFTVPHTMNNLRID

SEQ ID NO: 190167 - protein, 900 aa, Zea Mays
MPALGAEAEAAVFIWIPDSMAAKMAGAVQVLKDDTVKRTPMARPSNGREGKPIRLLSNHFSVKLRGVDAVFYQYSVCIKSEDDKVVDSKGIGRKVIDKLLQTYCSELDGKDFAYDGEKCLFTVGPLPQNNFEFTVILEETSSRAAGGSPVHESPTQANKKRVKRSHLAKKFSVDISYAAKIPLQSVALALRGSESEHGQDVLRVLDVVLRQQQAKRGCLLVRQSFFSDDSRNLVDLTGGVSGCRGLHSSFRTTIGGLSLNMDVSTTMVVTPGPVIDFLVTNQNVRDIRDIDWPRAKKMLKNLRVKAKHNNMEFKIIGLSDQPCSRQMFPMKVRNGNIEIKSVDITVQDYFKSKQVELTMPYLPCLDVGKPKRPNYLPIELCHMVSLQRYTKALSSQQRAMLVEKSRQKPQERMRVVTDAVKSNMYDDDPILSSCGIEIEKQLTRVDARVLSAPALVVGNSEDCIPNRGRWNYNNKRLFDPVKIERWAIVNFSARCDMSRISRELINCGRSKGIFIECPHSLVDEDSQSRRCSPVERVEKMFEKVKASLPGPPEFLLCLLPERKNCDIYGPWKKKNLHEMGIVTQCIAPSNKMNDQYFTNVLLKINAKLGGMNSKLALEHRQMIPVVTQIPTLILGMDVSHGSPGRADIPSIAAVVGSRCWPLISRYRASVRTQSPKVEMIDSLFKPLDDGKDDGIMRELLLDFYQTSQQRKPKQIIIFRDGVSESQFSQVLNVELNQIIKAYQSMGQGDLPKFTVIIAQKNHHTKLFQADSPENVPPGTVVDSGIVHPRQYDFYMCAHAGPIGTSRPTHYHVLLDEIGFSADNLQKLVLSLSYVYQRSTTAISVVAPICYAHLAAAQMGQFMKFEEFADTSSGSVNSSSPPSIPELPRLHADVCSSMFFC

SEQ ID NO: 190168 - protein, 502 aa, Zea Mays
MPEHSMAAKMAGAVQVLKDDTVKRTPMARPSNGREGKPIRLLSNHFSVKLRGVDAVFYQYSVCIKSEDDKVVDSKGIGRKVIDKLLQTYCSELDGKDFAYDGEKCLFTVGPLPQNNFEFTVILEETSSRAAGGSPVHESPTQANKKRVKRSHLAKKFSVDISYAAKIPLQSVALALRGSESEHGQDVLRVLDVVLRQQQAKRGCLLVRQSFFSDDSRNLVDLTGGVSGCRGLHSSFRTTIGGLSLNMDVSTTMVVTPGPVIDFLVTNQNVRDIRDIDWPRAKKMLKNLRVKAKHNNMEFKIIGLSDQPCSRQMFPMKVRNGNIEIKSVDITVQDYFKSKQVELTMPYLPCLDVGKPKRPNYLPIELCHMVSLQRYTKALSSQQRAMLVEKSRQKPQERMRVVTDAVKSNMYDDDPILSSCGIEIEKQLTRVDARVLSAPALVVGNSEDCIPNRGRWNYNNKRLFDPVKIERWAIVNFSARCDMSRISRELINCGRSKGIFGG

SEQ ID NO: 190169 - protein, 644 aa, Zea Mays
MAAKMAGAVQVLKDDTVKRTPMARPSNGREGKPIRLLSNHFSVKLRGVDAVFYQYSVCIKSEDDKVVDSKGIGRKVIDKLLQTYCSELDGKDFAYDGEKCLFTVGPLPQNNFEFTVILEETSSRAAGGSPVHESPTQANKKRVKRSHLAKKFSVDISYAAKIPLQSVALALRGSESEHGQDVLRVLDVVLRQQQAKRGCLLVRQSFFSDDSRNLVDLTGGVSGCRGLHSSFRTTIGGLSLNMDVSTTMVVTPGPVIDFLVTNQNVRDIRDIDWPRAKKMLKNLRVKAKHNNMEFKIIGLSDQPCSRQMFPMKVRNGNIEIKSVDITVQDYFKSKQVELTMPYLPCLDVGKPKRPNYLPIELCHMVSLQRYTKALSSQQRAMLVEKSRQKPQERMRVVTDAVKSNMYDDDPILSSCGIEIEKQLTRVDARVLSAPALVVGNSEDCIPNRGRWNYNNKRLFDPVKIERWAIVNFSARCDMSRISRELINCGRSKGIFIECPHSLVDEDSQSRRCSPVERVEKMFEKVKASLPGPPEFLLCLLPERKNCDIYGPWKKKNLHEMGIVTQCIAPSNKMNDQYFTNVLLKINAKLGGMNSKLALEHRQMIPVVTQIPTLILGMDVSHGSPGRADIPSIAASHSLNEQQAQ

SEQ ID NO: 190170 - protein, 719 aa, Zea Mays
MPEHSMAAKMAGAVQVLKDDTVKRTPMARPSNGREGKPIRLLSNHFSVKLRGVDAVFYQYSVCIKSEDDKVVDSKGIGRKVIDKLLQTYCSELDGKDFAYDGEKCLFTVGPLPQNNFEFTVILEETSSRAAGGSPVHESPTQANKKRVKRSHLAKKFSVDISYAAKIPLQSVALALRGSESEHGQDVLRVLDVVLRQQQAKRGCLLVRQSFFSDDSRNLVDLTGGVSGCRGLHSSFRTTIGGLSLNMDVSTTMVVTPGPVIDFLVTNQNVRDIRDIDWPRAKKMLKNLRVKAKHNNMEFKIIGLSDQPCSRQMFPMKVRNGNIEIKSVDITVQDYFKSKQVELTMPYLPCLDVGKPKRPNYLPIELCHMVSLQRYTKALSSQQRAMLVEKSRQKPQERMRVVTDAVKSNMYDDDPILSSCGIEIEKQLTRVDARVLSAPALVVGNSEDCIPNRGRWNYNNKRLFDPVKIERWAIVNFSARCDMSRISRELINCGRSKGIFIECPHSLVDEDSQSRRCSPVERVEKMFEKVKASLPGPPEFLLCLLPERKNCDIYGPWKKKNLHEMGIVTQCIAPSNKMNDQYFTNVLLKINAKLGGMNSKLALEHRQMIPVVTQIPTLILGMDVSHGSPGRADIPSIAAVVGSRCWPLISRYRASVRTQSPKVEMIDSLFKPLDDGKDDGIMRELLLDFYQTSQQRKPKQIIIFRHIRVWDRGTFRSSQ

SEQ ID NO: 190171 - protein, 883 aa, Zea Mays
MAAKMAGAVQVLKDDTVKRTPMARPSNGREGKPIRLLSNHFSVKLRGVDAVFYQYSVCIKSEDDKVVDSKGIGRKVIDKLLQTYCSELDGKDFAYDGEKCLFTVGPLPQNNFEFTVILEETSSRAAGGSPVHESPTQANKKRVKRSHLAKKFSVDISYAAKIPLQSVALALRGSESEHGQDVLRVLDVVLRQQQAKRGCLLVRQSFFSDDSRNLVDLTGGVSGCRGLHSSFRTTIGGLSLNMDVSTTMVVTPGPVIDFLVTNQNVRDIRDIDWPRAKKMLKNLRVKAKHNNMEFKIIGLSDQPCSRQMFPMKVRNGNIEIKSVDITVQDYFKSKQVELTMPYLPCLDVGKPKRPNYLPIELCHMVSLQRYTKALSSQQRAMLVEKSRQKPQERMRVVTDAVKSNMYDDDPILSSCGIEIEKQLTRVDARVLSAPALVVGNSEDCIPNRGRWNYNNKRLFDPVKIERWAIVNFSARCDMSRISRELINCGRSKGIFIECPHSLVDEDSQSRRCSPVERVEKMFEKVKASLPGPPEFLLCLLPERKNCDIYGPWKKKNLHEMGIVTQCIAPSNKMNDQYFTNVLLKINAKLGGMNSKLALEHRQMIPVVTQIPTLILGMDVSHGSPGRADIPSIAALQVVGSRCWPLISRYRASVRTQSPKVEMIDSLFKPLDDGKDDGIMRELLLDFYQTSQQRKPKQIIIFRDGVSESQFSQVLNVELNQIIKAYQSMGQGDLPKFTVIIAQKNHHTKLFQADSPENVPPGTVVDSGIVHPRQYDFYMCAHAGPIGTSRPTHYHVLLDEIGFSADNLQKLVLSLSYVYQRSTTAISVVAPICYAHLAAAQMGQFMKFEEFADTSSGSVNSSSPPSIPELPRLHADVCSSMFFC

SEQ ID NO: 190172 - protein, 798 aa, Zea Mays
MGRILHMMERNVYLLWDLFHRITLSSLLSWRKHLQVHVLFRAAGGSPVHESPTQANKKRVKRSHLAKKFSVDISYAAKIPLQSVALALRGSESEHGQDVLRVLDVVLRQQQAKRGCLLVRQSFFSDDSRNLVDLTGGVSGCRGLHSSFRTTIGGLSLNMDVSTTMVVTPGPVIDFLVTNQNVRDIRDIDWPRAKKMLKNLRVKAKHNNMEFKIIGLSDQPCSRQMFPMKVRNGNIEIKSVDITVQDYFKSKQVELTMPYLPCLDVGKPKRPNYLPIELCHMVSLQRYTKALSSQQRAMLVEKSRQKPQERMRVVTDAVKSNMYDDDPILSSCGIEIEKQLTRVDARVLSAPALVVGNSEDCIPNRGRWNYNNKRLFDPVKIERWAIVNFSARCDMSRISRELINCGRSKGIFIECPHSLVDEDSQSRRCSPVERVEKMFEKVKASLPGPPEFLLCLLPERKNCDIYGPWKKKNLHEMGIVTQCIAPSNKMNDQYFTNVLLKINAKLGGMNSKLALEHRQMIPVVTQIPTLILGMDVSHGSPGRADIPSIAAVVGSRCWPLISRYRASVRTQSPKVEMIDSLFKPLDDGKDDGIMRELLLDFYQTSQQRKPKQIIIFRDGVSESQFSQVLNVELNQIIKAYQSMGQGDLPKFTVIIAQKNHHTKLFQADSPENVPPGTVVDSGIVHPRQYDFYMCAHAGPIGTSRPTHYHVLLDEIGFSADNLQKLVLSLSYVYQRSTTAISVVAPICYAHLAAAQMGQFMKFEEFADTSSGSVNSSSPPSIPELPRLHADVCSSMFFC

SEQ ID NO: 190173 - protein, 608 aa, Zea Mays
MQAKKMLKNLRVKAKHNNMEFKIIGLSDQPCSRQMFPMKVRNGNIEIKSVDITVQDYFKSKQVELTMPYLPCLDVGKPKRPNYLPIELCHMVSLQRYTKALSSQQRAMLVEKSRQKPQERMRVVTDAVKSNMYDDDPILSSCGIEIEKQLTRVDARVLSAPALVVGNSEDCIPNRGRWNYNNKRLFDPVKIERWAIVNFSARCDMSRISRELINCGRSKGIFIECPHSLVDEDSQSRRCSPVERVEKMFEKVKASLPGPPEFLLCLLPERKNCDIYGPWKKKNLHEMGIVTQCIAPSNKMNDQYFTNVLLKINAKLGGMNSKLALEHRQMIPVVTQIPTLILGMDVSHGSPGRADIPSIAAVVGSRCWPLISRYRASVRTQSPKVEMIDSLFKPLDDGKDDGIMRELLLDFYQTSQQRKPKQIIIFRDGVSESQFSQVLNVELNQIIKAYQSMGQGDLPKFTVIIAQKNHHTKLFQADSPENVPPGTVVDSGIVHPRQYDFYMCAHAGPIGTSRPTHYHVLLDEIGFSADNLQKLVLSLSYVYQRSTTAISVVAPICYAHLAAAQMGQFMKFEEFADTSSGSVNSSSPPSIPELPRLHADVCSSMFFC

SEQ ID NO: 190174 - protein, 461 aa, Zea Mays
MPEHSMAAKMAGAVQVLKDDTVKRTPMARPSNGREGKPIRLLSNHFSVKLRGVDAVFYQYSVCIKSEDDKVVDSKGIGRKVIDKLLQTYCSELDGKDFAYDGEKCLFTVGPLPQNNFEFTVILEETSSRAAGGSPVHESPTQANKKRVKRSHLAKKFSVDISYAAKIPLQSVALALRGSESEHGQDVLRVLDVVLRQQQAKRGCLLVRQSFFSDDSRNLVDLTGGVSGCRGLHSSFRTTIGGLSLNMDVSTTMVVTPGPVIDFLVTNQNVRDIRDIDWPRAKKMLKNLRVKAKHNNMEFKIIGLSDQPCSRQMFPMKVRNGNIEIKSVDITVQDYFKSKQVELTMPYLPCLDVGKPKRPNYLPIELCHMVSLQRYTKALSSQQRAMLVEKSRQKPQERMRVVTDAVKSNMYDDDPILSSCGIEIEKQLTRVDARVLSAPALVVGNSEDCIPNREAIRSSQD

SEQ ID NO: 190175 - protein, 645 aa, Zea Mays
MAAKMAGAVQVLKDDTVKRTPMARPSNGREGKPIRLLSNHFSVKLRGVDAVFYQYSVCIKSEDDKVVDSKGIGRKVIDKLLQTYCSELDGKDFAYDGEKCLFTVGPLPQNNFEFTVILEETSSRAAGGSPVHESPTQANKKRVKRSHLAKKFSVDISYAAKIPLQSVALALRGSESEHGQDVLRVLDVVLRQQQAKRGCLLVRQSFFSDDSRNLVDLTGGVSGCRGLHSSFRTTIGGLSLNMDVSTTMVVTPGPVIDFLVTNQNVRDIRDIDWPRAKKMLKNLRVKAKHNNMEFKIIGLSDQPCSRQMFPMKVRNGNIEIKSVDITVQDYFKSKQVELTMPYLPCLDVGKPKRPNYLPIELCHMVSLQRYTKALSSQQRAMLVEKSRQKPQERMRVVTDAVKSNMYDDDPILSSCGIEIEKQLTRVDARVLSAPALVVGNSEDCIPNRGRWNYNNKRLFDPVKIERWAIVNFSARCDMSRISRELINCGRSKGIFIECPHSLVDEDSQSRRCSPVERVEKMFEKVKASLPGPPEFLLCLLPERKNCDIYGPWKKKNLHEMGIVTQCIAPSNKMNDQYFTNVLLKINAKLGGMNSKLALEHRQMIPVVTQIPTLILGMDVSHGSPGRADIPSIAAVDKDRNLHGEM

SEQ ID NO: 190176 - protein, 641 aa, Zea Mays
MAAKMAGAVQVLKDDTVKRTPMARPSNGREGKPIRLLSNHFSVKLRGVDAVFYQYSVCIKSEDDKVVDSKGIGRKVIDKLLQTYCSELDGKDFAYDGEKCLFTVGPLPQNNFEFTVILEETSSRAAGGSPVHESPTQANKKRVKRSHLAKKFSVDISYAAKIPLQSVALALRGSESEHGQDVLRVLDVVLRQQQAKRGCLLVRQSFFSDDSRNLVDLTGGVSGCRGLHSSFRTTIGGLSLNMDVSTTMVVTPGPVIDFLVTNQNVRDIRDIDWPRAKKMLKNLRVKAKHNNMEFKIIGLSDQPCSRQMFPMKVRNGNIEIKSVDITVQDYFKSKQVELTMPYLPCLDVGKPKRPNYLPIELCHMVSLQRYTKALSSQQRAMLVEKSRQKPQERMRVVTDAVKSNMYDDDPILSSCGIEIEKQLTRVDARVLSAPALVVGNSEDCIPNRGRWNYNNKRLFDPVKIERWAIVNFSARCDMSRISRELINCGRSKGIFIECPHSLVDEDSQSRRCSPVERVEKMFEKVKASLPGPPEFLLCLLPERKNCDIYGPWKKKNLHEMGIVTQCIAPSNKMNDQYFTNVLLKINAKLGGMNSKLALEHRQMIPVVTQIPTLILGMDVSHGSPGRADIPSIAASHSLNEQ

SEQ ID NO: 190177 - protein, 405 aa, Zea Mays
MDEEYEDNLFLQCDKCRMMVHARCYGELKQLDGGLWLCNLCRPGAPRVSPKCCLCPVTGGAMKPTTDGRWAHLACAIWIPETCLKDVKRMEPIDGLSRINKDRWKLVCSICGVSYGVCIQCSHPTCRVAYHPLCARAADLCIEVVQTDMASSSGCARTEPYNLHRRRGQKQPQVVATASLKRLYVENRPHIVSGYCQNRVGNTCGESIQPFGLSDAVQQEAIGNVSSMVEKYTIVKATFRKRLTFGKSKIHGYGVFAKVAHKAGDMMVEYIGEIVRPPISDTRERRIYNSLVGAGTYMFRIDDERVIDATRVGSIARLINHSCEPNCYSRAITILGDEHIIIFAKRDIDPWEELTYDYRFFSSDQRLPCFCGFPKCRGVVNDVEAEEQSAKIRVKRSELFEKSEK

SEQ ID NO: 190178 - protein, 580 aa, Zea Mays
MSIEDPHAVTLYKMEVLRNSDTKARPLFRVISEDGVQIDGSTPNACWKEIYRRIKEKQCTELERNVCQSSGSYMFGFSNPQIRQLIQELPNARSCLKYFENGGDTILGYRAVQVNWKDLDYCNVCDMDEEYEDNLFLQCDKCRMMVHARCYGELKQLDGGLWLCNLCRPGAPRVSPKCCLCPVTGGAMKPTTDGRWAHLACAIWIPETCLKDVKRMEPIDGLSRINKDRWKLVCSICGVSYGVCIQCSHPTCRVAYHPLCARAADLCIELENDDKIHHMYLDEDEDPCIRLLSYCKKHRQPSAAERPSLESDPPEPIQVVQTDMASSSGCARTEPYNLHRRRGQKQPQVVATASLKRLYVENRPHIVSGYCQNRVGNTCGESIQPFGLSDAVQQEAIGNVSSMVEKYTIVKATFRKRLTFGKSKIHGYGVFAKVAHKAGDMMVEYIGEIVRPPISDTRERRIYNSLVGAGTYMFRIDDERVIDATRVGSIARLINHSCEPNCYSRAITILGDEHIIIFAKRDIDPWEELTYDYRFFSSDQRLPCFCGFPKCRGVVNDVEAEEQSAKIRVKRSELFEKSEK

SEQ ID NO: 190179 - protein, 537 aa, Zea Mays
MSIEDPHAVTLYKMEVLRNSDTKARPLFRVISEDGVQIDGSTPNACWKEIYRRIKEKQCTELERNVCQSSGSYMFGFSNPQIRQLIQELPNARSCLKYFENGGDTILGYRAVQVNWKDLDYCNVCDMDEEYEDNLFLQCDKCRMMVHARCYGELKQLDGGLWLCNLCRPGAPRVSPKCCLCPVTGGAMKPTTDGRWAHLACAIWIPETCLKDVKRMEPIDGLSRINKDRWKLVCSICGVSYGVCIQCSHPTCRVAYHPLCARAADLCIELENDDKIHHMYLDEDEDPCIRLLSYCKKHRQPSAAERPSLESDPPEPIQVVQTDMASSSGCARTEPYNLHRRRGQKQPQVVATASLKRLYVENRPHIVSGYCQNRVGNTCGESIQPFGLSDAVQQEAIGNVSSMVEKYTIVKATFRKRLTFGKSKIHGYGVFAKVAHKAGDMMVEYIGEIVRPPISDTRERRIYNSLVGAGTYMFRIDDERVIDATRVGSIARLINHSCEPNCYSRAITILGDEHIIIFAKRDIDPWEELTYDYRSEG

SEQ ID NO: 190180 - protein, 1042 aa, Zea Mays
MVIAVEGNGFVHDDEEDDGDRPIRYLPLGHIYSSSTPAPAPRPPAQKKPRFDDGRPPMKVYYRRRRKKLRVDESLSPPSPTTAPLAPPERDEKAGPSRRKDSLKHELLSLGPASPALDGEEPERRLGRTRRCGGAEKTVCFSEPERRRQPARPKGSVGRRWVELDIQTADPNAFVGLVCKVFWPLDDDWYKGSIAWYNEATKKHSVKYDDGEAEDLSLADERIKFFISSEEMKSLNLKLGISNQDKKGHDELLALAVSFHDYQGLDPGDLVWAKITGHAMWPAVVVDESNVPATRALKSIRLDQSILVQFFGTHDFARIKLKQAVPFLNGLVSSLHLKCKQASFSRSLEEAKEFLHTQQLPEIMLQLRKSVQHDVSDVNSYEGKVDSCSNLSEALALQNGEDAEMTQIELGNLRVSNLGRIVSDSDHFHNKKDIWPEGYTAFRKYMSIEDPHAVTLYKMEVLRNSDTKARPLFRVISEDGVQIDGSTPNACWKEIYRRIKEKQCTELERNVCQSSGSYMFGFSNPQIRQLIQGGVGQRTSCKKEGYNTLKDAHFVIKNMKPLIISSLDVSLQGNYGSNCLDKLIYTTLLRNQELPNARSCLKYFENGGDTILGYRAVQVNWKDLDYCNVCDMDEEYEDNLFLQCDKCRMMVHARCYGELKQLDGGLWLCNLCRPGAPRVSPKCCLCPVTGGAMKPTTDGRWAHLACAIWIPETCLKDVKRMEPIDGLSRINKDRWKLVCSICGVSYGVCIQCSHPTCRVAYHPLCARAADLCIELENDDKIHHMYLDEDEDPCIRLLSYCKKHRQPSAAERPSLESDPPEPIQVVQTDMASSSGCARTEPYNLHRRRGQKQPQVVATASLKRLYVENRPHIVSGYCQNRVGNTCGESIQPFGLSDAVQQEAIGNVSSMVEKYTIVKATFRKRLTFGKSKIHGYGVFAKVAHKAGDMMVEYIGEIVRPPISDTRERRIYNSLVGAGTYMFRIDDERVIDATRVGSIARLINHSCEPNCYSRAITILGDEHIIIFAKRDIDPWEELTYDYRSEG

SEQ ID NO: 190181 - protein, 662 aa, Zea Mays
MLQLRKSVQHDVSDVNSYEGKVDSCSNLSEALALQNGEDAEMTQIELGNLRVSNLGRIVSDSDHFHNKKDIWPEGYTAFRKYMSIEDPHAVTLYKMEVLRNSDTKARPLFRVISEDGVQIDGSTPNACWKEIYRRIKEKQCTELERNVCQSSGSYMFGFSNPQIRQLIQELPNARSCLKYFENGGDTILGYRAVQVNWKDLDYCNVCDMDEEYEDNLFLQCDKCRMMVHARCYGELKQLDGGLWLCNLCRPGAPRVSPKCCLCPVTGGAMKPTTDGRWAHLACAIWIPETCLKDVKRMEPIDGLSRINKDRWKLVCSICGVSYGVCIQCSHPTCRVAYHPLCARAADLCIELENDDKIHHMYLDEDEDPCIRLLSYCKKHRQPSAAERPSLESDPPEPIQVVQTDMASSSGCARTEPYNLHRRRGQKQPQVVATASLKRLYVENRPHIVSGYCQNRVGNTCGESIQPFGLSDAVQQEAIGNVSSMVEKYTIVKATFRKRLTFGKSKIHGYGVFAKVAHKAGDMMVEYIGEIVRPPISDTRERRIYNSLVGAGTYMFRIDDERVIDATRVGSIARLINHSCEPNCYSRAITILGDEHIIIFAKRDIDPWEELTYDYRFFSSDQRLPCFCGFPKCRGVVNDVEAEEQSAKIRVKRSELFEKSEK

SEQ ID NO: 190182 - protein, 944 aa, Zea Mays
MVIAVEGNGFVHDDEEDDGDRPIRYLPLGHIYSSSTPAPAPRPPAQKKPRFDDGRPPMKVYYRRRRKKLRVDESLSPPSPTTAPLAPPERDEKAGPSRRKDSLKHELLSLGPASPALDGEEPERRLGRTRRCGGAEKTVCFSEPERRRQPARPKGSVGRRWVELDIQTADPNAFVGLVCKVFWPLDDDWYKGSIAWYNEATKKHSVKYDDGEAEDLSLADERIKFFISSEEMKSLNLKLGISNQDKKGHDELLALAVSFHDYQGLDPGDLVWAKITGHAMWPAVVVDESNVPATRALKSIRLDQSILVQFFGTHDFARIKLKQAVPFLNGLVSSLHLKCKQASFSRSLEEAKEFLHTQQLPEIMLQLRKSVQHDVSDVNSYEGKVDSCSNLSEALALQNGEDAEMTQIELGNLRVSNLGRIVSDSDHFHNKKDIWPEGYTAFRKYMSIEDPHAVTLYKMEVLRNSDTKARPLFRVISEDGVQIDGSTPNACWKEIYRRIKEKQCTELERNVCQSSGSYMFGFSNPQIRQLIQELPNARSCLKYFENGGDTILGYRAVQVNWKDLDYCNVCDMDEEYEDNLFLQCDKCRMMVHARCYGELKQLDGGLWLCNLCRPGAPRVSPKCCLCPVTGGAMKPTTDGRWAHLACAIWIPETCLKDVKRMEPIDGLSRINKDRWKLVCSICGVSYGVCIQCSHPTCRVAYHPLCARAADLCIELENDDKIHHMYLDEDEDPCIRLLSYCKKHRQPSAAERPSLESDPPEPIQVVQTDMASSSGCARTEPYNLHRRRGQKQPQVVATASLKRLYVENRPHIVSGYCQNRVGNTCGESIQPFGLSDAVQQEAIGNVSSMVEKYTIVKATFRKRLTFGKSKIHGYGVFAKVAHKAGDMMVEYIGEIVRPPISDTRERRIYNSLVERCALFHYRKNRVYIEYKGEESSNTHTHAHTK

SEQ ID NO: 190183 - protein, 591 aa, Zea Mays
MEEQHANARSFFWNQCISFMNKLILTNLASMEDNDDEACFSNMSIYEEGETGNRLAIWEDLELRGFLPLVPAHTILDFSSKHTFGNVGSTKEKKARVQRIFAAGKSLLNFVQIDQLRIYFDPSLKKFVLAKNSPVSRTNTPLHESPDALKTNGTEMDHKAARRFDSVSSNVGSLQSKVQFCPDGDDEEEIVFKPTAYEKFSKVSSDLSVNGYVHPVPVSAAGGPTNASLVPVQNTASMSATRLPSNPHATGLPSNGGSLPSTASLSAAGNYNTDQSLPRSSVGWTDWAVNSEQNVTPSIAPRFELMQSVEEPVSSWTSSGAQHVGPQHKHTGLTFPDVVSEPCVSASMVQCFSSSDYSKFLREQEIFLMNGLKTVNITGNGYLEQRLQPGLSGLQSMGYSSQIPIQPGGTTANLMHNHVKITGETVPSTLDSVVPSIAPSGGMPIKLTEAPLTASKKNPVSRPSKPVGPPPGFNHVTPKRQDDSIPVEKLQNPQVDDYSWLDSYQQSIDHVHSLRTIYPGVSDTSTAFATPFSFPGRIHTQGTNEKTWQDFHLFEPSKQNMFQTYHQRNLQSGQMDEQEPANSIWSSSYHV

SEQ ID NO: 190184 - protein, 1030 aa, Zea Mays
MMTVPMDSASAAPSSARDFAERLLTRNNELEDQLRKSAQSKVPSDPSIWLQMRDNFEKIILIDHDLSEQKEVEYLLWKLHYKRIEDFRRSISAASSAASQSGKSNANPDRVKRIKLTFKSFLSEATGFYHDLMLKIKSNLGLPLSYFPEGIDNANNSARDDKTTVQLKKGLISCHRCLIYLGDLARYKSSQGDGDSASREYAAASSYYMEAASIYPSSGNPHHQLAILASYSGNEVVAVYRYFRSLAADTPFTTARDNLIILFEKNRQSYRQLPDNNKVPSAKALPPRLSGRGQGRGEVKFQPKDVNAEAAEREQECNVRDTLKAFYIRFVRLTGILFTRTSLETFGELFSSVSNDLQILLSSGLEEDLNFGSDAAENALAAVRLTIILIFTVHNVNKEPDSQSYSELVQRRVLLQSAFTAAFDFVGRILRRCSELGDITSSFYLPAILVYIEWLASHPELAIDSEMEEQHANARSFFWNQCISFMNKLILTNLASMEDNDDEACFSNMSIYEEGETGNRLAIWEDLELRGFLPLVPAHTILDFSSKHTFGNVGSTKEKKARVQRIFAAGKSLLNFVQIDQLRIYFDPSLKKFVLAKNSPVSRTNTPLHESPDALKTNGTEMDHKAARRFDSVSSNVGSLQSKVQFCPDGDDEEEIVFKPTAYEKFSKVSSDLSVNGYVHPVPVSAAGGPTNASLVPVQNTASMSATRLPSNPHATGLPSNGGSLPSTASLSAAGNYNTDQSLPRSSVGWTDWAVNSEQNVTPSIAPRFELMQSVEEPVSSWTSSGAQHVGPQHKHTGLTFPDVVSEPCVSASMVQCFSSSDYSKFLREQEIFLMNGLKTVNITGNGYLEQRLQPGLSGLQSMGYSSQIPIQPGGTTANLMHNHVKITGETVPSTLDSVVPSIAPSGGMPIKLTEAPLTASKKNPVSRPSKPVGPPPGFNHVTPKRQDDSIPVEKLQNPQVDDYSWLDSYQQSIDHVHSLRTIYPGVSDTSTAFATPFSFPGRIHTQGTNEKTWQDFHLFEPSKQNSLSW

SEQ ID NO: 190185 - protein, 1033 aa, Zea Mays
MQNNELEDQLRKSAQSKVPSDPSIWLQMRDNFEKIILIDHDLSEQKEVEYLLWKLHYKRIEDFRRSISAASSAASQSGKSNANPDRVKRIKLTFKSFLSEATGFYHDLMLKIKSNLGLPLSYFPEGIDNANNSARDDKTTVQLKKGLISCHRCLIYLGDLARYKSSQGDGDSASREYAAASSYYMEAASIYPSSGNPHHQLAILASYSGNEVVAVYRYFRSLAADTPFTTARDNLIILFEKNRQSYRQLPDNNKVPSAKALPPRLSGRGQGRGEVKFQPKDVNAEAAEREQECNVRDTLKAFYIRFVRLTGILFTRTSLETFGELFSSVSNDLQILLSSGLEEDLNFGSDAAENALAAVRLTIILIFTVHNVNKEPDSQSYSELVQRRVLLQSAFTAAFDFVGRILRRCSELGDITSSFYLPAILVYIEWLASHPELAIDSEMEEQHANARSFFWNQCISFMNKLILTNLASMEDNDDEACFSNMSIYEEGETGNRLAIWEDLELRGFLPLVPAHTILDFSSKHTFGNVGSTKEKKARVQRIFAAGKSLLNFVQIDQLRIYFDPSLKKFVLAKNSPVSRTNTPLHESPDALKTNGTEMDHKAARRFDSVSSNVGSLQSKVQFCPDGDDEEEIVFKPTAYEKFSKVSSDLSVNGYVHPVPVSAAGGPTNASLVPVQNTASMSATRLPSNPHATGLPSNGGSLPSTASLSAAGNYNTDQSLPRSSVGWTDWAVNSEQNVTPSIAPRFELMQSVEEPVSSWTSSGAQHVGPQHKHTGLTFPDVVSEPCVSASMVQCFSSSDYSKFLREQEIFLMNGLKTVNITGNGYLEQRLQPGLSGLQSMGYSSQIPIQPGGTTANLMHNHVKITGETVPSTLDSVVPSIAPSGGMPIKLTEAPLTASKKNPVSRPSKPVGPPPGFNHVTPKRQDDSIPVEKLQNPQVDDYSWLDSYQQSIDHVHSLRTIYPGVSDTSTAFATPFSFPGRIHTQGTNEKTWQDFHLFEPSKQNMFQTYHQRNLQSGQMDEQEPANSIWSSSYHV

SEQ ID NO: 190186 - protein, 848 aa, Zea Mays
MVILLAVNTQRHLVTTWRLLLSILPVATLIIRYFRSLAADTPFTTARDNLIILFEKNRQSYRQLPDNNKVPSAKALPPRLSGRGQGRGEVKFQPKDVNAEAAEREQECNVRDTLKAFYIRFVRLTGILFTRTSLETFGELFSSVSNDLQILLSSGLEEDLNFGSDAAENALAAVRLTIILIFTVHNVNKEPDSQSYSELVQRRVLLQSAFTAAFDFVGRILRRCSELGDITSSFYLPAILVYIEWLASHPELAIDSEMEEQHANARSFFWNQCISFMNKLILTNLASMEDNDDEACFSNMSIYEEGETGNRLAIWEDLELRGFLPLVPAHTILDFSSKHTFGNVGSTKEKKARVQRIFAAGKSLLNFVQIDQLRIYFDPSLKKFVLAKNSPVSRTNTPLHESPDALKTNGTEMDHKAARRFDSVSSNVGSLQSKVQFCPDGDDEEEIVFKPTAYEKFSKVSSDLSVNGYVHPVPVSAAGGPTNASLVPVQNTASMSATRLPSNPHATGLPSNGGSLPSTASLSAAGNYNTDQSLPRSSVGWTDWAVNSEQNVTPSIAPRFELMQSVEEPVSSWTSSGAQHVGPQHKHTGLTFPDVVSEPCVSASMVQCFSSSDYSKFLREQEIFLMNGLKTVNITGNGYLEQRLQPGLSGLQSMGYSSQIPIQPGGTTANLMHNHVKITGETVPSTLDSVVPSIAPSGGMPIKLTEAPLTASKKNPVSRPSKPVGPPPGFNHVTPKRQDDSIPVEKLQNPQVDDYSWLDSYQQSIDHVHSLRTIYPGVSDTSTAFATPFSFPGRIHTQGTNEKTWQDFHLFEPSKQNMFQTYHQRNLQSGQMDEQEPANSIWSSSYHV

SEQ ID NO: 190187 - protein, 429 aa, Zea Mays
MDYGPSDSSGTDDDLPQLPHRSIRGSGRVSGNGRTIVPAGSYARAPTDMEAQIQQLEQEAYCSVLRAFKAQSDAITWEKEGLMTELRKELRVSDKAHRELLNKVNNDNIICSIREWRSTGGLQASMSNNPQPIHDPVPSPTTSGRKRQKTSQSVPALPAPPAMHSQQLATPTQPSSSTARKAVPPVPKGKKTKPGQKVPGGSAAKPMPSSAGPSGRGPHMNRNFPGGSAPEAQAQNVDPLVGRKVMSRWPEDNSFYEAVISDYNAETMGPEDIRWKEDDSGIDPVVYLRSRGAPSSGVRKPTGRGGPMPGSGRGRGLPKNMSRKDFPPPQNGVGKRSSDDIDILHTESLIKEVEKVFSVSNPDPQEVEKAKKALKEQEQSLIDAIARLAEASDGESDGLNRGRRNLYAGNQHQANYVDDMPVGDQADAM

SEQ ID NO: 190188 - protein, 493 aa, Zea Mays
MQPLQVRRFSPFSLSLFFTLDRNRSARYHTNSSRAVAAQLPPPSSPNLAGFRPPPSPRICRRFASVPERVALPVVLVVVGGVAAEGRSWTTGPLTAAELMMIFHNFHIGVSEAADVLVEKEGLMTELRKELRVSDKAHRELLNKVNNDNIICSIREWRSTGGLQASMSNNPQPIHDPVPSPTTSGRKRQKTSQSVPALPAPPAMHSQQLATPTQPSSSTARKAVPPVPKGKKTKPGQKVPGGSAAKPMPSSAGPSGRGPHMNRNFPGGSAPEAQAQNVDPLVGRKVMSRWPEDNSFYEAVISDYNAETGLYVLVYDINTANETWEWVDLKEMGPEDIRWKEDDSGIDPVVYLRSRGAPSSGVRKPTGRGGPMPGSGRGRGLPKNMSRKDFPPPQNGVGKRSSDDIDILHTESLIKEVEKVFSVSNPDPQEVEKAKKALKEQEQSLIDAIARLAEASDGESDGLNRGRRNLYAGNQHQANYVDDMPVGDQADAM

SEQ ID NO: 190189 - protein, 431 aa, Zea Mays
MDYGPSDSSGTDDDLPQLPHRSIRGSGRVSGNGRTIVPAGSYARAPTDMEAQIQQLEQEAYCSVLRAFKAQSDAITWEKEGLMTELRKELRVSDKAHRELLNKVNNDNIICSIREWRSTGGLQASMSNNPQPIHDPVPSPTTSGRKRQKTSQSVPALPAPPAMHSQQLATPTQPSSSTARKAVPPVPKGKKTKPGQKVPGGSAAKPMPSSAGPSGRGPHMNRNFPGGSAPEAQAQNVDPLVGRKVMSRWPEDNSFYEAVISDYNAETGLYVLVYDINTANETWEWVDLKEMGPEDIRWKEDDSGIDPVVYLRSRGAPSSGVRKPTGRGGPMPGSGRGRGLPKNMSRKDFPPPQNGVGKRSSDDIDILHTESLIKEVEKVFSVSNPDPQEVEKAKKALKEQEQSLIDAIARLAEASDGESGPVTAVSSTFYI

SEQ ID NO: 190190 - protein, 261 aa, Zea Mays
MMSGRKTKHTVRGFLYAASRIVLGAHSLFQGSSSSQSRQEALLRHARLELRERHITLQRSTDEEDDEEEEVQHHEEQVAATDAGVQGHEEEEVTGVDAEADDDTIGAPAFRRRGTRKGHFVLPPSVPAQSEARILIISVGDSQWDDTSFDDRGHHRQVNQVLGNLCHLHNPGIVTDSKGVVVPCTSWSHFALAPHATYGTAQGVVKHDFWRRYCVEPEAQEHADRVLEKNAKKVCKDAFSNPRLQVVNAYMKHQGHSINNF

SEQ ID NO: 190191 - protein, 468 aa, Zea Mays
MKYMKLGSKPDTFYTEEAVRSVVSDIPADLIIHVNNTKYQLHKFPLLLKCGLLQRLCSDTDDGDEEPVPVALHDIPGGEQAFELCAKFCYGISISISAGNLVPAMLAARFLRMTEAVAKGNLVAKLETFFDSCVLQGWKDSVAALQAAWRISGWNESRIVQPCIDSIVEKILLPPSKVTWSYTYTRPGYNSTRKPHQSVPKDWWTEDISDLDIEVFRSVISTVRASRLLPPPLIGEALHVYACKHLVDPLHVASDAGLTANGVLHQPPQSSDDGEEKLVAMQRRVLESIVTMVPGEPGSVTGRFLLRLLRVANYVSASSSTRAQLIRQAGSQLDEARAADLLIPLPSDPHAYDVGTAEAVLEHFLAQFQRPAPTDERRRMSAAMEKVARIFDEYLRTIALDRSFPVGKFVDLVECLPDIARSDHDGLYYAIDIYLKVRKLQDRNICHGFELMDILRWRAGAPGAEQGG

SEQ ID NO: 190192 - protein, 122 aa, Zea Mays
MPYGKEVLVTVGAGSGGGVGDLLDMRSMVAERAANWWSIICWKAMKSAWETVADVAATDVLTAEVVGGVDPGGTSSKPDITDTRLLGLGLRRSYEWAARLLVITKILLTNPAGSSQKPIPTQ

SEQ ID NO: 190193 - protein, 160 aa, Zea Mays
MVKTTWETGEDTVVAGVGAEAAGSTSNLFAPHGPELPSSPCRRDRSGEQPWCLCACLDPCLDVSHLVDLGFFGDFVLGVGLRSCVPWWLTLEISFLCPTFSFPESPSRFPLDPAGAVPFPSSTQGHRHLLLVLLNRPVQHGLLAGVQLGLWRNSVVCFLQ

SEQ ID NO: 190194 - protein, 125 aa, Zea Mays
MVKTTWETGEDTVVAGVGAEAAGSTSNLFAPHGPELPSSPCRRDRSGEQPWCLCLSLEMKGHVIFLSNKNNTCLLLILPLDKRTLCFCVQAILANSLFGCLMNHVCMLLLDQLYFELPTIMFWQA

SEQ ID NO: 190195 - protein, 67 aa, Zea Mays
MFLLFCYVIYVHDKIIMLMGTVGTMLRRRRSYKKKQLQLKLLEHDAEDTVHEASELQHIRRRRVEPT

SEQ ID NO: 190196 - protein, 529 aa, Zea Mays
MSRLSFRPRPLDIHKKLPILKSVREFEDEEPGIAPLSSARAGVLLRHSGADFTASGANNATEGEGNQALSKKNAQEIPTPQFDGVDTYERDYTRTFAQPTSYIRGRGARAEIGEFVEYDLDNEDEDWLEEFNSERKNINPEKLINNGINIVFSAFFPTKSFINITHIYVIWFGLPSLRWKVAPSKLEALLFKLEVLDHRARERAGAITPTFIGPVPVLLQLDAAMEALQYLSVRNAVFQAVYNYWKSKRERWQKPILRRLQPPPPVNDTNPYNVFRPREKAHRLHTRRMQRRENNIQSFEKLRLVRRNLEQAKALMDALIKREETKREAMECQVNLQRVQMKYKHEAQLVEDGTTLSGFQQTSSRFESSDDDVDSDDTATEQTYIRPAVFHPRFSANKLSVIPPLRIKRERELKRRPQQNGCVFKRVSSHHQILLLRMVPHHHHFGVEVGLDEAAASSLIDGILFSGHQLTRRLIMCHTVTGPPHLKVEAVFHMHIVLNGTGTAMEFVKPLSNCFSIGAKLALGESIVS

SEQ ID NO: 190197 - protein, 285 aa, Zea Mays
MEALQYLSVRNAVFQAVYNYWKSKRERWQKPILRRLQPPPPVNDTNPYNVFRPREKAHRLHTRRMQRRENNIQSFEKLRLVRRNLEQAKALMDALIKREETKREAMECQVNLQRVQMKYKHEAQLVEDGTTLSGFQQTSSRFESSDDDVDSDDTATEQTYIRPAVFHPRFSANKLSVIPPLRIKRERELKRRPQQNGCVFKRDPEEPVFLFTRPLDPEKLVAAGIKPPPDPPIENGATSPPFRCRGRIGRGGRIIFDRWNPLLRTPIDQETYYVPYGHRPPSPEG

SEQ ID NO: 190198 - protein, 419 aa, Zea Mays
MSRLSFRPRPLDIHKKLPILKSVREFEDEEPGIAPLSSARAGVLLRHSGADFTASGANNATEGEGNQALSKKNAQEIPTPQFDGVDTYERDYTRTFAQPTSYIRGRGARAEIGEFVEYDLDNEDEDWLEEFNSERKNINPEKLEALLFKLEVLDHRARERAGAITPTFIGPVPVLLQLDAAMEALQYLSVRNAVFQAVYNYWKSKRERWQKPILRRLQPPPPVNDTNPYNVFRPREKAHRLHTRRMQRRENNIQSFEKLRLVRRNLEQAKALMDALIKREETKREAMECQVNLQRVQMKYKHEAQLVEDGTTLSGFQQTSSRFESSDDDVDSDDTATEQTYIRPAVFHPRFSANKLSVIPPLRIKRERELKRRPQQNGCVFKRVGCLSLLLLSFSYRSLSKKREEKTVLNTCFMLTPLA

SEQ ID NO: 190199 - protein, 479 aa, Zea Mays
MSRLSFRPRPLDIHKKLPILKSVREFEDEEPGIAPLSSARAGVLLRHSGADFTASGANNATEGEGNQALSKKNAQEIPTPQFDGVDTYERDYTRTFAQPTSYIRGRGARAEIGEFVEYDLDNEDEDWLEEFNSERKNINPEKLEALLFKLEVLDHRARERAGAITPTFIGPVPVLLQLDAAMEALQYLSVRNAVFQAVYNYWKSKRERWQKPILRRLQPPPPVNDTNPYNVFRPREKAHRLHTRRMQRRENNIQSFEKLRLVRRNLEQAKALMDALIKREETKREAMECQVNLQRVQMKYKHEAQLVEDGTTLSGFQQTSSRFESSDDDVDSDDTATEQTYIRPAVFHPRFSANKLSVIPPLRIKRERELKRRPQQNGCVFKRIQDPEEPVFLFTRPLDPEKLVAAGIKPPPDPPIENGATSPPFRCRGRIGRGGRIIFDRWNPLLRTPIDQETYYVPYGHRPPSPEGAKLALGESIVS

SEQ ID NO: 190200 - protein, 486 aa, Zea Mays
MSRLSFRPRPLDIHKKLPILKSVREFEDEEPGIAPLSSARAGVLLRHSGADFTASGANNATEGEGNQALSKKNAQEIPTPQFDGVDTYERDYTRTFAQPTSYIRGRGARAEIGEFVEYDLDNEDEDWLEEFNSERKNINPEKLEALLFKLEVLDHRARERAGAITPTFIGPVPVLLQLDAAMEALQYLSVRNAVFQAVYNYWKSKRERWQKPILRRLQPPPPVNDTNPYNVFRPREKAHRLHTRRMQRRENNIQSFEKLRLVRRNLEQAKALMDALIKREETKREAMECQVNLQRVQMKYKHEAQLVEDGTTLSGFQQTSSRFESSDDDVDSDDTATEQTYIRPAVFHPRFSANKLSVIPPLRIKRERELKRRPQQNGCVFKRVSSHHQILLLRMVPHHHHFGVEVGLDEAAASSLIDGILFSGHQLTRRLIMCHTVTGPPHLKVEAVFHMHIVLNGTGTAMEFVKPLSNCFSIGAKLALGESIVS

SEQ ID NO: 190201 - protein, 175 aa, Zea Mays
MVLHRRISLSSARSRAPRFWPDLAQLGPSRLRLSAPAARPCCACQLVCCAREFSLLAGAFARLPVRCRDCHQIIGVAQLINRILVGHQFHIRHGPHVSRPYPNLPARRLTVVFLEIPCRPTSRLSSSRRVCSSIYATLLYHRRSCHPLFDPHLTSSLQTQSLHRFVCHQEISSVG

SEQ ID NO: 190202 - protein, 146 aa, Zea Mays
MSRPEHRRIPVKHQKALWFSGLRGAMAFALALQSVHELPEGHGKTIFTTTTAIVVLTVLLIGGSTGTMLESLDVVGDENTSRENYEDNNGYMPPSYEEGTSSGGGLRMKLKQFHKSTTSFTALDKNYLTPFFTSQTDDDNDDDFSE

SEQ ID NO: 190203 - protein, 331 aa, Zea Mays
MAISLYRTMSSVRSHAAGGENFFMMILQFLETFVGSMSSGVGVGFISALLFKYAGLDVDNLQNLECCLFVLFPYFSYMLAEGLGLSGIVSILFTGMVMKHYTYSNLSDNSQRFVSAFFHLLSSLAETFVFIYMGFDIAMEEHSWSHVGFIFFSIIFIVVARAANVFSCAYLVNMSRPEHRRIPVKHQKALWFSGLRGAMAFALALQSVHELPEGHGKTIFTTTTAIVVLTVLLIGGSTGTMLESLDVVGDENTSRENYEDNNGYMPPSYEEGTSSGGGLRMKLKQFHKSTTSFTALDKNYLTPFFTSQTDDDNDDDFSQQPQNRRLAFYDQ

SEQ ID NO: 190204 - protein, 191 aa, Zea Mays
MRAPAPAAPIPALLSRCSSPPSSAPRRLLSSSRTPAACCPPPAVVRSVSVDLLAVAGEPAVAGAPSATPCRRLILLRHGDSATGGRFTRDHDRPLSKAGRADAISVSNKLQQMGWVPELILCSDAMRTKETLKILQEHVHGLSEAVVHFIPSFYSIAAMDGQTAEHLQKAICEYSSDEILTVIITTQVHGS

SEQ ID NO: 190205 - protein, 115 aa, Zea Mays
MRTKETLKILQEHVHGLSEAVVHFIPSFYSIAAMDGQTAEHLQKAICEYSSDEILTVMCMGHNKGWEEAASMFSGDSVLLETCNAALLEAAGKSWVEAFFVAGLGGWKLHGIVKP

SEQ ID NO: 190206 - protein, 128 aa, Zea Mays
MGWVPELILCSDAMRTKETLKILQEHVHGLSEAVVHFIPSFYSIAAMDGQTAEHLQKAICEYSSDEILTVMCMGHNKGWEEAASMFSGDSVLLETCNAALLEAAGKSWVEAFFVAGLGGWKLHGIVKP

SEQ ID NO: 190207 - protein, 146 aa, Zea Mays
MAKRRGSPYAQSRFLPSASSSRTAALVSARPDERRPPGLLPPPCARSAPFPTVLDKRFERVVLPSSSSNEKSSRLHVDVVDHHPRLRQAPSREDALVMATRHRLDKKESMGIWSRIETMCFARQTCVIKDVNRKPSSCFRLSRRIS

SEQ ID NO: 190208 - protein, 87 aa, Zea Mays
MYNGWSSNRCHSDEWVTKAKHFVDRTFSLSLTGTVRSPCRRHENSTFLNKEIIILDLYQFGFMPEYEVWENHGEVVPSPNVEEENND

SEQ ID NO: 190209 - protein, 104 aa, Zea Mays
MQKLPSFDEDWARQRSDADAADEVLRYVGVVDTVNKRGQVELRRYKRDHPFAQLSGSDNIIAFTTSRYKEQPLIVRGPGAGAEVTAGGVFCDILRLASYLGAPS

SEQ ID NO: 190210 - protein, 788 aa, Zea Mays
MQSLTVARALPPAVATARRRPRASSSSREAVLQCWKYELSQDQYLGGSLRIGSSQGSLDIHRSTNLLRPAAASVSVEQDEVNTYLPKGDMWSVHKFGGTCMGTSQRIQSVANIVLGDSSERKLIIVSAMSKVTDMMYNLVQKAQSRDDSYTIALEEVFEKHMVAAKDLIDGEDLARFLSQLHSDVSNLRAMLRAIYIAGHATESFSDFVVGHGELWSAQMLSYAIKKSYFGANVLHPRTIIPVMKDNIPIVIRNMFNLSASGTMICKQPANENGDLDACVKSFATIDNLALVNVEGTGMAGVPGTASAIFSTVKDVGANVIMISQASSEHSVCFAVPEKEVAAVSARLHDRFHEALAAGRLSKVEVINGCSILAAVGLRMASTPGVSAILFDALAKANINVRAIAQGCSEYNITVVLKQEDCVRALRAAHSRFFLSKTTLAVGIIGPGLIGRTLLNQLKDQVAALKENMNIDLRVIGITGSSTMLLSDTGIDLTQWKQLLKKEAEPADIDSFVHHLSDNHVFPNKVLVDCTADTSVASHYYNWLKKGIHVITPNKKANSGPLDQYLKLRTLQRASYTHYFYEATVGAGLPIISTLRGLLETGDKILRIEGIFSGTLSYIFNNFEGTRAFSDVVAEAKEAGYTEPDPRDDLSGTDVARKVIILARESGLRLELSDIPVKSLVPETLAKLPSFDEDWARQRSDADAADEVLRYVGVVDTVNKRGQVELRRYKRDHPFAQLSGSDNIIAFTTSRYKEQPLIVRGPGAGAEVTAGGVFCDILRLASYLGAPS

SEQ ID NO: 190211 - protein, 597 aa, Zea Mays
MQSLTVARALPPAVATARRRPRASSSSREAVLQCWKYELSQDQYLGGSLRIGSSQGSLDIHRSTNLLRPAAASVSVEQDEVNTYLPKGDMWSVHKFGGTCMGTSQRIQSVANIVLGDSSERKLIIVSAMSKVTDMMYNLVQKAQSRDDSYTIALEEVFEKHMVAAKDLIDGEDLARFLSQLHSDVSNLRAMLRAIYIAGHATESFSDFVVGHGELWSAQMLSYAIKKSYFGANVLHPRTIIPVMKDNIPIVIRNMFNLSASGTMICKQPANENGDLDACVKSFATIDNLALVNVEGTGMAGVPGTASAIFSTVKDVGANVIMISQASSEHSVCFAVPEKEVAAVSARLHDRFHEALAAGRLSKVEVINGCSILAAVGLRMASTPGVSAILFDALAKANINVRAIAQGCSEYNITVVLKQEDCVRALRAAHSRFFLSKTTLAVGIIGPGLIGRTLLNQLKDQVAALKENMNIDLRVIGITGSSTMLLSDTGIDLTQWKQLLKKEAEPADIDSFVHHLSDNHVFPNKVLVDCTADTSVASHYYNWLKKGIHVITPNKKANSGPLDQQLLVLASQSLVPCEVFWRRVTRYCVLRAFSVEL

SEQ ID NO: 190212 - protein, 576 aa, Zea Mays
MWSVHKFGGTCMGTSQRIQSVANIVLGDSSERKLIIVSAMSKVTDMMYNLVQKAQSRDDSYTIALEEVFEKHMVAAKDLIDGEDLARFLSQLHSDVSNLRAMLRAIYIAGHATESFSDFVVGHGELWSAQMLSYAIKKSYFGANVLHPRTIIPVMKDNIPIVIRNMFNLSASGTMICKQPANENGDLDACVKSFATIDNLALVNVEGTGMAGVPGTASAIFSTVKDVGANVIMISQASSEHSVCFAVPEKEVAAVSARLHDRFHEALAAGRLSKVEVINGCSILAAVGLRMASTPGVSAILFDALAKANINVRAIAQGCSEYNITVVLKQEDCVRALRAAHSRFFLSKTTLAVGIIGPGLIGRTLLNQLKDQVAALKENMNIDLRVIGITGSSTMLLSDTGIDLTQWKQLLKKEAEPADIDSFVHHLSDNHVFPNKVLVDCTADTSVASHYYNWLKKGIHVITPNKKANSGPLDQYLKLRTLQRASYTHYFYEATVGAGLPIISTLRGLLETGDKILRIEGIFSGTLSYIFNNFEGTRAFSDVVAEAKEAGYTEPDPRDDLSGTDVARKQESLQNI

SEQ ID NO: 190213 - protein, 622 aa, Zea Mays
MQSLTVARALPPAVATARRRPRASSSSREAVLQCWKYELSQDQYLGGSLRIGSSQGSLDIHRSTNLLRPAAASVSVEQDEVNTYLPKGDMWSVHKFGGTCMGTSQRIQSVANIVLGDSSERKLIIVSAMSKVTDMMYNLVQKAQSRDDSYTIALEEVFEKHMVAAKDLIDGEDLARFLSQLHSDVSNLRAMLRAIYIAGHATESFSDFVVGHGELWSAQMLSYAIKKSYFGANVLHPRTIIPVMKDNIPIVIRNMFNLSASGTMICKQPANENGDLDACVKSFATIDNLALVNVEGTGMAGVPGTASAIFSTVKDVGANVIMISQASSEHSVCFAVPEKEVAAVSARLHDRFHEALAAGRLSKVEVINGCSILAAVGLRMASTPGVSAILFDALAKANINVRAIAQGCSEYNITVVLKQEDCVRALRAAHSRFFLSKTTLAVGIIGPGLIGRTLLNQLKDQVAALKENMNIDLRVIGITGSSTMLLSDTGIDLTQWKQLLKKEAEPADIDSFVHHLSDNHVFPNKVLVDCTADTSVASHYYNWLKKGIHVITPNKKANSGPLDQYLKLRTLQRASYTHYFYEATVGAGLPIISTLRGLLETGDKILRIEGIFSFSALSHTAR

SEQ ID NO: 190214 - protein, 153 aa, Zea Mays
MASNVTFQSRNVLSKKLMVKKEESLDNINLFSIITVMSFFLLAPVTLLTEGVKVSPAVLQSAGLNLKQIYTRSLIAACCFHAYQQVSYMILARVSPVTHSVGNCVKRVVVIVTSVLFFRTPVSPINSLGTGIALAGVFLYSQLKRLKPKPKAA

SEQ ID NO: 190215 - protein, 463 aa, Zea Mays
MEEPTSTRVADKNLCAICLELLSTSISSDVDSGEAAAIYTAQCSHSFHFLCIASNIRHGNVSCPICRAQWSELPRDLKVPPLLHNQSDPILRILDDNIASSRVNRRSSIRAARYNDDDPVEPFTLAEHVDPCLRFVLIPAPVSAHHHVLGHYPCGRMLPLQQPCQYSGSSMLSPPQIASPSGQRRAYLSVSLAPQPAMDLVLVASPNGPHLRLLKQAMALVVFSMRAIDRLAIVTNATTATRAFPLRRMTSHAKRMALQVIEHLCCVGGTDPVGALHKGLKILEDRAHRNPSNCILHLSDHPVRNCVGGVDMNHSSIPVHQFHVGLGFGVRSGFIMHEFEELLARLLGGVIGDTQLRIGEHGGMVRLGELRGGEERRIPLDLAADCGFILVGYSYLEGGREEQLRTGEIAVGFEEKGDNGYCGMREMGLSIGGERRSCCAERRDYHDPFMARRWAKHFNVYRA

SEQ ID NO: 190216 - protein, 882 aa, Zea Mays
MDDRYMQRADERHSIERGRKRQPSPENTIDKHKRNRSTDPSDVLWIGFPPGLKVDETLLWEAFSPFGKVLRVTTFPGRTYAFVQYTSIAAACRAKEALQGKLFNNPRVSICFSRNEGAVPELGKQSFVAQYHPQPSARPVVGDQDYEDFPRARPFDSPPRNFRMSPPHFVPNSLPRDADDVGFSKGNYFEQETGIELGRVSNIEPFRTRELGQERRLPEEHEPHRQSPTARSDAPWKPWNNIPFDRPWRPLPFEDSWDVEDKSYLISKKLKGAQVHDTELPEYLFSGFDRGKVYPEYQRRPHHDLSEDGLQSRTSSSTDLHGRHHVHPLKNITPLTNKHEPWRAQESFDRRLGKMDRSTPDYNEPALKDEWKWNGTIAKGGTPICRARCFPVGKVLNFMLPEFLDCTARTSLDMLSKHYYQATGSWVVFFVPENDADMTAYNDFMSYLGDKQRAAVCKLGESSTLFLVPPSDFSEQVLRVPGNVSISGVILRFQQSNPDYSSPNRKPLDRAHPSSASNFNTDVRNCEDLHALRRLNPSDISTFPQGPDYVCSSGGSYTPANADFIPPYKPESAPPYVVPQSPQERPPAELPMGIAQGQHQQLPNRLPSGWSNNLDNPNPNPGSGNFSLAQGAISNRTQDPYTFAPGVVSTGTASGYASGEASNSMSWASMQYNSQQVARSDQPTIPVSLPPDQLAQLAALLARQNQPRKVGLPVDSSNNLSGFIQSPNPHGHATMMPGNSGSIPIQNSLPPVPSMQQLHANVPVSPIGSLPANPFNVPTSAPVLCNSTSPMLPSHALVNPAHSSMPMRPFIPPLPEGPPPFQQQTSSAVTVQPLGPSSQQSSQQLLAQDLDGDPQKRLQATLQLAATLLKQIQNQSNPGGQK

SEQ ID NO: 190217 - protein, 469 aa, Zea Mays
MLSKHYYQATGSWVVFFVPENDADMTAYNDFMSYLGDKQRAAVCKLGESSTLFLVPPSDFSEQVLRVPGNVSISGVILRFQQSNPDYSSPNRKPLDRAHPSSASNFNTDVRNCEDLHALRRLNPSDISTFPQGPDYVCSSGGSYTPANADFIPPYKPESAPPYVVPQSPQERPPAELPMGIAQGQHQQLPNRLPSGWSNNLDNPNPNPGSGNFSLAQGAISNRTQDPYTFAPGVVSTGTASGYASGEASNSMSWASMQYNSQQVARSDQPTIPVSLPPDQLAQLAALLARQNQPRKVGLPVDSSNNLSGFIQSPNPHGHATMMPGNSGSIPIQNSLPPVPSMQQLHANVPVSPIGSLPANPFNVPTSAPVLCNSTSPMLPSHALVNPAHSSMPMRPFIPPLPEGPPPFQQQTSSAVTVQPLGPSSQQSSQQLLAQDLDGDPQKRLQATLQLAATLLKQIQNQSNPGGQK

SEQ ID NO: 190218 - protein, 51 aa, Zea Mays
MGKITEKDIMMICDQFQRLDTGSCGKITLSDLLESHHLVSEPRDKKKGKKS

SEQ ID NO: 190219 - protein, 54 aa, Zea Mays
MINLCSFFFLLFFPLFFPSFSPCHFGGRMTWYMNAPCLLASCVRQGRKATDFSL

SEQ ID NO: 190220 - protein, 57 aa, Zea Mays
MTMSTADIPVLHSIKVAHLYPQVMLPICHGVVRAPYTSTNEAKQGNTTRHLQSSTNF

SEQ ID NO: 190221 - protein, 58 aa, Zea Mays
MRLLMIINHFLFDLSHLIISMPYYITLCLYRGTPSLGSIGLSFWSAKSSSQSEQHVYF

SEQ ID NO: 190222 - protein, 218 aa, Zea Mays
MKRLDDTDFYLCEVSSNMVIDATNKGNLSRFINHSCEPNTAMQKWTVDGETRVGIFALRDIKIGEELTYDYKFVQFGAAQVCHCGSSKCRKMLGTTKYSGSSQNHRTKKKKRKTSCENCIQQFLRLWHPRQKMYVGCWIVDFDQGTKMHTLQFIDHHTEKFDLKEEEWHFLEVLRCQRKMNKWMMLNEQGFNFNPFYFNYSIVLYYTVLLSYFFSVLL

SEQ ID NO: 190223 - protein, 342 aa, Zea Mays
MVRMSSSSSASGVNLTEQIENVFDQLISKIEQADPDFDPRPFLKQLNVLGRYEPIKRNVYFTKRYIEDYGISCHCKPSPGSSVVCGRDCYCSMLFSCCSSQCECDIACTNKSFQHRPLTKTKLIKTEKCGHGLVAEDEIKKGEFVIEYVGEVIDDRTCENRLWTMKRLDDTDFYLCEVSSNMVIDATNKGNLSRFINHSCEPNTAMQKWTVDGETRVGIFALRDIKIGEELTYDYKFVQFGAAQVCHCGSSKCRKMLGTTKYSGSSQNHRTKKKKRKTSCENCIQQFLRLWHPRQKMYVGCWIVDFDQGTKMHTLQFIDHHTEKFDLKEEEWHFLEVLGTNF

SEQ ID NO: 190224 - protein, 245 aa, Zea Mays
MLFSCCSSQCECDIACTNKSFQHRPLTKTKLIKTEKCGHGLVAEDEIKKGEFVIEYVGEVIDDRTCENRLWTMKRLDDTDFYLCEVSSNMVIDATNKGNLSRFINHSCEPNTAMQKWTVDGETRVGIFALRDIKIGEELTYDYKFVQFGAAQVCHCGSSKCRKMLGTTKYSGSSQNHRTKKKKRKTSCENCIQQFLRLWHPRQKMYVGCWIVDFDQGTKMHTLQFIDHHTEKFDLKEEEWHFLEV

SEQ ID NO: 190225 - protein, 89 aa, Zea Mays
MHSKKAHTVGLIATPDVHSFELTKKDHFIILGCDGLWGVFGPGDAVEFVQNQLKETSSATLAVRRLVKEAVRERRCKDNCTAVLIVFRH

SEQ ID NO: 190226 - protein, 65 aa, Zea Mays
MAYQLRYIFNDQVRYIFEYCSVKLLPKLTVTISEGQRSSRNSVQKMCNPSKQIYNGYTRGDNGNY

SEQ ID NO: 190227 - protein, 181 aa, Zea Mays
MFCLDAFYFYGLCCLSLSVSKYAYLFLLLHAFMVNGNSAVLELLFQSIYPAKILKLNFRERKENAWEDSGSDELSVVFPGVIARFDGADLQNVLKKAFQDVKSRLWKDKFEEQDAEDEETFGRIPFQIWNVNKFSSCADAAIVGLMPPPLLELQLLLYCWAVKSAPLLCHHSWRGCCSFSI

SEQ ID NO: 190228 - protein, 189 aa, Zea Mays
MANHQLVSYHELARATENFSDANLLGSGSFGKVFKGQLSNGLVVAVKVIHMHMEQAAARALVLQYMPNGSLEELLRSVNGGMRLGFVERLDIVLDVSMAMEYLHHEHCEVVLHCDLKPSKLRHETLKQQLCRKLINGVSVHNHVPGQSSVIPPETNSISMHDLKAEIELNPCLLGINASLLHEKINSYD

SEQ ID NO: 190229 - protein, 97 aa, Zea Mays
MPNESLYEQKPEETAPVLPYLVSLHLVAACGTGRLWRHNASATRKSLWTAISCPTVQALQGEVCLVWPERHPLPEHLRRPHHPLPRSSHQGQRHHQD

SEQ ID NO: 190230 - protein, 255 aa, Zea Mays
MSVAKEAGPSSRAVLVTGGAGYIGSHAVLQLLTAGFRVVVVDSLANSSELVIRRLRSLAVEHAKNLAFHKVDIRDKDGLEKVFASTRFDAVIHFAGLKAVGESVQKPLLYYDHNVVGTINLLEVMAAHGCKKVRDYIHVVDLAEGHLFALKKLFESSSNIGCEAYNLGTGKGTSVLEIVNAFEKASGKKIPLIMGQRRPGDAEILFSSPAKAERELHWKAKYGITEMCGDLWNWASKSPYGYAASESPKLNGSSR

SEQ ID NO: 190231 - protein, 198 aa, Zea Mays
MSVAKEAGPSSRAVLVTGGAGYIGSHAVLQLLTAGFRVVVVDSLANSSELVIRRLRSLAVEHAKNLAFHKVDIRDKDGLEKVFASTRFDAVIHFAGLKAVGESVQKPLLYYDHNVVGTINLLEVMAAHGCKKLVFSSSAAVYGSPKNSPCTEDFPLTPHNPYGRTKLMAEEICRDIYHSDPEWNIILLSKLQLAGGHR

SEQ ID NO: 190232 - protein, 925 aa, Zea Mays
MDATRYILEFLVLLLLLLLPTIAGASSDTKHLIAVRSALRDPTGALAGWDAANRRSSPCRWAHVSCANNSAPAAAVAGIDLYNLTLAGAFPTALCSLRSLEHLDLSANLLEGPLPACVAALPALRHLNLAGNNFSGHVPRSWGAGFRSLAVLNLVQNALSGEFPAFLANLTGLRELQLAYNPFAPSPLPADMLVNLANLRVLFVANCSLTGTIPSSIGKLKNLVNLDLSVNSLSGEIPPSIGNLTSLEQIELFSNQLSGAIPVGLGGLKKLHSLDISMNLLTGEIPEDMFAAPGLLSGPLPAELGKNCPLSFLDTSDNRLSGPIPATLCASGKLEELMLLDNEFEGPIPVELGECRTLVRVRLQSNRLSGPVPPRFWGLPNVGLLEIRENALSGSVDPAISGAKSLSKLLLQDNRFTGTLPAELGTLENLQEFKASNNGFTGPIPRSIVNLSILYNLDLSNNSLSGEIPEDFGRLKKLTQLDLSDNHLSGNIPEELGEIVEINTLDLSHNELSGQLPVQLGNLRLARFNISYNKLSGPIPSFFNGLEYRDSFLGNPGLCYGFCRSNGNSDGRQSKIIKMVVTIIGVSGIILLTGIAWFGYKYRMYKISAAELDDGKSSWVLTSFHKVDFSERAIVNNLDESNVIGQGGAGKVYKVVVGPQGEAMAVKKLWPSGAASKSIDSFKAEVAMLSKVRHRNIVKLACSITNNGSRLLVYEYMANGSLGDVLHSEKRHILDWPMRYKIAVNAAEGLSYLHHDCKPVIVHRDVKSNNILLDAEYGAKIADFGVARTIGDGPATMSMIAGSCGYIAPEYAYTLHVTEKSDIYSFGVVILELVTGKKPLAAEIGEMDLVAWVTAKVEQYGLESVLDQNLDEQFKDEMCMVLKIGLLCVSNLPTKRPSMRSVVMLLLEVKEENKPKLKAVATLPI

SEQ ID NO: 190233 - protein, 275 aa, Zea Mays
MTPRPPNGNLTQAARAREAASARRRPQRACYFSAGPLALALLLFFIIRATTRIANRGSGRKGRAEDDYDYLFKVVLIGDSGVGKSNLLSRFTRNEFSLESKSTIGVEFATRSIRVDDKVVKAQIWDTAGQERYRAITSAYYRGAVGALVVYDVTRHVTFENVERWLKELRDHTDANIVIMLVGNKADLRHLRAVSVEDAKGFAERESTFFMETSALESMNVESAFTEVLTQIYRVVSKKALDIGDDPAAPPRGQTINVGGKDDVSAVKKSGCCSS

SEQ ID NO: 190234 - protein, 309 aa, Zea Mays
MAASCASTLPPLSFVSSSSSPRRFRRSGVVAMASVGQKVYAPGVAVSEGNGGLPKIDLKSPHGSEAEIYLFGACVTSFKVPNGKDLLFVRPDAVFNGQKPISGGIPHCFPQFGPGPMQQHGFARNVNWSITDSEVTEGDPAVTLELKDDTYSRSMWDFSFHALYKVSLHSKSLSTTLAIINTDDKSFSFNSALHTYFSASITGVSVKGLKGCKTLNKDPDPKNPLEGKEEREEVTFPGFVDCVYLGAPSELILDNGLGDKIAIANSNWSDAVLWNPHLQMEACYKDFVCVENAKKERKKQEIVSNMEAV

SEQ ID NO: 190235 - protein, 232 aa, Zea Mays
MAASCASTLPPLSFVSSSSSPRRFRRSGVVAMASVGQKVYAPGVAVSEGNGGLPKIDLKSPHGSEAEIYLFGACVTSFKVPNGKDLLFVRPDAVFNGQKPISGGIPHCFPQFGPGPMQQHGFARNVNWSITDSEVTEGDPAVTLELKDDTYSRSMWDFSFHALYKVSLHSKSLSTTLAIINTDDKSFSFNSALHTYFSASITGVSVKGLKGCKTLNKDPDPKNPLEGKEESI

SEQ ID NO: 190236 - protein, 101 aa, Zea Mays
MADGQESRTASRKVRGGLAFWSLLLPESGEGDEVRLESFHRSKWKRPQEPKGPGSENKGEVETNVERKGGHRKRQSNRTSDRVNAYGGLRRDDAGNQTYGL

SEQ ID NO: 190237 - protein, 937 aa, Zea Mays
MVGPEMLVAATVNQVVRKINEIIGVAQGETKLCCSFSDDLEGIKDTLVYLEGLLKNAESNSFGSDRANLRHWLGQIKSLAYDIEDIVDGYYSSKEQYEGSNYAQKGSLLCSLSNPMLSKINLKELTIISIVGPVGLGKTTLAQLIFNDARAETFRFRIWVHVSMGNVSLQKIGRDIVLQTTEKIEGNMQMQSIKNVVQDILNKYSCLIVLDSLWGKDEEVNELKQMLLTGRKTESKVIVTTHSSKVAELISTVPPYKLSLLSEDDCSAIFCQRAIAGQSISDPLFREYGEEIVRRCEGMPLVANFLGSVVNAQRQRREIWKAARDKDMWKIEEDYPENKIVPMFPSFKIVYYSMPHELRLCFVYCSIFPKGYVIDKKKLIQQWIALDMIESKHGTLPLDVTAEKYIDELKDIYLLQVLERHQIDAEISNTSEEKLYMNNLAHDLARSVAGEDILVILDAENVRCNRNYDYRYAQVSTSSLQSIDSKAWPSKARSLVFKSSAELQHVSEVLSVNKYLRVLDISGCSVKEMPAPIFQMKQLRYLDASTLSIADLPPQISGFPKLQTLDLSDTEVTELPAFIANLKRLNYLNLQGCKKLKQLNNLDLLHELHYLNLSRCLEVRSFPASLKNLRKLRFLNLSQCSKLPTLPDELLQSFSSFSSIVDLNLSGFEFQMLPDFFGNICSLQFLSLSKCSKLELLPQSFGQLAYLKGLDLSFCSDLKLPESFKYLSSLQFLNLSHCHNVEYLPSFDKLSNLEYLNLSQCAGLKALPKSLSNQKNLQIEVFGCQDCIVQSCYLSPQSHTCSQEVKEVGSSSDISDTILKESANRDVALGISFPEIDEVGYPHNNLKQKLTLSYHMDGHKSEEPNFITKNSTTETVQLTPRHQFPSSTCRISSIASSSSALFASGSSSDVSITYNPVSNDKAGNQTGPQTESTHTVV

SEQ ID NO: 190238 - protein, 925 aa, Zea Mays
MVGPEMLVAATVNQVVRKINEIIGVAQGETKLCCSFSDDLEGIKDTLVYLEGLLKNAESNSFGSDRANLRHWLGQIKSLAYDIEDIVDGYYSSKEQYEGSNYAQKGSLLCSLSNPMLSKVSMVHKMKSKRELLQTRQNLPTQYHFISHINSVVNYDEKQTTSYRNCDIRIVGRGPDLEHLMYMLMQINLKELTIISIVGPVGLGKTTLAQLIFNDARAETFRFRIWVHVSMGNVSLQKIGRDIVLQTTEKIEGNMQMQSIKNVVQDILNKYSCLIVLDSLWGKDEEVNELKQMLLTGRKTESKVIVTTHSSKVAELISTVPPYKLSLLSEDDCSAIFCQRAIAGQSISDPLFREYGEEIVRRCEGMPLVANFLGSVVNAQRQRREIWKAARDKDMWKIEEDYPENKIVPMFPSFKIVYYSMPHELRLCFVYCSIFPKGYVIDKKKLIQQWIALDMIESKHGTLPLDVTAEKYIDELKDIYLLQVLERHQIDAEISNTSEEKLYMNNLAHDLARSVAGEDILVILDAENVRCNRNYDYHLPPQISGFPKLQTLDLSDTEVTELPAFIANLKRLNYLNLQGCKKLKQLNNLDLLHELHYLNLSRCLEVRSFPASLKNLRKLRFLNLSQCSKLPTLPDELLQSFSSFSSIVDLNLSGFEFQMLPDFFGNICSLQFLSLSKCSKLELLPQSFGQLAYLKGLDLSFCSDLKLPESFKYLSSLQFLNLSHCHNVEYLPSFDKLSNLEYLNLSQCAGLKALPKSLSNQKNLQIEVFGCQDCIVQSCYLSPQSHTCSQEVKEVGSSSDISDTILKESANRDVALGISFPEIDEVGYPHNNLKQKLTLSYHMDGHKSEEPNFITKQNSTTETVQLTPRHQFPSSTCRISSIASSSSALFASGSSSDVSITYNPVSNDKAGNQTGPQTESTHTVV

SEQ ID NO: 190239 - protein, 858 aa, Zea Mays
MVGPEMLVAATVNQVVRKINEIIGVAQGETKLCCSFSDDLEGIKDTLVYLEGLLKNAESNSFGSDRANLRHWLGQIKSLAYDIEDIVDGYYSSKEQYEGSNYAQKGSLLCSLSNPMLSKINLKELTIISIVGPVGLGKTTLAQLIFNDARAETFRFRIWVHVSMGNVSLQKIGRDIVLQTTEKIEGNMQMQSIKNVVQDILNKYSCLIVLDSLWGKDEEVNELKQMLLTGRKTESKVIVTTHSSKVAELISTVPPYKLSLLSEDDCSAIFCQRAIAGQSISDPLFREYGEEIVRRCEGMPLVANFLGSVVNAQRQRREIWKAARDKDMWKIEEDYPENKIVPMFPSFKIVYYSMPHELRLCFVYCSIFPKGYVIDKKKLIQQWIALDMIESKHGTLPLDVTAEKYIDELKDIYLLQVLERHQIDAEISNTSEEKLYMNNLAHDLARSVAGEDILVILDAENVRCNRNYDYHLPPQISGFPKLQTLDLSDTEVTELPAFIANLKRLNYLNLQGCKKLKQLNNLDLLHELHYLNLSRCLEVRSFPASLKNLRKLRFLNLSQCSKLPTLPDELLQSFSSFSSIVDLNLSGFEFQMLPDFFGNICSLQFLSLSKCSKLELLPQSFGQLAYLKGLDLSFCSDLKLPESFKYLSSLQFLNLSHCHNVEYLPSFDKLSNLEYLNLSQCAGLKALPKSLSNQKNLQIEVFGCQDCIVQSCYLSPQSHTCSQEVKEVGSSSDISDTILKESANRDVALGISFPEIDEVGYPHNNLKQKLTLSYHMDGHKSEEPNFITKQNSTTETVQLTPRHQFPSSTCRISSIASSSSALFASGSSSDVSITYNPVSNDKAGNQTGPQTESTHTVV

SEQ ID NO: 190240 - protein, 997 aa, Zea Mays
MVGPEMLVAATVNQVVRKINEIIGVAQGETKLCCSFSDDLEGIKDTLVYLEGLLKNAESNSFGSDRANLRHWLGQIKSLAYDIEDIVDGYYSSKEQYEGSNYAQKGSLLCSLSNPMLSKVSMVHKMKSKRELLQTRQNLPTQYHFISHINSVVNYDEKQTTSYRNCDIRIVGRGPDLEHLMYMLMQINLKELTIISIVGPVGLGKTTLAQLIFNDARAETFRFRIWVHVSMGNVSLQKIGRDIVLQTTEKIEGNMQMQSIKNVVQDILNKYSCLIVLDSLWGKDEEVNELKQMLLTGRKTESKVIVTTHSSKVAELISTVPPYKLSLLSEDDCSAIFCQRAIAGQSISDPLFREYGEEIVRRCEGMPLVANFLGSVVNAQRQRREIWKAARDKDMWKIEEDYPENKIVPMFPSFKIVYYSMPHELRLCFVYCSIFPKGYVIDKKKLIQQWIALDMIESKHGTLPLDVTAEKYIDELKDIYLLQVLERHQIDAEISNTSEEKLYMNNLAHDLARSVAGEDILVILDAENVRCNRNYDYRYAQVSTSSLQSIDSKAWPSKARSLVFKSSAELQHVSEVLSVNKYLRVLDISGCSVKEMPAPIFQMKQLRYLDASTLSIADLPPQISGFPKLQTLDLSDTEVTELPAFIANLKRLNYLNLQGCKKLKQLNNLDLLHELHYLNLSRCLEVRSFPASLKNLRKLRFLNLSQCSKLPTLPDELLQSFSSFSSIVDLNLSGFEFQMLPDFFGNICSLQFLSLSKCSKLELLPQSFGQLAYLKGLDLSFCSDLKLPESFKYLSSLQFLNLSHCHNVEYLPSFDKLSNLEYLNLSQCAGLKALPKSLSNQKNLQIEVFGCQDCIVQSCYLSPQSHTCSQEVKEVGSSSDISDTILKESANRDVALGISFPEIDEVGYPHNNLKQKLTLSYHMDGHKSEEPNFITKQNSTTETVQLTPRHQFPSSTCRISSIASSSSALFASGSSSDVSITYNPVSNDKAGDTIYHG

SEQ ID NO: 190241 - protein, 913 aa, Zea Mays
MQTYRVNVVANFQGSLLCSLSNPMLSKVSMVHKMKSKRELLQTRQNLPTQYHFISHINSVVNYDEKQTTSYRNCDIRIVGRGPDLEHLMYMLMQINLKELTIISIVGPVGLGKTTLAQLIFNDARAETFRFRIWVHVSMGNVSLQKIGRDIVLQTTEKIEGNMQMQSIKNVVQDILNKYSCLIVLDSLWGKDEEVNELKQMLLTGRKTESKVIVTTHSSKVAELISTVPPYKLSLLSEDDCSAIFCQRAIAGQSISDPLFREYGEEIVRRCEGMPLVANFLGSVVNAQRQRREIWKAARDKDMWKIEEDYPENKIVPMFPSFKIVYYSMPHELRLCFVYCSIFPKGYVIDKKKLIQQWIALDMIESKHGTLPLDVTAEKYIDELKDIYLLQVLERHQIDAEISNTSEEKLYMNNLAHDLARSVAGEDILVILDAENVRCNRNYDYRYAQVSTSSLQSIDSKAWPSKARSLVFKSSAELQHVSEVLSVNKYLRVLDISGCSVKEMPAPIFQMKQLRYLDASTLSIADLPPQISGFPKLQTLDLSDTEVTELPAFIANLKRLNYLNLQGCKKLKQLNNLDLLHELHYLNLSRCLEVRSFPASLKNLRKLRFLNLSQCSKLPTLPDELLQSFSSFSSIVDLNLSGFEFQMLPDFFGNICSLQFLSLSKCSKLELLPQSFGQLAYLKGLDLSFCSDLKLPESFKYLSSLQFLNLSHCHNVEYLPSFDKLSNLEYLNLSQCAGLKALPKSLSNQKNLQIEVFGCQDCIVQSCYLSPQSHTCSQEVKEVGSSSDISDTILKESANRDVALGISFPEIDEVGYPHNNLKQKLTLSYHMDGHKSEEPNFITKQNSTTETVQLTPRHQFPSSTCRISSIASSSSALFASGSSSDVSITYNPVSNDKAGNQTGPQTESTHTVV

SEQ ID NO: 190242 - protein, 926 aa, Zea Mays
MVGPEMLVAATVNQVVRKINEIIGVAQGETKLCCSFSDDLEGIKDTLVYLEGLLKNAESNSFGSDRANLRHWLGQIKSLAYDIEDIVDGYYSSKEQYEGSNYAQKGSLLCSLSNPMLSKVSMVHKMKSKRELLQTRQNLPTQYHFISHINSVVNYDEKQTTSYRNCDIRIVGRGPDLEHLMYMLMQINLKELTIISIVGPVGLGKTTLAQLIFNDARAETFRFRIWVHVSMGNVSLQKIGRDIVLQTTEKIEGNMQMQSIKNVVQDILNKYSCLIVLDSLWGKDEEVNELKQMLLTGRKTESKVIVTTHSSKVAELISTVPPYKLSLLSEDDCSAIFCQRAIAGQSISDPLFREYGEEIVRRCEGMPLVANFLGSVVNAQRQRREIWKAARDKDMWKIEEDYPENKIVPMFPSFKIVYYSMPHELRLCFVYCSIFPKGYVIDKKKLIQQWIALDMIESKHGTLPLDVTAEKYIDELKDIYLLQVLERHQIDAEISNTSEEKLYMNNLAHDLARSVAGEDILVILDAENVRCNRNYDYHLPPQISGFPKLQTLDLSDTEVTELPAFIANLKRLNYLNLQGCKKLKQLNNLDLLHELHYLNLSRCLEVRSFPASLKNLRKLRFLNLSQCSKLPTLPDELLQSFSSFSSIVDLNLSGFEFQMLPDFFGNICSLQFLSLSKCSKLELLPQSFGQLAYLKGLDLSFCSDLKLPESFKYLSSLQFLNLSHCHNVEYLPSFDKLSNLEYLNLSQCAGLKALPKSLSNQKNLQIEVFGCQDCIVQSCYLSPQSHTCSQEVKEVGSSSDISDTILKESANRDVALGISFPEIDEVGYPHNNLKQKLTLSYHMDGHKSEEPNFITKQNSTTETVQLTPRHQFPSSTCRISSIASSSSALFASGSSSDVSITYNPVSNDKAEQFCTPAGTPKEHSAG

SEQ ID NO: 190243 - protein, 859 aa, Zea Mays
MVGPEMLVAATVNQVVRKINEIIGVAQGETKLCCSFSDDLEGIKDTLVYLEGLLKNAESNSFGSDRANLRHWLGQIKSLAYDIEDIVDGYYSSKEQYEGSNYAQKGSLLCSLSNPMLSKINLKELTIISIVGPVGLGKTTLAQLIFNDARAETFRFRIWVHVSMGNVSLQKIGRDIVLQTTEKIEGNMQMQSIKNVVQDILNKYSCLIVLDSLWGKDEEVNELKQMLLTGRKTESKVIVTTHSSKVAELISTVPPYKLSLLSEDDCSAIFCQRAIAGQSISDPLFREYGEEIVRRCEGMPLVANFLGSVVNAQRQRREIWKAARDKDMWKIEEDYPENKIVPMFPSFKIVYYSMPHELRLCFVYCSIFPKGYVIDKKKLIQQWIALDMIESKHGTLPLDVTAEKYIDELKDIYLLQVLERHQIDAEISNTSEEKLYMNNLAHDLARSVAGEDILVILDAENVRCNRNYDYHLPPQISGFPKLQTLDLSDTEVTELPAFIANLKRLNYLNLQGCKKLKQLNNLDLLHELHYLNLSRCLEVRSFPASLKNLRKLRFLNLSQCSKLPTLPDELLQSFSSFSSIVDLNLSGFEFQMLPDFFGNICSLQFLSLSKCSKLELLPQSFGQLAYLKGLDLSFCSDLKLPESFKYLSSLQFLNLSHCHNVEYLPSFDKLSNLEYLNLSQCAGLKALPKSLSNQKNLQIEVFGCQDCIVQSCYLSPQSHTCSQEVKEVGSSSDISDTILKESANRDVALGISFPEIDEVGYPHNNLKQKLTLSYHMDGHKSEEPNFITKQNSTTETVQLTPRHQFPSSTCRISSIASSSSALFASGSSSDVSITYNPVSNDKAEQFCTPAGTPKEHSAG

SEQ ID NO: 190244 - protein, 939 aa, Zea Mays
MVGPEMLVAATVNQVVRKINEIIGVAQGETKLCCSFSDDLEGIKDTLVYLEGLLKNAESNSFGSDRANLRHWLGQIKSLAYDIEDIVDGYYSSKEQYEGSNYAQKGSLLCSLSNPMLSKINLKELTIISIVGPVGLGKTTLAQLIFNDARAETFRFRIWVHVSMGNVSLQKIGRDIVLQTTEKIEGNMQMQSIKNVVQDILNKYSCLIVLDSLWGKDEEVNELKQMLLTGRKTESKVIVTTHSSKVAELISTVPPYKLSLLSEDDCSAIFCQRAIAGQSISDPLFREYGEEIVRRCEGMPLVANFLGSVVNAQRQRREIWKAARDKDMWKIEEDYPENKIVPMFPSFKIVYYSMPHELRLCFVYCSIFPKGYVIDKKKLIQQWIALDMIESKHGTLPLDVTAEKYIDELKDIYLLQVLERHQIDAEISNTSEEKLYMNNLAHDLARSVAGEDILVILDAENVRCNRNYDYRYAQVSTSSLQSIDSKAWPSKARSLVFKSSAELQHVSEVLSVNKYLRVLDISGCSVKEMPAPIFQMKQLRYLDASTLSIADLPPQISGFPKLQTLDLSDTEVTELPAFIANLKRLNYLNLQGCKKLKQLNNLDLLHELHYLNLSRCLEVRSFPASLKNLRKLRFLNLSQCSKLPTLPDELLQSFSSFSSIVDLNLSGFEFQMLPDFFGNICSLQFLSLSKCSKLELLPQSFGQLAYLKGLDLSFCSDLKLPESFKYLSSLQFLNLSHCHNVEYLPSFDKLSNLEYLNLSQCAGLKALPKSLSNQKNLQIEVFGCQDCIVQSCYLSPQSHTCSQEVKEVGSSSDISDTILKESANRDVALGISFPEIDEVGYPHNNLKQKLTLSYHMDGHKSEEPNFITKQNSTTETVQLTPRHQFPSSTCRISSIASSSSALFASGSSSDVSITYNPVSNDKAEQFCTPAGTPKEHSAG

SEQ ID NO: 190245 - protein, 1005 aa, Zea Mays
MVGPEMLVAATVNQVVRKINEIIGVAQGETKLCCSFSDDLEGIKDTLVYLEGLLKNAESNSFGSDRANLRHWLGQIKSLAYDIEDIVDGYYSSKEQYEGSNYAQKGSLLCSLSNPMLSKVSMVHKMKSKRELLQTRQNLPTQYHFISHINSVVNYDEKQTTSYRNCDIRIVGRGPDLEHLMYMLMQINLKELTIISIVGPVGLGKTTLAQLIFNDARAETFRFRIWVHVSMGNVSLQKIGRDIVLQTTEKIEGNMQMQSIKNVVQDILNKYSCLIVLDSLWGKDEEVNELKQMLLTGRKTESKVIVTTHSSKVAELISTVPPYKLSLLSEDDCSAIFCQRAIAGQSISDPLFREYGEEIVRRCEGMPLVANFLGSVVNAQRQRREIWKAARDKDMWKIEEDYPENKIVPMFPSFKIVYYSMPHELRLCFVYCSIFPKGYVIDKKKLIQQWIALDMIESKHGTLPLDVTAEKYIDELKDIYLLQVLERHQIDAEISNTSEEKLYMNNLAHDLARSVAGEDILVILDAENVRCNRNYDYRYAQVSTSSLQSIDSKAWPSKARSLVFKSSAELQHVSEVLSVNKYLRVLDISGCSVKEMPAPIFQMKQLRYLDASTLSIADLPPQISGFPKLQTLDLSDTEVTELPAFIANLKRLNYLNLQGCKKLKQLNNLDLLHELHYLNLSRCLEVRSFPASLKNLRKLRFLNLSQCSKLPTLPDELLQSFSSFSSIVDLNLSGFEFQMLPDFFGNICSLQFLSLSKCSKLELLPQSFGQLAYLKGLDLSFCSDLKLPESFKYLSSLQFLNLSHCHNVEYLPSFDKLSNLEYLNLSQCAGLKALPKSLSNQKNLQIEVFGCQDCIVQSCYLSPQSHTCSQEVKEVGSSSDISDTILKESANRDVALGISFPEIDEVGYPHNNLKQKLTLSYHMDGHKSEEPNFITKNSTTETVQLTPRHQFPSSTCRISSIASSSSALFASGSSSDVSITYNPVSNDKAEQFCTPAGTPKEHSAG

SEQ ID NO: 190246 - protein, 309 aa, Zea Mays
MKIFSAVGNVKSIRTCYPQDISLAAANKTSRIEMIFANKLHSFVEYSTVGDAEKAVAEFGGGGNWREGIRVRSLLGCLKHGLGQGRKGGDEEYAADEDGPDTTDHPRDFGTDVTAQISEAHFDHQAEDGTHDKGGMRQQGRGRGRGGRGRGRGQHYGHNSRDGHHPIGTPPSEHPAVLKPPLGPRITDGTKGFVFKILVLNIFLVNGSSVTVAGVFNRSLATCAFQQVVLLCLLVINNKCYDGAKGDLCSCGVIFFVLMAGYLPFKDSNLMSLYKKIFKADFSCHPGSPQVQRSSSRRYLILMLTLCLD

SEQ ID NO: 190247 - protein, 271 aa, Zea Mays
MAHGSAKRRRVHPAPTVAARIAAVASSHQYRGRRFLRPHGKPGGLFLALPACLFPTSTPPPPLHPACSPPPPPRHRDNAVLTVARFSDEMSELAAPTDPPFPQNPRWKESSLEEILTKIHAGWDLCGHRGSPKSMPHHWHLPSSTPSIHGWKSSFPSAAPFFSPHSALPPHHSLHPICGATVRAHGRAPTGDPTPAPASLQRGLLVLALGGTLIGWIKTSSVESENVSKALYETIGKLSIHKEEARLIGQLCSGMLANLIGCCRERDATSF

SEQ ID NO: 190248 - protein, 396 aa, Zea Mays
MLSQPYPQQQGGEPSSVNSASITQKISNAIKSDDPTWEHCFVPDMSKKQAIQCKYCDKVIHGGITRVKYHLANIGGFNVTKCKKVPAHVKQEMEAFLTKKTGEKEQRKKKKQRDRDEIDLDKSDGSNEEDNGHENDVIVLKSTRESNNCSSSRPPTNGGSGTIDNFYKPQSVEESDHKNKIQTKLSTHKREERRDRACEYICQFFYEAGIAHNTITLPSFGHMLEAIGAFGRGLRGPSAYEMSGPFLKRAKQKVLDIFKNHHESWQLTGCSVMTNAWTDRKGRGVMNLVVHSAHGVYFLDSVDCSTVKKDGKYVFDLVDRCIQEIRKENVVQVVTDNASVNTAAASLMAAKTPSIFWTGCAAHCLDLMLEDIGKLGPMEQTIASARQVTTFLYAHT

SEQ ID NO: 190249 - protein, 391 aa, Zea Mays
MGVSGAGKTTLMDVLAGRKTSGYIVGNITISGYPKKQETFARVSGYCEQNDIHSPNVTVYESLAFSAWLRLPADVDSSTRKMFIDEVMELVELLPLKDALVGLPGVSGLSTEQRKRLTIAVELVANPSIIFMDEPTSGLDARAAAIVMRAIRNTVDTGRTVVCTIHQPSIDIFESFDELFLMKRGGEEIYVGPLGMHSCELVKYFEGIEGVNKIKDGYNPSTWMLEVTSTMQEQITGINFSEVYKNSELHRRNKTLIKELSTPPEGSSDLSFPTEYSQAFLTQCLACLWKQSMSYWRNPPYTGVKYFYTTVIALLFGTMFWGVGRKRDSQQDLFNAIGSMYASVIFMGVQNSGSVQPVVSVERTVFYRERAAHMYSPLPYALGQHTTRSTG

SEQ ID NO: 190250 - protein, 617 aa, Zea Mays
MGSNMEKGRRGFVEQHLKTKIVIFLPCEEEAEAIRAQGVTETRLELLKGISGSFRPGVLTALMGVSGAGKTTLMDVLAGRKTSGYIVGNITISGYPKKQETFARVSGYCEQNDIHSPNVTVYESLAFSAWLRLPADVDSSTRKMFIDEVMELVELLPLKDALVGLPGVSGLSTEQRKRLTIAVELVANPSIIFMDEPTSGLDARAAAIVMRAIRNTVDTGRTVVCTIHQPSIDIFESFDELFLMKRGGEEIYVGPLGMHSCELVKYFEGIEGVNKIKDGYNPSTWMLEVTSTMQEQITGINFSEVYKNSELHRRNKTLIKELSTPPEGSSDLSFPTEYSQAFLTQCLACLWKQSMSYWRNPPYTGVKYFYTTVIALLFGTMFWGVGRKRDSQQDLFNAIGSMYASVIFMGVQNSGSVQPVVSVERTVFYRERAAHMYSPLPYALGQVVIELPYIFVQSLIYGVLVYAMIGFEWTADKFFWYLFFMYFTLAYYTFYGMMVVGLTPNYNVSSVASTAFYAIWNLFSGFLIPRTRIPVWWRWFYWICPIAWTLNGLVTSQFGDVTETFSDGGVRISDFVEDYFGYHHDLLWVVAVVVVAFPVLFALLFGLSLKIFNFQKR

SEQ ID NO: 190251 - protein, 892 aa, Zea Mays
MGALFFGVLMVMFNGLAEVGLTIAKLPVFFKQRDLLFYPAWTYSLPSWIIKTPLSLLNVTIWVFITYYVIGFDPNVERLFRQFLLLLLMNEASSGLFRFIAGLARHQVVASTLGSFGILICMLLGGFLLARENVKKWWIWGYWISPLMYAQNAISVNEFLGSSWNKQVIPGSAEPLGKLVLESRGLFPEAKWYWIGVGALLGYVLLFNILYTICLTFLKPFDSNQPTISEEALKIKHANLTGEVLEASSRGRVASTTTTGTLDESNDEAASNHATVNSSPVNKGMVLPFVPLSITFDDIRYSVDMPEAIRAQGVTETRLELLKGISGSFRPGVLTALMGVSGAGKTTLMDVLAGRKTSGYIVGNITISGYPKKQETFARVSGYCEQNDIHSPNVTVYESLAFSAWLRLPADVDSSTRKMFIDEVMELVELLPLKDALVGLPGVSGLSTEQRKRLTIAVELVANPSIIFMDEPTSGLDARAAAIVMRAIRNTVDTGRTVVCTIHQPSIDIFESFDELFLMKRGGEEIYVGPLGMHSCELVKYFEGIEGVNKIKDGYNPSTWMLEVTSTMQEQITGINFSEVYKNSELHRRNKTLIKELSTPPEGSSDLSFPTEYSQAFLTQCLACLWKQSMSYWRNPPYTGVKYFYTTVIALLFGTMFWGVGRKRDSQQDLFNAIGSMYASVIFMGVQNSGSVQPVVSVERTVFYRERAAHMYSPLPYALGQVVIELPYIFVQSLIYGVLVYAMIGFEWTADKFFWYLFFMYFTLAYYTFYGMMVVGLTPNYNVSSVASTAFYAIWNLFSGFLIPRTRIPVWWRWFYWICPIAWTLNGLVTSQFGDVTETFSDGGVRISDFVEDYFGYHHDLLWVVAVVVVAFPVLFALLFGLSLKIFNFQKR

SEQ ID NO: 190252 - protein, 1336 aa, Zea Mays
MTLLLGPPGAGKTSLLLALAGTLPSSLKVTGNITYNGHTMDEFEARRSAAYVSQHDLHMGELTVRETVNFSARCQGSGHRYDLLVELSRREKDAGIIPDKETDTYMKAAATGDQKADVVTNHILKVLGLDVCADTIVGNNMLRGISGGQKKRVTTAEMLVTPGRAVFMDEISTGLDSSTTFQIVNSIRETIHIVGGTAVIALLQPAPETYDLFDDIILLSDSQVVYSGPREYVLEFFESVGFKCPQRKGVADFLQEVTSKKDQRQYWKHGDDTYRYVPVKEFAEAFQSFHVGEAIRNELAVPFDKSTSHPAALKTSRYGASVKELLKANIDREILLIKRNSFVYIFKAVQLTLMALITMTVFLRTNMHRDSISDGRIYMGALFFGVLMVMFNGLAEVGLTIAKLPVFFKQRDLLFYPAWTYSLPSWIIKTPLSLLNVTIWVFITYYVIGFDPNVERLFRQFLLLLLMNEASSGLFRFIAGLARHQVVASTLGSFGILICMLLGGFLLARENVKKWWIWGYWISPLMYAQNAISVNEFLGSSWNKQVIPGSAEPLGKLVLESRGLFPEAKWYWIGVGALLGYVLLFNILYTICLTFLKPFDSNQPTISEEALKIKHANLTGEVLEASSRGRVASTTTTGTLDESNDEAASNHATVNSSPVNKGMVLPFVPLSITFDDIRYSVDMPEHAVDVGARLRQQAAGRHGTSISAEDLGYRCTPELGWGGRPAQRSEGPLLLLWSYAGEDEDQHRRPQAIRAQGVTETRLELLKGISGSFRPGVLTALMGVSGAGKTTLMDVLAGRKTSGYIVGNITISGYPKKQETFARVSGYCEQNDIHSPNVTVYESLAFSAWLRLPADVDSSTRKMFIDEVMELVELLPLKDALVGLPGVSGLSTEQRKRLTIAVELVANPSIIFMDEPTSGLDARAAAIVMRAIRNTVDTGRTVVCTIHQPSIDIFESFDELFLMKRGGEEIYVGPLGMHSCELVKYFEGIEGVNKIKDGYNPSTWMLEVTSTMQEQITGINFSEVYKNSELHRRNKTLIKELSTPPEGSSDLSFPTEYSQAFLTQCLACLWKQSMSYWRNPPYTGVKYFYTTVIALLFGTMFWGVGRKRDSQQDLFNAIGSMYASVIFMGVQNSGSVQPVVSVERTVFYRERAAHMYSPLPYALGQVVIELPYIFVQSLIYGVLVYAMIGFEWTADKFFWYLFFMYFTLAYYTFYGMMVVGLTPNYNVSSVASTAFYAIWNLFSGFLIPRTRIPVWWRWFYWICPIAWTLNGLVTSQFGDVTETFSDGGVRISDFVEDYFGYHHDLLWVVAVVVVAFPVLFALLFGLSLKIFNFQKR

SEQ ID NO: 190253 - protein, 736 aa, Zea Mays
MDDAGEIHALGSLRRDGSVWSAASDTVFSSLSSRADGGVDDEEALRWAALEKLPTYDRARTAVLAMPEGDLRHVNVQKLDPQERHALLQRLAWVGDDHQRFLSKFKDRVDRVGIDLPKIEVRYQNLNVEAEAYVGSRGLPTILNTYANVLEGIANALHITPSRKQKISILHNVSGIIKPHRMTLLLGPPGAGKTSLLLALAGTLPSSLKVTGNITYNGHTMDEFEARRSAAYVSQHDLHMGELTVRETVNFSARCQGSGHRYDLLVELSRREKDAGIIPDKETDTYMKAAATGDQKADVVTNHILKVLGLDVCADTIVGNNMLRGISGGQKKRVTTAEMLVTPGRAVFMDEISTGLDSSTTFQIVNSIRETIHIVGGTAVIALLQPAPETYDLFDDIILLSDSQVVYSGPREYVLEFFESVGFKCPQRKGVADFLQEVTSKKDQRQYWKHGDDTYRYVPVKEFAEAFQSFHVGEAIRNELAVPFDKSTSHPAALKTSRYGASVKELLKANIDREILLIKRNSFVYIFKAVQLTLMALITMTVFLRTNMHRDSISDGRIYMGALFFGVLMVMFNGLAEVGLTIAKLPVFFKQRDLLFYPAWTYSLPSWIIKTPLSLLNVTIWVFITYYVIGFDPNVERLFRQFLLLLLMNEASSGLFRFIAGLARHQVVASTLGSFGILICMLLGGFLCSYGCQWCWQDNTDGCVGWEEDQWIHCGQHYHIRLPEETRNFCSCVRIL

SEQ ID NO: 190254 - protein, 1287 aa, Zea Mays
MDDAGEIHALGSLRRDGSVWSAASDTVFSSLSSRADGGVDDEEALRWAALEKLPTYDRARTAVLAMPEGDLRHVNVQKLDPQERHALLQRLAWVGDDHQRFLSKFKDRVDRVGIDLPKIEVRYQNLNVEAEAYVGSRGLPTILNTYANVLEGIANALHITPSRKQKISILHNVSGIIKPHRMTLLLGPPGAGKTSLLLALAGTLPSSLKVTGNITYNGHTMDEFEARRSAAYVSQHDLHMGELTVRETVNFSARCQGSGHRYDLLVELSRREKDAGIIPDKETDTYMKAAATGDQKADVVTNHILKVLGLDVCADTIVGNNMLRGISGGQKKRVTTAEMLVTPGRAVFMDEISTGLDSSTTFQIVNSIRETIHIVGGTAVIALLQPAPETYDLFDDIILLSDSQVVYSGPREYVLEFFESVGFKCPQRKGVADFLQEVTSKKDQRQYWKHGDDTYRYVPVKEFAEAFQSFHVGEAIRNELAVPFDKSTSHPAALKTSRYGASVKELLKANIDREILLIKRNSFVYIFKAVQLTLMALITMTVFLRTNMHRDSISDGRIYMGALFFGVLMVMFNGLAEVGLTIAKLPVFFKQRDLLFYPAWTYSLPSWIIKTPLSLLNVTIWVFITYYVIGFDPNVERLFRQFLLLLLMNEASSGLFRFIAGLARHQVVASTLGSFGILICMLLGGFLLARENVKKWWIWGYWISPLMYAQNAISVNEFLGSSWNKQVIPGSAEPLGKLVLESRGLFPEAKWYWIGVGALLGYVLLFNILYTICLTFLKPFDSNQPTISEEALKIKHANLTGEVLEASSRGRVASTTTTGTLDESNDEAASNHATVNSSPVNKGMVLPFVPLSITFDDIRYSVDMPEAIRAQGVTETRLELLKGISGSFRPGVLTALMGVSGAGKTTLMDVLAGRKTSGYIVGNITISGYPKKQETFARVSGYCEQNDIHSPNVTVYESLAFSAWLRLPADVDSSTRKMFIDEVMELVELLPLKDALVGLPGVSGLSTEQRKRLTIAVELVANPSIIFMDEPTSGLDARAAAIVMRAIRNTVDTGRTVVCTIHQPSIDIFESFDELFLMKRGGEEIYVGPLGMHSCELVKYFEGIEGVNKIKDGYNPSTWMLEVTSTMQEQITGINFSEVYKNSELHRRNKTLIKELSTPPEGSSDLSFPTEYSQAFLTQCLACLWKQSMSYWRNPPYTGVKYFYTTVIALLFGTMFWGVGRKRDSQQDLFNAIGSMYASVIFMGVQNSGSVQPVVSVERTVFYRERAAHMYSPLPYALGQHTTRSTG

SEQ ID NO: 190255 - protein, 1359 aa, Zea Mays
MDDAGEIHALGSLRRDGSVWSAASDTVFSSLSSRADGGVDDEEALRWAALEKLPTYDRARTAVLAMPEGDLRHVNVQKLDPQERHALLQRLAWVGDDHQRFLSKFKDRVDRVGIDLPKIEVRYQNLNVEAEAYVGSRGLPTILNTYANVLEGIANALHITPSRKQKISILHNVSGIIKPHRMTLLLGPPGAGKTSLLLALAGTLPSSLKVTGNITYNGHTMDEFEARRSAAYVSQHDLHMGELTVRETVNFSARCQGSGHRYDLLVELSRREKDAGIIPDKETDTYMKAAATGDQKADVVTNHILKVLGLDVCADTIVGNNMLRGISGGQKKRVTTAEMLVTPGRAVFMDEISTGLDSSTTFQIVNSIRETIHIVGGTAVIALLQPAPETYDLFDDIILLSDSQVVYSGPREYVLEFFESVGFKCPQRKGVADFLQEVTSKKDQRQYWKHGDDTYRYVPVKEFAEAFQSFHVGEAIRNELAVPFDKSTSHPAALKTSRYGASVKELLKANIDREILLIKRNSFVYIFKAVQLTLMALITMTVFLRTNMHRDSISDGRIYMGALFFGVLMVMFNGLAEVGLTIAKLPVFFKQRDLLFYPAWTYSLPSWIIKTPLSLLNVTIWVFITYYVIGFDPNVERLFRQFLLLLLMNEASSGLFRFIAGLARHQVVASTLGSFGILICMLLGGFLLARENVKKWWIWGYWISPLMYAQNAISVNEFLGSSWNKQVIPGSAEPLGKLVLESRGLFPEAKWYWIGVGALLGYVLLFNILYTICLTFLKPFDSNQPTISEEALKIKHANLTGEVLEASSRGRVASTTTTGTLDESNDEAASNHATVNSSPVNKGMVLPFVPLSITFDDIRYSVDMPEHAVDVGARLRQQAAGRHGTSISAEDLGYRCTPELGWGGRPAQRSEGPLLLLWSYAGEDEDQHRRPQAIRAQGVTETRLELLKGISGSFRPGVLTALMGVSGAGKTTLMDVLAGRKTSGYIVGNITISGYPKKQETFARVSGYCEQNDIHSPNVTVYESLAFSAWLRLPADVDSSTRKMFIDEVMELVELLPLKDALVGLPGVSGLSTEQRKRLTIAVELVANPSIIFMDEPTSGLDARAAAIVMRAIRNTVDTGRTVVCTIHQPSIDIFESFDELFLMKRGGEEIYVGPLGMHSCELVKYFEGIEGVNKIKDGYNPSTWMLEVTSTMQEQITGINFSEVYKNSELHRRNKTLIKELSTPPEGSSDLSFPTEYSQAFLTQCLACLWKQSMSYWRNPPYTGVKYFYTTVIALLFGTMFWGVGRKRDSQQDLFNAIGSMYASVIFMGVQNSGSVQPVVSVERTVFYRERAAHMYSPLPYALGQTVKSRQIKVQQGK

SEQ ID NO: 190256 - protein, 383 aa, Zea Mays
MRSPAAPGPSHDSLDSSPPAPGFRSYQQTKLAELDLDSSLSPATAAPGSQPTPSESPLPAPTPTPAPAATGLLIPIPARPVLAPYSQPASSSGSPADKSVAGIAAGSAAAGALLIVLLVAVGLYVASPIWKRRTGRDRRGAGSSGGGGASQHESQKRHSAVQIEVEVTPPPTASSSSWATSRDSHKPDTHGDGAGPRVQVQPVPGAGGGDYEVRFRGAFTYEQLAAATDGFSESSLVGRGGFGDVHVGTVDGAAVAVKRLRAGSQQGDREFQAELRIISRVHHRNLVSLVGYCVGDGGQRLLVYEFVPNLTLHHHLHAQQGRLKQYSVGRLDGKLLLELQKAWPTFMRTVSLLFITYFTLILYCSKNSLSLSLSLSLLKKILH

SEQ ID NO: 190257 - protein, 351 aa, Zea Mays
MRSPAAPGPSHDSLDSSPPAPGFRSYQQTKLAELDLDSSLSPATAAPGSQPTPSESPLPAPTPTPAPAATGLLIPIPARPVLAPYSQPASSSGSPADKSVAGIAAGSAAAGALLIVLLVAVGLYVASPIWKRRTGRDRRGAGSSGGGGASQHESQKRHSAVQIEVEVTPPPTASSSSWATSRDSHKPDTHGDGAGPRVQVQPVPGAGGGDYEVRFRGAFTYEQLAAATDGFSESSLVGRGGFGDVHVGTVDGAAVAVKRLRAGSQQGDREFQAELRIISRVHHRNLVSLVGYCVGDGGQRLLVYEFVPNLTLHHHLHAFSTTGEVETVLGWPTRWKIAVGAAKGLAYLHED

SEQ ID NO: 190258 - protein, 55 aa, Zea Mays
MFRPGQLRIGCVCRPDRSRTILTGHMPWKWDRVSLNPAIPYVKRQPRTGRGRWWE

SEQ ID NO: 190259 - protein, 110 aa, Zea Mays
MQRCRPSTPRREQRLRRSVTLPCLNQGLIIFLVNFEPIIILEGDLVLKSKPAISLFFVVNLRCVRDLLVDPDDLSSNCALVALNSEATCHARSWRSLSHRRFSEFPAGFR

SEQ ID NO: 190260 - protein, 113 aa, Zea Mays
MLLLTLLHMSTTPTDPPPHEQVRTTREHTTPFRRSFARRVRATLAISPLPVRDCLFMYGIAGFKLTHDEVCGQIKGPRSAGQQSVRSLIDTDEDTTPRLLSRASHPPGLSFII

SEQ ID NO: 190261 - protein, 429 aa, Zea Mays
MLVVKVRFLRLRTSLCLQFEPHHIAAGAIFLAAKFLKVKLPSDGDKVWWQDFDVTPRQLEEVSSQMMELYVQNRTPQAQQSQGSEAEGSSAGVRNQHSSVKSEGNSKEPSAHGYHPAFKPSNLHHSSLAGAPGDHDSGHSNSDKHVSGHKMLQNDNGNHVGSKEKNKSGGKSDAGMDRFCHEKSPPGHHYSKVSHESHNPVEEQKPHQSHDNPNERIDGILGGNEVPGVSTSRIDAMNKIDKGKVKAALEKRRKTKGDITTKVDVMDDDDLLERELEHGVELAIEDEKIKQDKMQNLSHIKDKKITQDNMQNLSHIKDEQDNMQNLSDIKDEKIKQDERQNMSHAPVDLQTTDQVMENGHHVEPSVPTTVEDTGFPLDNKEHPPFDKQNDVPEHESQQLEHTLKHDLPQLVGGPEQDDGTDCKRPKLEE

SEQ ID NO: 190262 - protein, 519 aa, Zea Mays
MFLAGKVEETPRPLKDVILVSYELIHKKDSTAGQRIKQQKEIYDKQKELILLGERIVLVTLGFDLNIDHAYKPLVEAIRRFNVGSKSSLPQVAWNFVNDGLRTSLCLQFEPHHIAAGAIFLAAKFLKVKLPSDGDKVWWQDFDVTPRQLEEVSSQMMELYVQNRTPQAQQSQGSEAEGSSAGVRNQHSSVKSEGNSKEPSAHGYHPAFKPSNLHHSSLAGAPGDHDSGHSNSDKHVSGHKMLQNDNGNHVGSKEKNKSGGKSDAGMDRFCHEKSPPGHHYSKVSHESHNPVEEQKPHQSHDNPNERIDGILGGNEVPGVSTSRIDAMNKIDKGKVKAALEKRRKTKGDITTKVDVMDDDDLLERELEHGVELAIEDEKIKQDKMQNLSHIKDKKITQDNMQNLSHIKDEQDNMQNLSDIKDEKIKQDERQNMSHAPVDLQTTDQVMENGHHVEPSVPTTVEDTGFPLDNKEHPPFDKQNDVPEHESQQLEHTLKHDLPQLVGGPEQDDGTDCKRPKLEE

SEQ ID NO: 190263 - protein, 582 aa, Zea Mays
MAMVPSDSSHHGAVDNSPNGFTQGRREEARKLGPSWYFSRKEIEEHSPSRRDDIDLKKECSLRKSYCSFLQDLGMKLKVPQVTIATATVFCHRFFLRQSHAKNDRRIIATVCMFLAGKVEETPRPLKDVILVSYELIHKKDSTAGQRIKQQKEIYDKQKELILLGERIVLVTLGFDLNIDHAYKPLVEAIRRFNVGSKSSLPQDFDVTPRQLEEVSSQMMELYVQNRTPQAQQSQGSEAEGSSAGVRNQHSSVKSEGNSKEPSAHGYHPAFKPSNLHHSSLAGAPGDHDSGHSNSDKHVSGHKMLQNDNGNHVGSKEKNKSGGKSDAGMDRFCHEKSPPGHHYSKVSHESHNPVEEQKPHQSHDNPNERIDGILGGNEVPGVSTSRIDAMNKIDKGKVKAALEKRRKTKGDITTKVDVMDDDDLLERELEHGVELAIEDEKIKQDKMQNLSHIKDKKITQDNMQNLSHIKDEQDNMQNLSDIKDEKIKQDERQNMSHAPVDLQTTDQVMENGHHVEPSVPTTVEDTGFPLDNKEHPPFDKQNDVPEHESQQLEHTLKHDLPQLVGGPEQDDGTDCKRPKLEE

SEQ ID NO: 190264 - protein, 405 aa, Zea Mays
MMGAIFLAAKFLKVKLPSDGDKVWWQDFDVTPRQLEEVSSQMMELYVQNRTPQAQQSQGSEAEGSSAGVRNQHSSVKSEGNSKEPSAHGYHPAFKPSNLHHSSLAGAPGDHDSGHSNSDKHVSGHKMLQNDNGNHVGSKEKNKSGGKSDAGMDRFCHEKSPPGHHYSKVSHESHNPVEEQKPHQSHDNPNERIDGILGGNEVPGVSTSRIDAMNKIDKGKVKAALEKRRKTKGDITTKVDVMDDDDLLERELEHGVELAIEDEKIKQDKMQNLSHIKDKKITQDNMQNLSHIKDEQDNMQNLSDIKDEKIKQDERQNMSHAPVDLQTTDQVMENGHHVEPSVPTTVEDTGFPLDNKEHPPFDKQNDVPEHESQQLEHTLKHDLPQLVGGPEQDDGTDCKRPKLEE

SEQ ID NO: 190265 - protein, 364 aa, Zea Mays
MMELYVQNRTPQAQQSQGSEAEGSSAGVRNQHSSVKSEGNSKEPSAHGYHPAFKPSNLHHSSLAGAPGDHDSGHSNSDKHVSGHKMLQNDNGNHVGSKEKNKSGGKSDAGMDRFCHEKSPPGHHYSKVSHESHNPVEEQKPHQSHDNPNERIDGILGGNEVPGVSTSRIDAMNKIDKGKVKAALEKRRKTKGDITTKVDVMDDDDLLERELEHGVELAIEDEKIKQDKMQNLSHIKDKKITQDNMQNLSHIKDEQDNMQNLSDIKDEKIKQDERQNMSHAPVDLQTTDQVMENGHHVEPSVPTTVEDTGFPLDNKEHPPFDKQNDVPEHESQQLEHTLKHDLPQLVGGPEQDDGTDCKRPKLEE

SEQ ID NO: 190266 - protein, 420 aa, Zea Mays
MMGMLVLPLLSFEIAVHSAIFLAAKFLKVKLPSDGDKVWWQDFDVTPRQLEEVSSQMMELYVQNRTPQAQQSQGSEAEGSSAGVRNQHSSVKSEGNSKEPSAHGYHPAFKPSNLHHSSLAGAPGDHDSGHSNSDKHVSGHKMLQNDNGNHVGSKEKNKSGGKSDAGMDRFCHEKSPPGHHYSKVSHESHNPVEEQKPHQSHDNPNERIDGILGGNEVPGVSTSRIDAMNKIDKGKVKAALEKRRKTKGDITTKVDVMDDDDLLERELEHGVELAIEDEKIKQDKMQNLSHIKDKKITQDNMQNLSHIKDEQDNMQNLSDIKDEKIKQDERQNMSHAPVDLQTTDQVMENGHHVEPSVPTTVEDTGFPLDNKEHPPFDKQNDVPEHESQQLEHTLKHDLPQLVGGPEQDDGTDCKRPKLEE

SEQ ID NO: 190267 - protein, 406 aa, Zea Mays
MMAGAIFLAAKFLKVKLPSDGDKVWWQDFDVTPRQLEEVSSQMMELYVQNRTPQAQQSQGSEAEGSSAGVRNQHSSVKSEGNSKEPSAHGYHPAFKPSNLHHSSLAGAPGDHDSGHSNSDKHVSGHKMLQNDNGNHVGSKEKNKSGGKSDAGMDRFCHEKSPPGHHYSKVSHESHNPVEEQKPHQSHDNPNERIDGILGGNEVPGVSTSRIDAMNKIDKGKVKAALEKRRKTKGDITTKVDVMDDDDLLERELEHGVELAIEDEKIKQDKMQNLSHIKDKKITQDNMQNLSHIKDEQDNMQNLSDIKDEKIKQDERQNMSHAPVDLQTTDQVMENGHHVEPSVPTTVEDTGFPLDNKEHPPFDKQNDVPEHESQQLEHTLKHDLPQLVGGPEQDDGTDCKRPKLEE

SEQ ID NO: 190268 - protein, 90 aa, Zea Mays
MDLSTCFLGLEKAWSSWQGRMTWSGWPVTFPPFSFLLAAPPFSFCWQLLPFPSCWRLVPDPLQVWVTLEPKILVILSLYSFLFLVTYISD

SEQ ID NO: 190269 - protein, 374 aa, Zea Mays
MLLVDRVHSTPTAMDREALRMLCSPQFWRMAVLWALSLLHSYLLVFHCGRADAPRRRRPRPAEGRCPICVVTGATSGLGRAAAAALAREGYHVVLAGRSTQLLYETVQEIQRQQPDAHLKEFQVDLASFKSIKKFGSSLKQWVHEKNVEPSIQLLVNNAGILAKSHRITEDGLDEMIQTNYIGPFMLTNILLPLLKNSSVPSRVVNLTSFTHRCVSGLDVCEDALRGMKFGRCSIGESYPLASTYEYTKLCMLMFSYELHRQLHMSSGVSVIAADPGVVETKIMRELPECLSWFAFLALRSLKLLQEPDTGVGAVLDAALALPEESGKYFFGGKGRTIRSSRLSYDAEVAKKLWAESSAVFKELQLRGGDFGDS

SEQ ID NO: 190270 - protein, 203 aa, Zea Mays
MDREALRMLCSPQFWRMAVLWALSLLHSYLLVFHCGRADAPRRRRPRPAEGRCPICVVTGATSGLGRAAAAALAREGYHVVLAGRSTQLLYETVQEIQRQQPDAHLKEFQVDLASFKSIKKFGSSLKQWVHEKNVEPSIQLLVNNAGILAKSHRITEDGLDEMIQTNYIGPFMLTNILLPLLKNSSVPSRVVNLTSFTHSVRS

SEQ ID NO: 190271 - protein, 902 aa, Zea Mays
MARLFRESRRDSSHSSSSNGFLPPAAASSPSSASAIPSPFPDLGVALSAADLREAAYEVLVAASRTTGGKPLTYIPQSSSVATGPPVSPASSASSASSASLQRSLTSAAASKMKKALGLRSSASSKGVGSPGSGGKAAPPRRPATVGELMRVQMRISEPADARIRRGLLRIAASQLGRRAESMVLPLEFLQQFKASDFPDPQEYEAWRSRNLKLLEAGLLVHPLIPLNKSDSSGQRLRQIIRGAYDRPLETGKNSESMQGLRTSVMSLAGRSHDGTSDGCHWADGFPLNLHLYQVLVEACFDNDEGTVVDEIDEVMELLKKTWVILGINELLHNLCFTWALFNHFVMSGQVDIELLSAAENQLAEVAKDAKSTKDPNYCKVLSSTLSSIMGWTEKRLLAYHETFNTCNIESMQGIVSIGVSAARILVEDISQEYRRRRKEETDVARSRVETYIRSSLRTAFAQRMEEADSKRSSRNPTPVLSILAKDIGDLATKEKNIYSPILKTWHPLASGVAVATLHSCYGNELKQFVAGLTELTPDTVQVLKSADKLEKDLVNIAVEDSVDSDDGGKSLIREMPPYEAENAIANLVKVWIKDRVDRLKGWVDRNLKQETWNPGANRDNFAPSSVEMLRVIGETLDAFFQLPIPMHPALLPDLTAGLDRSLQLYVAKAKSGCGTRNSFMPQLPPLTRCEVGSKLLFKKKEKPQNLQVRVSQNGAANGNDPLGLPQLCVRLNTLQYIRGELENIEKKIKTSLRNVESAQADVTDGLDIKFELCQAACLEGIQQICETTAYKVMFYDLGHVLWDTLYVGDTASNRVEVLLRELDPVLETISGMVHNKVRNRAITALMKATFDGFLLVLLAGGPLRAFTRQDSQIIEDDFRALRDLYLADGDGLPEELVDKSH

SEQ ID NO: 190272 - protein, 437 aa, Zea Mays
MGDPCFPIKYAWDGVKCSNASGNTSRITSLDLSNSSLHGTISKNFTLLTALENLDLSYNKLIGSIPDSLPSLPSLRVLNVSGNQLSDESLCKNYTGPLIFSRDFDGSACNKPSPSPSRNKVAIIAISVVVPVLVLIVLLFTYFIWWAKRKSNVQPVPTHGPTRDPEPDNVSGSQKSYGYNMNKTENRQFTYKELEKFTNNFKKFIGQGGFGPVYYGRLEDDTEVAVKMRSESSSHGLDEFLAEVQSLTKVHHRNLVSLIGYCWEKDHLALVYEYMSQGSLFDHLRGKNGVSQALNWRKRVQVVLEAAQGLDYLHKGCSLPIVHRDVKTNNILLGQNLQGRGHVIQRVKQKVATGDVGSIADSRLGSAYDISSMWKVIDTAVMCTADSAAQRPTMATVVVQLKESLALEETREKGSSNRVSRGSDIEAMASTLGPFAR

SEQ ID NO: 190273 - protein, 432 aa, Zea Mays
MGDPCFPIKYAWDGVKCSNASGNTSRITSLSLHGTISKNFTLLTALENLDLSYNKLIGSIPDSLPSLPSLRVLNVSGNQLSDESLCKNYTGPLIFSRDFDGSACNKPSPSPSRNKVAIIAISVVVPVLVLIVLLFTYFIWWAKRKSNVQPVPTHGPTRDPEPDNVSGSQKSYGYNMNKTENRQFTYKELEKFTNNFKKFIGQGGFGPVYYGRLEDDTEVAVKMRSESSSHGLDEFLAEVQSLTKVHHRNLVSLIGYCWEKDHLALVYEYMSQGSLFDHLRGKNGVSQALNWRKRVQVVLEAAQGLDYLHKGCSLPIVHRDVKTNNILLGQNLQGRGHVIQRVKQKVATGDVGSIADSRLGSAYDISSMWKVIDTAVMCTADSAAQRPTMATVVVQLKESLALEETREKGSSNRVSRGSDIEAMASTLGPFAR

SEQ ID NO: 190274 - protein, 543 aa, Zea Mays
MIFLHFTDFQDTQLRQFDILINENQSGPKLTAYNDTWYLTPTHVHTKSYRADDGKYNVTLAATKASVLPPMINALEIYIRVPYESPTTLPQDFDAIVAIKTEYGLSRNWMGDPCFPIKYAWDGVKCSNASGNTSRITSLDLSNSSLHGTISKNFTLLTALENLDLSYNKLIGSIPDSLPSLPSLRVLNVSGNQLSDESLCKNYTGPLIFSRDFDGSACNKPSPSPSRNKVAIIAISVVVPVLVLIVLLFTYFIWWAKRKSNVPTHGPTRDPEPDNVSGSQKSYGYNMNKTENRQFTYKELEKFTNNFKKFIGQGGFGPVYYGRLEDDTEVAVKMRSESSSHGLDEFLAEVQSLTKVHHRNLVSLIGYCWEKDHLALVYEYMSQGSLFDHLRGKNGVSQALNWRKRVQVVLEAAQGLDYLHKGCSLPIVHRDVKTNNILLGQNLQGRGHVIQRVKQKVATGDVGSIADSRLGSAYDISSMWKVIDTAVMCTADSAAQRPTMATVVVQLKESLALEETREKGSSNRVSRGSDIEAMASTLGPFAR

SEQ ID NO: 190275 - protein, 257 aa, Zea Mays
MNKTENRQFTYKELEKFTNNFKKFIGQGGFGPVYYGRLEDDTEVAVKMRSESSSHGLDEFLAEVQSLTKVHHRNLVSLIGYCWEKDHLALVYEYMSQGSLFDHLRGKNGVSQALNWRKRVQVVLEAAQGLDYLHKGCSLPIVHRDVKTNNILLGQNLQGRGHVIQRVKQKVATGDVGSIADSRLGSAYDISSMWKVIDTAVMCTADSAAQRPTMATVVVQLKESLALEETREKGSSNRVSRGSDIEAMASTLGPFAR

SEQ ID NO: 190276 - protein, 121 aa, Zea Mays
MWPTSSDPPLATKSPDLAAERDCRASWCDYGSVHAYICGHDPDSIPSTSWYSSRPPEGHWVCGWPECANFPSIDPPLPPGVLDVASVHLSAFPADEQAKEDPGVQQVETAERELVEGKLCL

SEQ ID NO: 190277 - protein, 89 aa, Zea Mays
MTRFPICLAQQFTSRYSKPSLIHEEVASYDMWIWHAFFGMPGSNKDINFLQHPHIFDPLRQGTMSPVHYTINNHTYETGYFLADDIYPD

SEQ ID NO: 190278 - protein, 60 aa, Zea Mays
MTTFIISHNMIVDDEGFQAINLDFVDVGESVRFSNDVPQTRSESVQSHLDIMGHAGHTQL

SEQ ID NO: 190279 - protein, 461 aa, Zea Mays
MALAFLVLLLLFAPVAVSQQGFLSIDCGLDADSSGYTDKVTGIVYVSDGSYVDAGENHRIAPDLEGTFEGSSQTLRSFPSGQRNCYALPTVAGTRYLARATFAYGNYDGKNSSALEFDLHLGANYWQTVYPNARSSNAHEAVFVAWAGWTPWCLVNTGRGTPFVSVLELRPLGAALYPLVTPGLVVSTFTRINMGGSVSTTRYPDDPYDRFWWAMDEASPRWVNLSTTRPIQPDTSSYAVPSRVLQTAVAAASNNGTAAALTAMNWQYDTKYSFMIFLHFTDFVHSQIRQFDILINENESGPKFTAYNDTCYLIPTHVHTESYRAAGGKYNVTLAATKASVLPPMLNALEIYVRVPYESPTTLPQDLDAIMAIKTEYGVRKNWMGDPCFPIKYAWDGVKCSNASGNTSRITSLDLSNSSLHGTISNDFTLLTALENLDLSYNKLSGSIPDSLPTLPSLRVL

SEQ ID NO: 190280 - protein, 203 aa, Zea Mays
MDRRKGGNRDANGSLVEATASRLRVESDEEAEEVGMEVEESFDAGVEDEQAAAEVIGSEKTSADYYFDSYSHFGIHEEMLKDVVRTKTYQNVITQSSFLIKNKVVLDVGAGTGILSLFCAKAGAKHVYAIECSQMADMAQEIVKSNGYSDVITVIKGKVEEIELPVPKVDVIISEWMGYFLLFENMLNTVLYARDKWLVSDPL

SEQ ID NO: 190281 - protein, 664 aa, Zea Mays
MEDADPSSSLAGPWNDRLPGKEDYTDEPKKTGGREPSVAMGEGRRGGCRRGLVVGRVHWQVDDDVEEDDIDFNPFLREGSPSETSSSLTSEAECEEHSSENQPSNHTYQQNTVVNENTSDSALPQNRLSSQDAVNEMFPEETSTQVNIENDGHLNGLEKDVLASEAACSPTVQDPHHLSLEISEEDAICKRTRARYSLANYSLEELETFLQESDDDSGLQNVDEEEEYRKFLAAVLSGVGNDTQTFQGDENQDEDDNDADFELEIEEALESDGDENVENYHNTNPRKEKDVRRPQTRQRRPLTGMSGAGSDHQESNKTHLRPIVPYIPSALVTPAHAFGWQYANQNAFFPSSLVSLTRPPLACGFTYQQLGQLHVLIYEHVQLLIQTFSLCVLDSSKQDVANNVKKMIVELVGARDQALARSSPQRHIFFETQHLSSSFVSSDNLERQWIPLIKSPIISVLDVAPLELVLDYLSDVFTAVVKYRKSHVDGTADKTRRKEPLFPSAAINSCKQVNNVSQDRSNGVPTASPPSGQLQQKKSLAATLLENIKKDTIALVPADIARLAQRFFSLFNFALFPHKSPPSPMANRVLFTDAEDRLLALGILEYNNDWAAIQKRFLPCKSKHQIFVRQKNRSSSKAPDNPVKGSKFNIMVKVSIELHSTVTG

SEQ ID NO: 190282 - protein, 664 aa, Zea Mays
MEDADPSSSLAGPWNDRLPGKEDYTDEPKKTGGREPSVAMGEGRRGGCRRGLVVGRVHWQVDDDVEEDDIDFNPFLREGSPSETSSSLTSEAECEEHSSENQPSNHTYQQNTVVNENTSDSALPQNRLSSQDAVNEMFPEETSTQVNIENDGHLNGLEKDVLASEAACSPTVQDPHHLSLEISEEDAICKRTRARYSLANYSLEELETFLQESDDDSGLQNVDEEEEYRKFLAAVLSGVGNDTQTFQGDENQDEDDNDADFELEIEEALESDGDENVENYHNTNPRKEKDVRRPQTRQRRPLTGMSGAGSDHQESNKTHLRPIVPYIPSALVTPAHAFGWQYANQNAFFPSSLVSLTRPPLACGFTYQQLGQLHVLIYEHVQLLIQTFSLCVLDSSKQDVANNVKKMIVELVGARDQALARSSPQRHIFFETQHLSSSFVSSDNLERQWIPLIKSPIISVLDVAPLELVLDYLSDVATAVVKYRKSHVDGTADKTRRKEPLFPSAAINSCKQVNNVSQDRSNGVPTASPPSGQLQQKKSLAATLLENIKKDTIALVPADIARLAQRFFSLFNFALFPHKSPPSPMANRVLFTDAEDRLLALGILEYNNDWAAIQKRFLPCKSKHQIFVRQKNRSSSKAPDNPVKGSKFNIMVKVSIELHSTVTG

SEQ ID NO: 190283 - protein, 606 aa, Zea Mays
MEVDDDVEEDDIDFNPFLREGSPSETSSSLTSEAECEEHSSENQPSNHTYQQNTVVNENTSDSALPQNRLSSQDAVNEMFPEETSTQVNIENDGHLNGLEKDVLASEAACSPTVQDPHHLSLEISEEDAICKRTRARYSLANYSLEELETFLQESDDDSGLQNVDEEEEYRKFLAAVLSGVGNDTQTFQGDENQDEDDNDADFELEIEEALESDGDENVENYHNTNPRKEKDVRRPQTRQRRPLTGMSGAGSDHQESNKTHLRPIVPYIPSALVTPAHAFGWQYANQNAFFPSSLVSLTRPPLACGFTYQQLGQLHVLIYEHVQLLIQTFSLCVLDSSKQDVANNVKKMIVELVGARDQALARSSPQRHIFFETQHLSSSFVSSDNLERQWIPLIKSPIISVLDVAPLELVLDYLSDVFTAVVKYRKSHVDGTADKTRRKEPLFPSAAINSCKQVNNVSQDRSNGVPTASPPSGQLQQKKSLAATLLENIKKDTIALVPADIARLAQRFFSLFNFALFPHKSPPSPMANRVLFTDAEDRLLALGILEYNNDWAAIQKRFLPCKSKHQIFVRQKNRSSSKAPDNPVKGSKFNIMVKVSIELHSTVTG

SEQ ID NO: 190284 - protein, 586 aa, Zea Mays
MEVDDDVEEDDIDFNPFLREGSPSETSSSLTSEAECEEHSSENQPSNHTYQQNTVVNENTSDSALPQNRLSSQDAVNEMFPEETSTQVNIENDGHLNGLEKDVLASEAACSPTVQDPHHLSLEISEEDAICKRTRARYSLANYSLEELETFLQESDDDSGLQNVDEEEEYRKFLAAVLSGVGNDTQTFQGDENQDEDDNDADFELEIEEALESDGDENVENYHNTNPRKEKDVRRPQTRQRRPLTGMSGAGSDHQESNKTHLRPIVPYIPSALVTPAHAFGWQYANQNAFFPSSLVSLTRPPLACGFTYQQLGQLHVLIYEHVQLLIQTFSLCVLDSSKQDVANNVKKMIVELVGARDQALARSSPQRHIFFETQHLSSSFVSSDNLERQWIPLIKSPIISVLDVAPLELVLDYLSDVATAVVKYRKSHVDGTADKTRRKEPLFPSAAINSCKQVNNVSQDRSNGVPTASPPSGQLQQKKSLAATLLENIKKDTIALVPADIARLAQRFFSLFNFALFPHKSPPSPMANRVLFTDAEDRLLALGILEYNNDWAAIQKRFLPCKSKHQIFVRQKNRSSSKAPDNPVK

SEQ ID NO: 190285 - protein, 586 aa, Zea Mays
MEVDDDVEEDDIDFNPFLREGSPSETSSSLTSEAECEEHSSENQPSNHTYQQNTVVNENTSDSALPQNRLSSQDAVNEMFPEETSTQVNIENDGHLNGLEKDVLASEAACSPTVQDPHHLSLEISEEDAICKRTRARYSLANYSLEELETFLQESDDDSGLQNVDEEEEYRKFLAAVLSGVGNDTQTFQGDENQDEDDNDADFELEIEEALESDGDENVENYHNTNPRKEKDVRRPQTRQRRPLTGMSGAGSDHQESNKTHLRPIVPYIPSALVTPAHAFGWQYANQNAFFPSSLVSLTRPPLACGFTYQQLGQLHVLIYEHVQLLIQTFSLCVLDSSKQDVANNVKKMIVELVGARDQALARSSPQRHIFFETQHLSSSFVSSDNLERQWIPLIKSPIISVLDVAPLELVLDYLSDVFTAVVKYRKSHVDGTADKTRRKEPLFPSAAINSCKQVNNVSQDRSNGVPTASPPSGQLQQKKSLAATLLENIKKDTIALVPADIARLAQRFFSLFNFALFPHKSPPSPMANRVLFTDAEDRLLALGILEYNNDWAAIQKRFLPCKSKHQIFVRQKNRSSSKAPDNPVK

SEQ ID NO: 190286 - protein, 575 aa, Zea Mays
MEVDDDVEEDDIDFNPFLREGSPSETSSSLTSEAECEEHSSENQPSNHTYQQNTVVNENTSDSALPQNRLSSQDAVNEMFPEETSTQVNIENDGHLNGLEKDVLASEAACSPTVQDPHHLSLEISEEDAICKRTRARYSLANYSLEELETFLQESDDDSGLQNVDEEEEYRKFLAAVLSGVGNDTQTFQGDENQDEDDNDADFELEIEEALESDGDENVENYHNTNPRKEKDVRRPQTRQRRPLTGMSGAGSDHQESNKTHLRPIVPYIPSALVTPAHAFGWQYANQNAFFPSSLVSLTRPPLACGFTYQQLGQLHVLIYEHVQLLIQTFSLCVLDSSKQDVANNVKKMIVELVGARDQALARSSPQRHIFFETQHLSSSFVSSDNLERQWIPLIKSPIISVLDVAPLELVLDYLSDVFTAVVKYRKSHVDGTADKTRRKEPLFPSAAINSCKQVNNVSQDRSNGVPTASPPSGQLQQKKSLAATLLENIKKDTIALVPADIARLAQRFFSLFNFALFPHKSPPSPMANRVLFTDAEDRLLALGILEYNNDWAAIQKRFLPCKSKHQKFFESNER

SEQ ID NO: 190287 - protein, 54 aa, Zea Mays
MYFQINDILKLFFAHINTKKVHVFPVEPRKEMTCNPINLFCIFIRNDRKIPTLK

SEQ ID NO: 190288 - protein, 154 aa, Zea Mays
MAERWKSVFSVPKAENARPTGRWPAAKPKASDLLARSLDCSLDRKDSILAAIHLFRRSMAFDSTTSLSSSDPAAPDLYASSDTDIVSSGSNSVASDPPRQGISVPARFWQKTNSRMLHASSRIAIRSDFGSRSRYITLDAPGSSSLLFTWHSGT

SEQ ID NO: 190289 - protein, 119 aa, Zea Mays
MTIHLIGYPHGRTISSWITDGGSLRMDAQPSNQADISFTICHIGLHSIRIYRTLVDELETPWILTIVRPLDHVTLNKQNLRVSEWCVPCYLETLQQLRIESAVELYMLKNVVFQLWLSF

SEQ ID NO: 190290 - protein, 133 aa, Zea Mays
MEGDRLRCTPALLPRIVVGRGGGIQSAASGEDLVWPLSRLASMCPGSRSSPTLCPGSRSSPTLSIEGDPVYRKQTVVGRGGGIRSMTRTPVSVRGYGDLRMKGQINGAQGDSGADQLNTTIDDSEEVTHFYGI

SEQ ID NO: 190291 - protein, 224 aa, Zea Mays
MEGDRLRCTPALLPRIVVGRGGDIRNTVSGEDPVWPLGRSASLCPESRSSPTLSMEGDSVYRERIMVGRGGGIQSAASGEDLVWPLSRLASMCPGSRSSPTLCPGSRSSPTLSIEGDPVYRKQTVVGRGGGIRSMTRTPVSVRGYGDLRMKGQINGAQGDSGADQLNTTIDDSEEVLSLESTAGLESVRCMSRTDLKLDGSFADMILIPDTGVLDKSRILHLLF

SEQ ID NO: 190292 - protein, 232 aa, Zea Mays
MATAAAQSHPASMDARRWDESSYRRGILRARDLSSRTLFRAVFFDHSDDPDTDILLAAASSDGSLASFSLSSCISACSATSQVETAATLVDPVCIVQAHSGPAYDVRFYPDQQQPLLFSCGDDGRIKGWRWHEMQSCLVPLSLQGDHLEPALDLVNPQHEGPWGARSPVPENNAIAINKQDGSILAAAGDACAYCWDVVCIFLRRPVNVKSHSRGMLIICTALQFVSQTARL

SEQ ID NO: 190293 - protein, 665 aa, Zea Mays
MWPASLQSLQRHTPAGRLHINQLQYNATSRVERWGAEGSREGTGRAAHLSLLENERSSRLLLAVPGAAEGSAQSDGVERQSSALVQAAAAAAGVPALPLGAVPRQGRSIQPEEPPALPQGQQLPRGVPDDVRLHHRRRRHRGVPAGGDAVAQVQGAAAGARRLPVRRPQRLLHAELPHRAHEHGAGLAVAGLHLHRRRHQCPGEGVGRWDLHQCRLLQPGQPNFIQEAGWDEDLVNKSYPWVEDKIVQWPKIAPWQAALRDGLLQAGVAPFNGYTYDHVSGTKVGGTIFDETGYRHTAADLLAAGDASNLKVLLHASVHKIVFGSRQGRLKARAIGVEFTDEDGRHHQAFLNSNRDSEVIVSAGAIGTPQLLLLSGIGPKNDLKNHNIPVVLHNRYVGKGMADNPMNSIFIPTRSPPRQSLIETVGITEEGVFIEASSGFGQSSESVHCHHGIMSAEIGQLSTIPPKQRTLEAAQKYAHNKLNLPKEVFHGGFILEKIDGPMSTGHLVLTDTDVRNNPAVTFNYFSHPQDLNRCIYGIKTIERILKTNRFSELSADGAGLSMERVLNMSVQANVNLIPKHTNDTESLEQFCKDTVITIWHYHGGCHVGKVVDQHYRVLGVSGLRVVDGSIFSKSPGTNPQATVMMMGRYMGVKILRERLGRAAGV

SEQ ID NO: 190294 - protein, 55 aa, Zea Mays
MDTDKWCDSQVPLHRVSTMPVSYGRTGGNLSLLNSSSWILLMMVLKLKCRKRASK

SEQ ID NO: 190295 - protein, 389 aa, Zea Mays
MAKPSVAVPEVGVPAAQASCTCPGTLLAYPPPRGAGVAAAVRRKCLQVELGAGAGLLGGAGAWGVESMRASSPTHARAAAALAAGGGVDVDVDEERAASWMARHPSALGRFERIVAAAEGKRIVMFLDYDGTLSPIVDDPDAAFMSETMRMAVRSVAKHFPTAIVSGRCRDKVFEFVKLAELYYAGSHGMDIKGPAAAKASSSSRHAAKAKGVVFQPASEFLPMIEEVHERLVQTTRCIPGAKVENNRFCVSVHFRRVDEKMWGELSESVRGVLRGYPKLRLTHGRMVLEVRPSIKWDKGKALEFLLESLGFADCSSVLPVYIGDDRTDEDAFKVLRRRGQDQGVGILVSKHPKETSASYSLQGPAEVMEFLLRLVEWKRLSRARLRLQ

SEQ ID NO: 190296 - protein, 153 aa, Zea Mays
MAQAIPKNKNRSAERRSSFHIPHSRWQPGANPNPHRLALTNTAAARCAQPSAVRRAIEGRPSLPPLPAVPSLPPFQPRADAVRGPPLCPLPTAQRPQLYGLLCRAGESPFAARLLCPGGQAPSPPATRPGGPCHACAFRGPPLCACAFRAVTS

SEQ ID NO: 190297 - protein, 292 aa, Zea Mays
METTEPSRGTKRPLTATAGDDDDAGLERKPRFPKGKKAKYRDVGAEGGPSGNAVDLDSMLNPELAAERRARQRHVQLKEGDDAKGGAAEVKGFEVRYNDSVNFVDDGIRIEPFNLEREREEGYFDENGNFVEYARGNEIKDAWLDSVEVDPTYAAKVQNKGKEKVDEFEDLSSDDIGRLKRQIANLLEPGETMFTQMIVRPLNARLLGMNVWHVLDLVCQKLMVSLKTKNIIRHHHLHWKLTNHHLYWKWNLVPRLPMYIQPLLQSMMMTVTWTCLVMMTTMIPNIVLMPIL

SEQ ID NO: 190298 - protein, 365 aa, Zea Mays
MLNPELAAERRARQRHVQLKEGDDAKGGAAEVKGFEVRYNDSVNFVDDGIRIEPFNLEREREEGYFDENGNFVEYARGNEIKDAWLDSVEVDPTYAAKVQNKGKEKVDEFEDLSSDDIGRLKRQIANLLEPGETIMQALKRLKGTSTDKRGKMAEGTKRIFDELTEAAMKLMENGDYNVYSDDRETFEREAAGYERLARARLGLPEVDGVSEDQKYNQTPSSALEIDQPSSVLEMELGPSTANVYTATAAINDDDSNLDMFGDDDNDDTKHSSDANTVGSGLKPGTSDVKKADNGSVDSDYVYDPSSGYYYSSSTGYYYDPNSGYYGSASTGTWYSYDEQTGTYKEIQDEQTGTVKEELGDAIKE

SEQ ID NO: 190299 - protein, 278 aa, Zea Mays
METTEPSRGTKRPLTATAGDDDDAGLERKPRFPKGKKAKYRDVGAEGGPSGNAVDLDSMLNPELAAERRARQRHVQLKEGDDAKGGAAEVKGFEVRYNDSVNFVDDGIRIEPFNLEREREEGYFDENGNFVEYARGNEIKDAWLDSVEVDPTYAAKVQNKGKEKVDEFEDLSSDDIGRLKRQIANLLEPGETLGMNVWHVLDLVCQKLMVSLKTKNIIRHHHLHWKLTNHHLYWKWNLVPRLPMYIQPLLQSMMMTVTWTCLVMMTTMIPNIVLMPIL

SEQ ID NO: 190300 - protein, 336 aa, Zea Mays
MLGELCFGSQQDSVNFVDDGIRIEPFNLEREREEGYFDENGNFVEYARGNEIKDAWLDSVEVDPTYAAKVQNKGKEKVDEFEDLSSDDIGRLKRQIANLLEPGETIMQALKRLKGTSTDKRGKMAEGTKRIFDELTEAAMKLMENGDYNVYSDDRETFEREAAGYERLARARLGLPEVDGVSEDQKYNQTPSSALEIDQPSSVLEMELGPSTANVYTATAAINDDDSNLDMFGDDDNDDTKHSSDANTVGSGLKPGTSDVKKADNGSVDSDYVYDPSSGYYYSSSTGYYYDPNSGYYGSASTGTWYSYDEQTGTYKEIQDEQTGTVKEELGDAIKE

SEQ ID NO: 190301 - protein, 220 aa, Zea Mays
MQLLGDAMLQWMSHNQMRYLLSDSKRLKVLQAFIMSSPPDIAQFILKAVAQNCTRLAYQPDGLSLLQNCLERVSRKQKDDIFTQLSYQSLFLAQNSRGNWIVQDVLRKGDPSHVEIIASCLRNHYVTLAKNKYSSNVVEWCLRVFHEGERSVIICEFINYPHFRDLVTDEFANFALSTALQTCEIPLRNVLANAILSQNITVRNQHCMKIFSTLAKYGFM

SEQ ID NO: 190302 - protein, 237 aa, Zea Mays
MPDEVVHIISSCETRRSMQLLGDAMLQWMSHNQMRYLLSDSKRLKVLQAFIMSSPPDIAQFILKAVAQNCTRLAYQPDGLSLLQNCLERVSRKQKDDIFTQLSYQSLFLAQNSRGNWIVQDVLRKGDPSHVEIIASCLRNHYVTLAKNKYSSNVVEWCLRVFHEGERSVIICEFINYPHFRDLVTDEFANFALSTALQTCEIPLRNVLANAILSQNITVRNQHCMKIFSTLAKYGFM

SEQ ID NO: 190303 - protein, 547 aa, Zea Mays
MAGQPRERGSRSSRKGRSARAGLAQAPPPASDPDLTVGEDAAPWLRATADELEERLLKRLDEAYAAALARLADLGHGEEASLEAVLHSGHCYGKLNDPVSNIVANARAYLSDPGHASAAGGFADLRRLEEYSLAGLVCLLQSSRPTLTRAEALWCLLSSDLRIEEAIAISSSFNGEPSSIAESEEHLPAVAETAQRGYIHYHNTTATAAQDPTLFDPEAFMRLAICQGPAAATISCLKAAGWSRSSGAAPEGQPRESFTKKLSTEELIESVVAELEALDIDKKDPPDANPDPKNQMARELIKQTREMETQLKERKEWAQGKAIQAARKLGADLTELRVLRMEHDENQRRKKEKQVMEDDTMKRLAHLENELKKKSGQLDRSNATVQRLEMENAEIRAEMEAAKLSASETEKQCQGLLRKEKKDSKRLEVWERQKAKLKEDIAECKTNITQAERELAEVNKAIKNMEKKMREDTRVKEENMVLLEDERRKKEAAKADNDRRLEELRRKKEVESECYKDDLHRLQDELSRLQKSAGSQAAGHPAATTCI

SEQ ID NO: 190304 - protein, 618 aa, Zea Mays
MAGQPRERGSRSSRKGRSARAGLAQAPPPASDPDLTVGEDAAPWLRATADELEERLLKRLDEAYAAALARLADLGHGEEASLEAVLHSGHCYGKLNDPVSNIVANARAYLSDPGHASAAGGFADLRRLEEYSLAGLVCLLQSSRPTLTRAEALWCLLSSDLRIEEAIAISSSFNGEPSSIAESEEHLPAVAETAQRGYIHYHNTTATAAQDPTLFDPEAFMRLAICQGPAAATISCLKAAGWSRSSGAAPEGQPRESFTKKLSTEELIESVVAELEALDIDKKDPPDANPDPKNQMARELIKQTREMETQLKERKEWAQGKAIQAARKLGADLTELRVLRMEHDENQRRKKEKQVMEDDTMKRLAHLENELKKKSGQLDRSNATVQRLEMENAEIRAEMEAAKLSASETEKQCQGLLRKEKKDSKRLEVWERQKAKLKEDIAECKTNITQAERELAEVNKAIKNMEKKMREDTRVKEENMVLLEDERRKKEAAKADNDRRLEELRRKKEVESECYKDDLHRLQDELSRLQKSAAKQQAILRPQPASNRSLPPPAQKPSRRRDCVACKKAAACVILLQCAHQVLCVGCNKLHEDKGITRCPCCSAEVEERIRVFGASSN

SEQ ID NO: 190305 - protein, 183 aa, Zea Mays
MSQLMMCEGLKHMHSFDPPYAHNDVKPGNVLITWRKGQAPVATLMDFGSARPARKEIRSRSEALQLQEWAAEHCSAPYRAPELWDCPSHADIDERTDIWSLGCTLFAIMYNVSPFEYALGESGGSLQLAIVNGQLKWPAGPKPPYPDELRHFVIWMLQPEAVMRPHISDVVLHVDKLIAKYLP

SEQ ID NO: 190306 - protein, 122 aa, Zea Mays
MGCSISGLNALYDAATGGGDVWINERRFRVLRQIGEGGFAFVYLVREHQPASDAAFARRDPAHVSEDGTYAMKKVLIQSKEQLDLVREEIRVSSLFNHPNLLPLLDHAIIAVKALEAKSRGG

SEQ ID NO: 190307 - protein, 59 aa, Zea Mays
MVLLPPFALGLGDFHVVNNDDVCQRDGKARGADAGSETVRGDGHAPSSPLPSPPTYILC

SEQ ID NO: 190308 - protein, 113 aa, Zea Mays
MSYIWKKSGPYCILTHTVFCSIISLVFWLIMCLMSSPSIVDSSRSITRSRVYCNELSTVFMCPENHSCSLHSFAQLICLHPCLGAFFCSHFWKSVAMHVFSSLLPWQATEDIY

SEQ ID NO: 190309 - protein, 603 aa, Zea Mays
MYQQKQGLVHAYATKILTSKCQPQESLIIKFCRHNCSSLSLGSKLEACKLVLVVPFSNLVCKCESLWILSMLKLWNGSEKVGKSQGFLCDGVSYTSSTKRIISSEDLDFILVGSIKTSPLSGRLQLVDSTGCIDVFIPDLPPNESLHDIYEIVNYKLALEGPMAYIDHYDVADALSCKAVFQKLPYKKRLHHLNIYVIVQWRQLIHIGPSSCIPSYINYRIRLFHLLKLSHIFPVNSNIQCSNMPGSSLYAEAVILPYVLKFIGQGEFLEHAEGFIMSHSTLLGNSEASVAKSCNIPCSLSFGSTNLCGTLVSTYASGSEGTVLNEPIVLRKEYSRILLEFEAGIFKKYQLPRINGSYILQCPSRSFTCTMGNCGCLQGGKVSIDAQDRLWSFAITIGGNINIKGSIGDQSIGVTSMKMDEIFSRNMVDDELRLVQPWNDFYRNSYFHLDFSYEAISKKMEDYNTVCHVLNGLCVSSSEVLSVSSCVDIMMPKDASVSADFKTKEVVHGDLLISVQGKVENIHSLVCKWERCIPGNEKYSLCIHIADNNHAVYIRGYSNKHFTVGIGPGATVTFHRIRFKQFAPSLLVFFNCFFHYFVRIVAA

SEQ ID NO: 190310 - protein, 572 aa, Zea Mays
MEALGAPPPPRFTVADLLRLRRPTTGASSLLCLSVPTSTSTSRPRKKHKLSAPVPTWSTGTVPFAPMSHPVLLSGTLSLPSASSPISCRSNCFSFSDPCPTAASPATAAASVCCCILDFDPAALGRVIRVLAWNYLPSLRLHAEPGVLEVVRWHLEESAPPVKYSFLATVPFRFPDQEPDLATRGCAFGLVRSVSIVFSMPLAKADAGSRNSVGFLAEILCCGCRRCCRATPPEDAQTHMFETMKFVYFVDASSMWRPVLVWLVGRLVYISGLSKKMVSVGDKASHTILVSSAKTTMAWCPSYRGSLPLDNLPEKCGGEYAGVITGIYSQGLVVELDDTAWLLIDDQKLLPPHSLRVGAIVSVKNFRAVCLNFAWTRVVLLATCSKTCITVNCFSLVDSKIHLKTDNKGLLGTFVDSLEMPARFWMLLLISCFKQKFTKLFSDKEILGSQNKQGLVHAYATKILTSKCQPQESLIIKFCRHNCSSLSLGSKLEACKLVVPFSNLVCKCESLWILSMLKLWNGSEKVGKSQGFLCDGVSYTSSTKRIISSEDLDFILVGSIKVISVLALSTSN

SEQ ID NO: 190311 - protein, 615 aa, Zea Mays
MEALGAPPPPRFTVADLLRLRRPTTGASSLLCLSVPTSTSTSRPRKKHKLSAPVPTWSTGTVPFAPMSHPVLLSGTLSLPSASSPISCRSNCFSFSDPCPTAASPATAAASVCCCILDFDPAALGRVIRVLAWNYLPSLRLHAEPGVLEVVRWHLEESAPPVKYSFLATVPFRFPDQEPDLATRGCAFGLVRSVSIVFSMPLAKADAGSRNSVGFLAEILCCGCRRCCRATPPEDAQTHMFETMKFVYFVDASSMWRPVLVWLVGRLVYISGLSKKMVSVGDKASHTILVSSAKTTMAWCPSYRGSLPLDNLPEKCGGEYAGVITGIYSQGLVVELDDTAWLLIDDQKLLPPHSLRVGAIVSVKNFRAVCLNFAWTRVVLLATCSKTCITVNCFSLVDSKIHLKTDNKGLLGTFVDSLEMPARFWMLLLISCFKQKFTKLFSDKEILGSQNKQGLVHAYATKILTSKCQPQESLIIKFCRHNCSSLSLGSKLEACKLVVPFSNLVCKCESLWILSMLKLWNGSEKVGKSQGFLCDGVSYTSSTKRIISSEDLDFILVGSIKTSPLSGRLQLVDSTGCIDVFIPDLPPNESLHDIYELCFRSFLTKKDCITSIFML

SEQ ID NO: 190312 - protein, 1048 aa, Zea Mays
MEALGAPPPPRFTVADLLRLRRPTTGASSLLCLSVPTSTSTSRPRKKHKLSAPVPTWSTGTVPFAPMSHPVLLSGTLSLPSASSPISCRSNCFSFSDPCPTAASPATAAASVCCCILDFDPAALGRVIRVLAWNYLPSLRLHAEPGVLEVVRWHLEESAPPVKYSFLATVPFRFPDQEPDLATRGCAFGLVRSVSIVFSMPLAKADAGSRNSVGFLAEILCCGCRRCCRATPPEDAQTHMFETMKFVYFVDASSMWRPVLVWLVGRLVYISGLSKKMVSVGDKASHTILVSSAKTTMAWCPSYRGSLPLDNLPEKCGGEYAGVITGIYSQGLVVELDDTAWLLIDDQKLLPPHSLRVGAIVSVKNFRAVCLNFAWTRVVLLATCSKTCITVNCFSLVDSKIHLKTDNKGLLGTFVDSLEMPARFWMLLLISCFKQKFTKLFSDKEILGSQNKQGLVHAYATKILTSKCQPQESLIIKFCRHNCSSLSLGSKLEACKLVVPFSNLVCKCESLWILSMLKLWNGSEKVGKSQGFLCDGVSYTSSTKRIISSEDLDFILVGSIKTSPLSGRLQLVDSTGCIDVFIPDLPPNESLHDIYEIVNYKLALEGPMAYIDHYDVADALSCKAVFQKLPYKKRLHHLNIYVIVQWRQLIHIGPSSCIPSYINYRIRLFHLLKLSHIFPVNSNIQCSNMPGSSLYAEAVILPYVLKFIGQGEFLEHAEGFIMSHSTLLGNSEASVAKSCNIPCSLSFGSTNLCGTLVSTYASGSEGTVLNEPIVLRKEYSRILLEFEAGIFKKYQLPRINGSYILQCPSRSFTCTMGNCGCLQGGKVSIDAQDRLWSFAITIGGNINIKGSIGDQSIGVTSMKMDEIFSRNMVDDELRLVQPWNDFYRNSYFHLDFSYEAISKKMEDYNTVCHVLNGLCVSSSEVLSVSSCVDIMMPKDASVSADFKTKEVVHGDLLISVQGKVENIHSLVCKWERCIPGNEKYSLCIHIADNNHAVYIRGYSNKHFTVGIGPGATVTFHRIRFKQFAPSLLVFFNCFFHYFVRIVAA

SEQ ID NO: 190313 - protein, 464 aa, Zea Mays
MEALGAPPPPRFTVADLLRLRRPTTGASSLLCLSVPTSTSTSRPRKKHKLSAPVPTWSTGTVPFAPMSHPVLLSGTLSLPSASSPISCRSNCFSFSDPCPTAASPATAAASVCCCILDFDPAALGRVIRVLAWNYLPSLRLHAEPGVLEVVRWHLEESAPPVKYSFLATVPFRFPDQEPDLATRGCAFGLVRSVSIVFSMPLAKADAGSRNSVGFLAEILCCGCRRCCRATPPEDAQTHMFETMKFVYFVDASSMWRPVLVWLVGRLVYISGLSKKMVSVGDKASHTILVSSAKTTMAWCPSYRGSLPLDNLPEKCGGEYAGVITGIYSQGLVVELDDTAWLLIDDQKLLPPHSLRVGAIVSVKNFRAVCLNFAWTRVVLLATCSKTCITVNCFSLVDSKIHLKTDNKGLLGTFVDSLEMPARFWMLLLISCFKQKFTKLFSDKEILGSQNVPTEARVGSCLCY

SEQ ID NO: 190314 - protein, 249 aa, Zea Mays
MALIMPATSRMVGGGAEPGEASTHCIATCSSRTMRCSDDPTPVPASSARSNTSAVHSSRITEVTHRASSAPSPCADVAFPVSSSSSSTPSARTSARNAAAPSLPGAVTPYSLMHGSMPAVKRTLEALRLPWAIGPPDEELVVPPSPRRVVCMNAMPSATLAAMWRRAGQSSGAWLLSMEPADCNLADGARSCSGGSPGSSTKACTRGSACHSFGWQAPVLCITCYLCYFTTLNDCRIECALKCRSCLKL

SEQ ID NO: 190315 - protein, 87 aa, Zea Mays
MLPDPRQALATQRAPNPTQPRHRPCPSLHSTRLEPRQPSTVKRATDRHPDPRRAPARHPGFPASTQQRPAHPQELAAKLVVKGSKNR

SEQ ID NO: 190316 - protein, 153 aa, Zea Mays
MLPDPRQALATQRAPNPTQPRHRPCPSLHSTRLEPRQPSTVKRATDRHPDPRRAPARHPGFPASTQQRPAHPQELAAKLVVKVIQDLAVLLQNIFASRATTAASQVGHRLTLSILHQLLPTSVIYNESFPYPCWFTVIRHPTTVTKPQLDIGS

SEQ ID NO: 190317 - protein, 275 aa, Zea Mays
MPNGLGLNHSSNWSTMNSNRSSKIKPLWEGSCDDVDMCEFADKDEYAPVGSSYNPMSEPFDNWENKFDTSPEQSSHEPMEFGELAKHAESSITENDFTCPVEGSCEDDVLTESKIKAFLEEKALDLKKLQTPLYEEFYNTVHGGSCQTSKGKFPISPKLPPRGKSPPSKTRGGACDTLNNTAPESCSKQFPRSSVVESSRILREIASPQLNEFADKLHLDAQDSPSISFTERQRKWKEELDQELERERVMRLAGCGKTPSPNRGSNVKKECHADH

SEQ ID NO: 190318 - protein, 228 aa, Zea Mays
MLTCSYNPMSEPFDNWENKFDTSPEQSSHEPMEFGELAKHAESSITENDFTCPVEGSCEDDVLTESKIKAFLEEKALDLKKLQTPLYEEFYNTVHGGSCQTSKGKFPISPKLPPRGKSPPSKTRGGACDTLNNTAPESCSKQFPRSSVVESSRILREIASPQLNEFADKLHLDAQDSPSISFTERQRKWKEELDQELERERVMRLAGCGKTPSPNRGSNVKKECHADH

SEQ ID NO: 190319 - protein, 399 aa, Zea Mays
MKGTPYWMAPEVIVGSGHSFSADIWSVGCTVIEMATGKPPWSQQYQEVALLFHVGTTKSHPPIPEHLSQEAKDFLLKCLQKEPELRSTAPDLLKHPFVTGELDDLQPRNHAAHKDCFNEIHAHDMPNGLGLNHSSNWSTMNSNRSSKIKPLWEGSCDDVDMCEFADKDEYAPVGSSYNPMSEPFDNWENKFDTSPEQSSHEPMEFGELAKHAESSITENDFTCPVEGSCEDDVLTESKIKAFLEEKALDLKKLQTPLYEEFYNTVHGGSCQTSKGKFPISPKLPPRGKSPPSKTRGGACDTLNNTAPESCSKQFPRSSVVESSRILREIASPQLNEFADKLHLDAQDSPSISFTERQRKWKEELDQELERERVMRLAGCGKTPSPNRGSNVKKECHADH

SEQ ID NO: 190320 - protein, 614 aa, Zea Mays
MRRDDAGGGTGFHDLFDSVRRSISFRPTAPAPEAPAGPFGAGAGGIGVRISSCLRKSRGMGLLGLITKSPSPPRRMLPPMPDQSDGGSGGGGANGGVGEENPLIRWRKGELIGAGAFGQVYLGMNLDSGELLAVKQVLIGTSNATREKAQAHIKELEEEVKLLKNLSHPNIVRYLGTVREEDTLNILLEFVPGGSIQSLLGKLGSFPEPVIKKYTKQILQGLEYLHSNAIIHRDIKGANILVDNKGCIKLADFGASKQVAKLVALLFHVGTTKSHPPIPEHLSQEAKDFLLKCLQKEPELRSTAPDLLKHPFVTGELDDLQPRNHAAHKDCFNEIHAHDMPNGLGLNHSSNWSTMNSNRSSKIKPLWEGSCDDVDMCEFADKDEYAPVGSSYNPMSEPFDNWENKFDTSPEQSSHEPMEFGELAKHAESSITENDFTCPVEGSCEDDVLTESKIKAFLEEKALDLKKLQTPLYEEFYNTVHGGSCQTSKGKFPISPKLPPRGKSPPSKTRGGACDTLNNTAPESCSKQFPRSSVVESSRILREIASPQLNEFADKLHLDAQDSPSISFTERQRKWKEELDQELERERVMRLAGCGKTPSPNRGSNVKKECHADH

SEQ ID NO: 190321 - protein, 151 aa, Zea Mays
MAAYLSMGEAQRRIGDYLSRVTNAISCSDAAALASLLSVSSAPASTPLSDALAAIPDFPRLAGDRYPDLADLLVPLLRAIHFHSIQRFADAYSSFEKASNAFLQEFRNWETPWAMEAMHTVALEIRLIAEKIGSLRRMERTLTSFRRLGLF

SEQ ID NO: 190322 - protein, 251 aa, Zea Mays
MFQVKGPKRIGALYVTCQLFKIYFRLGTVNLCRSVIRSIETARNFDFEDFPVKDKVTYMYYTGRLEVFNENFLVADQKLTYALMHCNPQSESNLRRILKFLIPVKLSIGVLPKRTLLERYSLLEYADVVTALKRGDLRLLRQALDRHEDQFLKSGVYLVLEKLELQVYQRLVKKIHIIQRQKEPAKAHQIKLDVVVKALKWLEIDMDVDEVECIMACLIYKNLIKGYFAHKSKVLVLSKQDPFPKLNGKPV

SEQ ID NO: 190323 - protein, 162 aa, Zea Mays
MAAYLSMGEAQRRIGDYLSRVTNAISCSDAAALASLLSVSSAPASTPLSDALAAIPDFPRLAGDRYPDLADLLVPLLRAIHFHSIQRFADAYSSFEKASNAFLQEFRNWETPWAMEAMHTVALEIRLIAEKADRELATNGKNPDKLQAAGSFLMKVFGTLAT

SEQ ID NO: 190324 - protein, 241 aa, Zea Mays
MAAYLSMGEAQRRIGDYLSRVTNAISCSDAAALASLLSVSSAPASTPLSDALAAIPDFPRLAGDRYPDLADLLVPLLRAIHFHSIQRFADAYSSFEKASNAFLQEFRNWETPWAMEAMHTVALEIRLIAEKADRELATNGKNPDKLQAAGSFLMKVFGTLAVKGPKRIGALYVTCQLFKIYFRLGTVNLCRSVIRSIETARNFDFEDFPVKDKVTYMYYTGRLEVFNENFLVRNCLQQILF

SEQ ID NO: 190325 - protein, 209 aa, Zea Mays
MAEADPALVVSVVATGSLVYMTRSTSEAMLRRLGAASFAEFLLPNDVAGLKSLFAAGTYRKWWLPDRVLSDYMKLMIFNRKERTQLLEGLVVSDEDAAVVVRSYRQLLYASRLYSCKEATAARLPSEAHGERTRPARLSACSGTYTEEILLLWGDNDSIFNMELARSLKEQLGEKATLRSIAKAGHLVMLERPRVFNGCLREFLLRQSR

SEQ ID NO: 190326 - protein, 368 aa, Zea Mays
MAGSKKLPTGNTTQNVTNSRHLELDVWAKEREVAGLKASLSTLTSEVQRLYKLCAEWKEAEDSLKKKWKKIEEFDARRTELECIYSALQRANMDASSFWEQQPLSARGYASSTIIPACHTVVDMSTNSRDLIERELAAFSQSLDNSLCRLPATPQALLEAVGSNGMTGSEALAAAEKHAALLTARAGARDPSAVPSICRISAALQYNFGTEGTDFGLASVLNSLEFCLKPCGSEASILEDLSKSINFVHTRRNLVENDRVLLNRAHRAQQEYERVANYCLKLAGEQEKLVSERWLPELRNAVQEARRCFDDCQRVRGLVDEWYEQPAATIVDWVTIDGQSVGAWINLVKQLHMEISRRTLAMSSVGDD

SEQ ID NO: 190327 - protein, 371 aa, Zea Mays
MAGSKKLPTGNTTQNVTNSRHLELDVWAKEREVAGLKASLSTLTSEVQRLYKLCAEWKEAEDSLKKKWKKIEEFDARRTELECIYSALQRANMDASSFWEQQPLSARGYASSTIIPACHTVVDMSTNSRDLIERELAAFSQSLDNSLCRLPATPQALLEAVGSNGMTGSEALAAAEKHAALLTARAGARDPSAVPSICRISAALQYNFVSPGTEGTDFGLASVLNSLEFCLKPCGSEASILEDLSKSINFVHTRRNLVENDRVLLNRAHRAQQEYERVANYCLKLAGEQEKLVSERWLPELRNAVQEARRCFDDCQRVRGLVDEWYEQPAATIVDWVTIDGQSVGAWINLVKQLHMEISRRTLAMSSVGDD

SEQ ID NO: 190328 - protein, 751 aa, Zea Mays
MPPSSVSGGSGPGGVSPDAIIEWLQDEMGYPTAPPAPEQLRKICRGNMIPVWSFLLRRVRSERTVATARRNILVHGVAARRAREGGVIGAGVGDAAAREAEARERDLAAEEAERLRGIVRRQRKELRARIAEVAREEAERKRVLGERSNARHKQVMLEAYEQQCDEACKIFAEYQRRLHQFVNQARDVQRSSIGVAGTTGERSIRKACETLAADMIETIRSSFPAFEGSGINSSCQLTAAKLGIDLDGEIPTDVKAVALDSLKNPFLLLQSIITYTSRMKTLIHRETDKIDIRADAELLRYKYENEQVIDAASTDASSPLPYQVYGNGKIGSQLPTRGTYDQLLERQKEHVQQFLATEDALNKAAEAKALSQKLLQRLYGTIDMAGSKKLPTGNTTQNVTNSRHLELDVWAKEREVAGLKASLSTLTSEVQRLYKLCAEWKEAEDSLKKKWKKIEEFDARRTELECIYSALQRANMDASSFWEQQPLSARGYASSTIIPACHTVVDMSTNSRDLIERELAAFSQSLDNSLCRLPATPQALLEAVGSNGMTGSEALAAAEKHAALLTARAGARDPSAVPSICRISAALQYNFGTEGTDFGLASVLNSLEFCLKPCGSEASILEDLSKSINFVHTRRNLVENDRVLLNRAHRAQQEYERVANYCLKLAGEQEKLVSERWLPELRNAVQEARRCFDDCQRVRGLVDEWYEQPAATIVDWVTIDGQSVGAWINLVKQLHMEISRRTLAMSSVGDD

SEQ ID NO: 190329 - protein, 877 aa, Zea Mays
MTAVELRIGPLEWAMDDESPGVGDEDGKDEDWALDMERKGRGKRKRSAPRRRSGPKRRRAAAAMAPAPARSQSEPCPGTAEPSPEHGFNAAAAAAGVKEENGVRKEEGENVAPSTSGRGGGGGRKPGARRSCHQCKRVKRLKEMVRCQCCDERIYCDLCIRNRYAMMSPDAVREQCPFCRGLCNCTRCLNKDRDKQLGPENLVLRKCNSNESSKREKRPTSAGVISPQAHSAAPCTKEIGLSFVTTNRMNNVSAMWAKVDTSDVRAEEVDPETKRKYASYLLHYLLPCLTQLNKDQMEEREAEAKIRGLQLSELIVEKAVSWNDERVFCNNCKTSIFDLHRSCSNCSYELCISCCKELRGNFLKINCQKGLVPEHKSRGIDYMHGGDCKPPNLENDRETGLSSYQSKSIKWEADPGGTIYCPPSELDGCGNHVLELKQIFETDRLIKLEMEALRLSNQIEPSDISSIDICECSCSANNVSSRKAATRENSTDNNIYCPISDNGGPDDLKHFQKHWVKGEPVIVQGVLSEMSDLRWEPEKMWAEVHDANTSSEMKSVKTTDCMSCCEVEISAKDFFNGYYHGRMYHNLWPEMLKLKDWPTSDHFENILPSHGKTYINSLPFQPYTNLKSGLLNVSALLPGDVLKLDMGPKSYIAYGYAEELIRGDSVTKLHCDLSDAVNVLMHTAKVVPSEEQKEGIRDLKIRHAEQDKKECLGNSSIDGNKTSMEHAHISSVSCEDGGGALWDIFRREDVGKLKEYLTKHSKEFRHMYCCPVEKIFNPVHDETFYLTNKHKRKLKEEYGIEPWTFVQRLGDAVFIPAGCPHQVRNLKSCTKIALDFVSPENIQQCLSLTEDFRRLPVGHRAKEDKLEVDLRLGLDLS

SEQ ID NO: 190330 - protein, 893 aa, Zea Mays
MTAVELRIGPLEWAMDDESPGVGDEDGKDEDWALDMERKGRGKRKRSAPRRRSGPKRRRAAAAMAPAPARSQSEPCPGTAEPSPEHGFNAAAAAAGVKEENGVRKEEGENVAPSTSGRGGGGGRKPGARRSCHQCKRVKRLKEMVRCQCCDERIYCDLCIRNRYAMMSPDAVREQCPFCRGLCNCTRCLNKDRDKQLGPENLVLRKCNSNESSKREKRPTSAGVISPQAHSAAPCTKEIGLSFVTTNRMNNVSAMWAKVDTSDVRAEEVDPETKRKYASYLLHYLLPCLTQLNKDQMEEREAEAKIRGLQLSELIVEKAVSWNDERVFCNNCKTSIFDLHRSCSNCSYELCISCCKELRGNFLKINCQKGLVPEHKSRGIDYMHGGDCKPPNLENDRETGLSSYQSKSIKWEADPGGTIYCPPSELDGCGNHVLELKQIFETDRLIKLEMEALRLSNQIEPSDISSIDICECSCSANNVSSRKAATRENSTDNNIYCPISDNGGPDDLKHFQKHWVKGEPVIVQGVLSEMSDLRWEPEKMWAEVHDANTSSEMKSVKTTDCMSCCEVEISAKDFFNGYYHGRMYHNLWPEMLKLKDWPTSDHFENILPSHGKTYINSLPFQPYTNLKSGLLNVSALLPGDVLKLDMGPKSYIAYGYAEELIRGDSVTKLHCDLSDAVNVLMHTAKVVPSEEQKEGIRDLKIRHAEQDKKECLGNSSIDGNKTSMEHAHISSVSCEDGGGALWDIFRREDVGKLKEYLTKHSKEFRHMYCCPVEKIFNPVHDETFYLTNKHKRKLKEEYGIEPWTFVQRLGDAVFIPAGCPHQVRNLKSCTKIALDFVSPENIQQCLSLTEDFRRLPVGHRAKEDKLEVKKMIVYAVEHALAILKEPCTPRESA

SEQ ID NO: 190331 - protein, 876 aa, Zea Mays
MTAVELRIGPLEWAMDDESPGVGDEDGKDEDWALDMERKGRGKRKRSAPRRRSGPKRRRAAAAMAPAPARSQSEPCPGTAEPSPEHGFNAAAAAAGVKEENGVRKEEGENVAPSTSGRGGGGGRKPGARRSCHQCKRVKRLKEMVRCQCCDERIYCDLCIRNRYAMMSPDAVREQCPFCRGLCNCTRCLNKDRDKQLGPENLVLRKCNSNESSKREKRPTSAGVISPQAHSAAPCTKEIGLSFVTTNRMNNVSAMWAKVDTSDVRAEEVDPETKRKYASYLLHYLLPCLTQLNKDQMEEREAEAKIRGLQLSELIVEKAVSWNDERVFCNNCKTSIFDLHRSCSNCSYELCISCCKELRGNFLKINCQKGLVPEHKSRGIDYMHGGDCKPPNLENDRETGLSSYQSKSIKWEADPGGTIYCPPSELDGCGNHVLELKQIFETDRLIKLEMEALRLSNQIEPSDISSIDICECSCSANNVSSRKAATRENSTDNNIYCPISDNGGPDDLKHFQKHWVKGEPVIVQGVLSEMSDLRWEPEKMWAEVHDANTSSEMKSVKTTDCMSCCEVEISAKDFFNGYYHGRMYHNLWPEMLKLKDWPTSDHFENILPSHGKTYINSLPFQPYTNLKSGLLNVSALLPGDVLKLDMGPKSYIAYGYAEELIRGDSVTKLHCDLSDAVNVLMHTAKVVPSEEQKEGIRDLKIRHAEQDKKECLGNSSIDGNKTSMEHAHISSVSCEDGGGALWDIFRREDVGKLKEYLTKHSKEFRHMYCCPVEKIFNPVHDETFYLTNKHKRKLKEEYGIEPWTFVQRLGDAVFIPAGCPHQVRNLKSCTKIALDFVSPENIQQCLSLTEDFRRLPVGHRAKEDKLEVYLSNEGTI

SEQ ID NO: 190332 - protein, 963 aa, Zea Mays
MTAVELRIGPLEWAMDDESPGVGDEDGKDEDWALDMERKGRGKRKRSAPRRRSGPKRRRAAAAMAPAPARSQSEPCPGTAEPSPEHGFNAAAAAAGVKEENGVRKEEGENVAPSTSGRGGGGGRKPGARRSCHQCKRVKRLKEMVRCQCCDERIYCDLCIRNRYAMMSPDAVREQCPFCRGLCNCTRCLNKDRDKQLGPENLVLRKCNSNESSKREKRPTSAGVISPQAHSAAPCTKEIGLSFVTTNRMNNVSAMWAKVDTSDVRAEEVDPETKRKYASYLLHYLLPCLTQLNKDQMEEREAEAKIRGLQLSELIVEKAVSWNDERVFCNNCKTSIFDLHRSCSNCSYELCISCCKELRGNFLKINCQKGLVPEHKSRGIDYMHGGDCKPPNLENDRETGLSSYQSKSIKWEADPGGTIYCPPSELDGCGNHVLELKQIFETDRLIKLEMEALRLSNQIEPSDISSIDICECSCSANNVSSRKAATRENSTDNNIYCPISDNGGPDDLKHFQKHWVKGEPVIVQGVLSEMSDLRWEPEKMWAEVHDANTSSEMKSVKTTDCMSCCEVEISAKDFFNGYYHGRMYHNLWPEMLKLKDWPTSDHFENILPSHGKTYINSLPFQPYTNLKSGLLNVSALLPGDVLKLDMGPKSYIAYGYAEELIRGDSVTKLHCDLSDAVNVLMHTAKVVPSEEQKEGIRDLKIRHAEQDKKECLGNSSIDGNKTSMEHAHISSVSCEDGGGALWDIFRREDVGKLKEYLTKHSKEFRHMYCCPVEKIFNPVHDETFYLTNKHKRKLKEEYGIEPWTFVQRLGDAVFIPAGCPHQVRNLKSCTKIALDFVSPENIQQCLSLTEDFRRLPVGHRAKEDKLEDLRIGEVIGTGRRRRAAPRLYILDSLRLPSLATSPAHVLSATLSSVASFAQWHHRLGHLCGSRLSTLIKSGCLGHTSVESNFHCKGCHLGKQIQLP

SEQ ID NO: 190333 - protein, 886 aa, Zea Mays
MTAVELRIGPLEWAMDDESPGVGDEDGKDEDWALDMERKGRGKRKRSAPRRRSGPKRRRAAAAMAPAPARSQSEPCPGTAEPSPEHGFNAAAAAAGVKEENGVRKEEGENVAPSTSGRGGGGGRKPGARRSCHQCKRVKRLKEMVRCQCCDERIYCDLCIRNRYAMMSPDAVREQCPFCRGLCNCTRCLNKDRDKQLGPENLVLRKCNSNESSKREKRPTSAGVISPQAHSAAPCTKEIGLSFVTTNRMNNVSAMWAKVDTSDVRAEEVDPETKRKYASYLLHYLLPCLTQLNKDQMEEREAEAKIRGLQLSELIVEKAVSWNDERVFCNNCKTSIFDLHRSCSNCSYELCISCCKELRGNFLKINCQKGLVPEHKSRGIDYMHGGDCKPPNLENDRETGLSSYQSKSIKWEADPGGTIYCPPSELDGCGNHVLELKQIFETDRLIKLEMEALRLSNQIEPSDISSIDICECSCSANNVSSRKAATRENSTDNNIYCPISDNGGPDDLKHFQKHWVKGEPVIVQGVLSEMSDLRWEPEKMWAEVHDANTSSEMKSVKTTDCMSCCEVEISAKDFFNGYYHGRMYHNLWPEMLKLKDWPTSDHFENILPSHGKTYINSLPFQPYTNLKSGLLNVSALLPGDVLKLDMGPKSYIAYGYAEELIRGDSVTKLHCDLSDAVNVLMHTAKVVPSEEQKEGIRDLKIRHAEQDKKECLGNSSIDGNKTSMEHAHISSVSCEDGGGALWDIFRREDVGKLKEYLTKHSKEFRHMYCCPVEKIFNPVHDETFYLTNKHKRKLKEEYGIEPWTFVQRLGDAVFIPAGCPHQVRNLKSCTKIALDFVSPENIQQCLSLTEDFRRLPVGHRAKEDKLEGYHLRDRSTIEPPDRYGFP

SEQ ID NO: 190334 - protein, 881 aa, Zea Mays
MTAVELRIGPLEWAMDDESPGVGDEDGKDEDWALDMERKGRGKRKRSAPRRRSGPKRRRAAAAMAPAPARSQSEPCPGTAEPSPEHGFNAAAAAAGVKEENGVRKEEGENVAPSTSGRGGGGGRKPGARRSCHQCKRVKRLKEMVRCQCCDERIYCDLCIRNRYAMMSPDAVREQCPFCRGLCNCTRCLNKDRDKQLGPENLVLRKCNSNESSKREKRPTSAGVISPQAHSAAPCTKEIGLSFVTTNRMNNVSAMWAKVDTSDVRAEEVDPETKRKYASYLLHYLLPCLTQLNKDQMEEREAEAKIRGLQLSELIVEKAVSWNDERVFCNNCKTSIFDLHRSCSNCSYELCISCCKELRGNFLKINCQKGLVPEHKSRGIDYMHGGDCKPPNLENDRETGLSSYQSKSIKWEADPGGTIYCPPSELDGCGNHVLELKQIFETDRLIKLEMEALRLSNQIEPSDISSIDICECSCSANNVSSRKAATRENSTDNNIYCPISDNGGPDDLKHFQKHWVKGEPVIVQGVLSEMSDLRWEPEKMWAEVHDANTSSEMKSVKTTDCMSCCEVEISAKDFFNGYYHGRMYHNLWPEMLKLKDWPTSDHFENILPSHGKTYINSLPFQPYTNLKSGLLNVSALLPGDVLKLDMGPKSYIAYGYAEELIRGDSVTKLHCDLSDAVNVLMHTAKVVPSEEQKEGIRDLKIRHAEQDKKECLGNSSIDGNKTSMEHAHISSVSCEDGGGALWDIFRREDVGKLKEYLTKHSKEFRHMYCCPVEKIFNPVHDETFYLTNKHKRKLKEEYGIEPWTFVQRLGDAVFIPAGCPHQVRNLKSCTKIALDFVSPENIQQCLSLTEDFRRLPVGHRAKEDKLEINDGSQFADALPNH

SEQ ID NO: 190335 - protein, 270 aa, Zea Mays
MNARSCMLLLNKEAMGENRKITRGSRLVTNKLLHRCQQLHGHGSVSGVSETLGKRPLNGNKDTLVYSVFASTWNVGGVTPSDGLDLEDWLDTRANAYDIYVLGFQEIVPLNARNVLGPRKSRVSAKWNSLIGEALNRRCREEGGANTNSSAKDDEGSVEGSQGFRCIRSKQMVGIFTSVWARSSLRPLIRHLDASCIGSGIMGCLGNKGSVSIRFVLHDTSFCFVCCHLASGGKQGDVLLRNLDVADILARTRFPGPAAHELPEKILDHE

SEQ ID NO: 190336 - protein, 182 aa, Zea Mays
MWAPPAASPTGAFPSLRPSRTAVVRVLVTLPAAARPQDQPRRRLCLAVPRPAPEMASAAAEGEGEEEDVVVVEGDTGKKTAVEMDATVRRELAIRRLREEAEEEANEAGTRRRSSRRDFAVFETARGDALFTQSWTPAADDRLKGVVILLHGLNEHSGRYSHFAKLLNDQGLKVYAMDWIVV

SEQ ID NO: 190337 - protein, 271 aa, Zea Mays
MIKGLKFMPWTGLDMVEVMEFMDMFRHLIMLLVTWYCFVHTELCTDINFKLQFFFLAVFSQSIFEVPSCAERISGGCCIGGKPWFAVLLIWALHRWSYCFEGRAGSFCRTSCRRCGLNVASYSCSTISSNHQVVAPIFSMLAPKYRVSALHKRGPPVSRDPEALKMKYSDPLVYTGPIRVRTGNEILRISSFLQRNLSRVTVPFLVLHGTADTITDPRASERLYQTSMSTNKSIKLYDGYLHDLLFEPERDDIANDIINWLSARLSVLQRW

SEQ ID NO: 190338 - protein, 164 aa, Zea Mays
MCPFAGVLLRADPPAHPFMYRTVKSTDKPAASSGANDGGSGDEDFAGGGQAGSGGENMCARPFGEHRSTSEGAASSVGGGGGGDMDQSSAGNGSTRWSNSSRDPWLSSNSCNMDAHRLAALSSPIENGEPCRSSSSQVSNQELMSSPSLEFTLGRPDWQGTDHD

SEQ ID NO: 190339 - protein, 146 aa, Zea Mays
MYRTVKSTDKPAASSGANDGGSGDEDFAGGGQAGSGGENMCARPFGEHRSTSEGAASSVGGGGGGDMDQSSAGNGSTRWSNSSRDPWLSSNSCNMDAHRLAALSSPIENGEPCRSSSSQVSNQELMSSPSLEFTLGRPDWQGTDHD

SEQ ID NO: 190340 - protein, 404 aa, Zea Mays
MKGAPVLTIFSPTPGQLKVLSQGFLHQQEQEHLGDDGATLAGSPGPASRSRSQKSRGKVMKNCNYAKGKWIEDDKRPLYSGNECKQWLSKMWACRMMRRTHFSYENYRWQPHDCEMPEFTGPKFLKRMRNRTLAFVGDSLGRQQFQSMMCIATGGKYSPEVEDVGWKYGLVKAPGALRPDGWAYRFSSTNTTILFYWSATLSELEPLNTEHTVTRYALHLDRPVTFLKEYLNDFDVLVLNTGHHWNRGKFNGNHWELHADGKPVGNGSRLADLNRAKNLTLYSIARWMDSELTRHPKMKVFLRTISPRHFVNGDWNTGGTCGNTVPFTNGSEVLQDHSIDIPAENAVKGTRVKLLDITAISKLRDEGHISNSSFKKASTGINDCLHWCLPGIPDMWNELLFVQI

SEQ ID NO: 190341 - protein, 397 aa, Zea Mays
MKGAPVLTIFSPTPGQLKVLSQGFLHQQEQEHLGDDGATLAGSPGPASRSRSQKNCNYAKGKWIEDDKRPLYSGNECKQWLSKMWACRMMRRTHFSYENYRWQPHDCEMPEFTGPKFLKRMRNRTLAFVGDSLGRQQFQSMMCIATGGKYSPEVEDVGWKYGLVKAPGALRPDGWAYRFSSTNTTILFYWSATLSELEPLNTEHTVTRYALHLDRPVTFLKEYLNDFDVLVLNTGHHWNRGKFNGNHWELHADGKPVGNGSRLADLNRAKNLTLYSIARWMDSELTRHPKMKVFLRTISPRHFVNGDWNTGGTCGNTVPFTNGSEVLQDHSIDIPAENAVKGTRVKLLDITAISKLRDEGHISNSSFKKASTGINDCLHWCLPGIPDMWNELLFVQI

SEQ ID NO: 190342 - protein, 338 aa, Zea Mays
MESITNFRVPKDDDVTIKVLYCGICHTDLHVIKNDWRNAMYPVVPGHEIVGVVTGVGGGVTRFKAGDTVGVGYFVGSCRSCDSCGKGDDNYCAGIVLTSNGVDHAHGGAPTRGGFSDVLVASEHYVVRVPDGLALDRTAPLLCAGVTVYSPMMRHGLNEPGKHLGVVGLGGLGHVAVKFGKAFGMKVTVISTSASKRQEAIENLGADEFLISRDEDQMKAATGTMDGIIDTVSAWHPITPLLALLKPLGQMVVVGAPSKPLELPAYAIVPGGKGVAGNNVGSVRDCQAMLEFAGKHGIGAEVEVIKMDYVNTAMERLEKNDVRYRFVIDVAGSLGSAA

SEQ ID NO: 190343 - protein, 574 aa, Zea Mays
MRWAPGRAAYVLLAAALWCASLTPRAAPDLAADRAALLAFRDAVGQRLPWDAAAASPCGWRGVRCDPAASRVTALQLPGASLVGAVPLGTIGNLTALRTLSLRLNALSGGIPADIGSCTELRHLYLQGNQLDGQVPEGFFDLGLLQRLDLSNNRIAGGVSPGFNRLQRLATLYLENNSLNGTLPSNLDLPKLQLFNVSRNNLTGPVPKSLARMPASAFDGTGLCEDNGRKIRGDGSRRRPGRVSRVGHRGEHGHEERDEAVLAGHGRQQRQEAGVLGSGAGRAVRSGVPSARVGRGDREGLAGHDVPRHAGGRRHHRGREAAQGGAHPGAGVPGQGDRAGRAPAREPGAGPRVLLQPGGEADRVRLRGRRQPLLPPPRREPRAAGLRGAGAHRAGGRARRRVHPRRRPPLVPRQHQVVQRPRRRRARRRLRDRPRHPPARRRARAPEARHRVPRPRGHRPAQGVAGDGHVQLRRAAPRGADGEAAGELGPREHRRRGAAAVGAHGGAGGVDGRGVRRQHRGRGARGGGDGAAAAARRGMHRRPAGPAASDGRGGGEDRGHRPERGAEGEGRHGG

SEQ ID NO: 190344 - protein, 366 aa, Zea Mays
MAYFGGAGAAAAAPAMDWSFASKPGAAPALMSFRSASFPQFSSFDGAKNPAPRILTHQRSFGPDSTHYAAAHRTQHALNGARVTPVSSPFNQNSPMFRVQSSPSLPNGTAFKQPPFAINNNAAASSTVGFYGTRDVVRPKTAQLTIFYAGSVNVFDNVSAEKAQELMLLASRGSLPSSAPVARKPEAPILAPAKVTAPEVLHATQMLFQKPQHVSPPSSAISKPIPGILQAASLPRSASSSNLDSPFPKSSVPFPVSPVSQAPRAQPATIAATTAAAIMPRAVPQARKASLARFLEKRKERVTTAAPYPSAKSPMESSDTFGSGSANDKSSCTDIALSSNHEESLCLGQPRNISFIQESPSTKLQI

SEQ ID NO: 190345 - protein, 242 aa, Zea Mays
MAGKDGSVPSPPPPRLPSYPEMIVEAIRALGLENGCNKTAISDYIKGSYGSNLPAQHNAVLTGHLARMKATAPVVTADVDDIDVLAPAPVVSADVNPVHTKRGRGRPPKPKDPVAEGYGGKPATAPVAAAAVPVKRGRGRPPKPKNPVAEDSAPTASSVVTTDGNAVPVKRGRGRPPKLKDPINVATDQATSGMLSPRGRGRPPKKAKVAVEDPRGEPAAARDVVVDASAVHVKRGRGRPPR

SEQ ID NO: 190346 - protein, 1617 aa, Zea Mays
MGLLEFAVGKARSLAAATDLEQRHVHKGELARIETRRCQEAGHGVTTPKAQGPASPVGPPTPPRRLTEARSGGQADAGPRSHPPGCDTRRVDEEAADESGAQFAASVTDFLHDFSDTESSVSNSMYRSMTPSPTGSPTCVVRLDDASDHDATTLTDSDDARELVSAASISGEGELVNGSPHIVDFGDAIWCPPPPEDERDDVESRIFGSDDDDDDAFLEPSCFGDNKIASGYGAFGASQQDGVQNDLLKHFRALVAQLLEAEGISFSSDDNSKSWLEIVSSLAWQAANYVKPDTKKGGSMDPSDYVKIKCIASGKPTDSNFVRGIVCSKNVRHKRMVSEHRSAKLLILGGALEYQKVSNKLASIGTILEQEKEYLKTVVSKIESRHPNVLLVEKSASSFAQELLAKDISLVLNVKRPLLNRISRCTGGQIASSIDNIASARLGQCDLFKVEKVPEPLLAEHGEKGSIKTLMFFEGCVKHLGCTVLLRGTCREDLKKIKRAMQLAVFAAYHLSLETSFLADEGATLPKVPSISVTGAPNISASPTDHGTSDSLKNAEETYPQNSTISQIFEVISASSTLLPLAGVSQGIMPECRASKFLVDPLNSQDPSNLCHPNVSCNGDLISPCSVSGFRATYVGTQHGGSNKSLQSSIAADVWRDGALTLKHSQPCHSENHSSNPAAGNTDDKDKLSAGYLSGTDNNQSILVSLSSTCIPKSFACQRSHLVRIKFYGSFDKPLGRYLREDLFDQAYCCPSCKEPSESHVRCYMHQHGSLTISVRRLQSQKLPGEHDGRIWMWHRCMRCKLKDGMPPATHRVIMSDAAWGLSFGKFLELSFSNHMTANRIASCGHSLQRDCLRFYGYGNMAAAFHYSPMITLSVNLPPPVLDFNTHATQDWVKREAVEVFHTMDLLHTEVYDALNNLEKSIITDDDSTKTSIQRQIVEMKDLLNVERNEYEVLLLPVIMGSSHSFKPNIDILELNRVRRSLLLDAHTWDRRLCGIDSLEADSHISRTDPFNLEKTQGINEGRSDLLQTVRKHGGTYEEPCPQHSSESPRKSLLSTEGHLNDKKYVMVETDLPVGLVDGDAGLDLIFNKLNTCEEGRCLSKYPSKTGPVERLPSLASILADKIDMAWSGFGELDYNLPHGLSKANENTSLNLFGNPSYKKATGPVRIHSFDTVLRLHQREQTGVIPASLHSALKSIDSFRDLTSLVKDPMTNMRRAFSQISPRTRGNLNTVLTRAPKYITSASRMVNDGARLLLPNISCEGSVFVTVYDDEPTSVVSYAMTSQEYAEHVTHKMNANTSFSDFTSSNGLDGSLSSHEELSNFRGAHFRLSFDDDASPTDSTKFSVTCYFARQFAALRKKCCPSNSDYIRSISRCKRWSAQGGKSNVYFAKTMDERFIIKQVTKTELDSFVEFAPHYFRHLTESLTSRSPTCLAKILGLYQVSIKNSKGGREVKMDLMVMENILFQRSISRVYDLKGSVRSRYNSDASGHNKVLLDSNLIEALHTKPIFLGSKAKQRLERAVWNDTSFLASLDVMDYSLLVGVDEEKKELVVGIIDFLRQYTWDKQLETWVKASGILGGPKNESPTVISPIQYKKRFRKAMSRYFLAVPDQWTSKGDMQ

SEQ ID NO: 190347 - protein, 1635 aa, Zea Mays
MGLLEFAVGKARSLAAATDLEQRHVHKGELARIETRRCQEAGHGVTTPKAQGPASPVGPPTPPRRLTEARSGGQADAGPRSHPPGCDTRRVDEEAADESGAQFAASVTDFLHDFSDTESSVSNSMYRSMTPSPTGSPTCVVRLDDASDHDATTLTDSDDARELVSAASISGEGELVNGSPHIVDFGDAIWCPPPPEDERDDVESRIFGSDDDDDDAFLEPSCFGDNKIASGYGAFGASQQDGVQNDLLKHFRALVAQLLEAEGISFSSDDNSKSWLEIVSSLAWQAANYVKPDTKKGGSMDPSDYVKIKCIASGKPTDSNFVRGIVCSKNVRHKRMVSEHRSAKLLILGGALEYQKVSNKLASIGTILEQEKEYLKTVVSKIESRHPNVLLVEKSASSFAQELLAKDISLVLNVKRPLLNRISRCTGGQIASSIDNIASARLGQCDLFKVEKVPEPLLAEHGEKGSIKTLMFFEGCVKHLGCTVLLRGTCREDLKKIKRAMQLAVFAAYHLSLETSFLADEGATLPKVPSISVTGAPNISASPTDHGTSDSLKNAEETYPQNSTISQIFEVISASSTLLPLAGVSQGIMPECRASKFLVDPLNSQDPSNLCHPNVSCNGDLISPCSVSGFRATYVGTQHGGSNKSLQSSIAADVWRDGALTLKHSQPCHSENHSSNPAAGNTDDKDKLSAGYLSGTDNNQSILVSLSSTCIPKSFACQRSHLVRIKFYGSFDKPLGRYLREDLFDQAYCCPSCKEPSESHVRCYMHQHGSLTISVRRLQSQKLPGEHDGRIWMWHRCMRCKLKDGMPPATHRVIMSDAAWGLSFGKFLELSFSNHMTANRIASCGHSLQRDCLRFYGYGNMAAAFHYSPMITLSVNLPPPVLDFNTHATQDWVKREAVEVFHTMDLLHTEVYDALNNLEKSIITDDDSTKTSIQRQIVEMKDLLNVERNEYEVLLLPVIMGSSHSFKPNIDILELNRVRRSLLLDAHTWDRRLCGIDSLEADSHISRTDPFNLEKTQGINEGRSDLLQTVRKHGGTYEEPCPQHSSESPRKSLLSTEGHLNDKKYVMVETDLPVGLVDGDAGLDLIFNKLNTCEEGRCLSKYPSKTGPVERLPSLASILADKIDMAWSGFGELDYNLPHGLSKANENTSLNLFGNPSYKKATGPVRIHSFDTVLRLHQREQTGVIPASLHSALKSIDSFRDLTSLVKDPMTNMRRAFSQISPRTRGNLNTVLTRAPKYITSASRMVNDGARLLLPNISCEGSVFVTVYDDEPTSVVSYAMTSQEYAEHVTHKMNANTSFSDFTSSNGLDGSLSSHEELSNFRGAHFRLSFDDDASPTDSTKFSVTCYFARQFAALRKKCCPSNSDYIRSISRCKRWSAQGGKSNVYFAKTMDERFIIKQVTKTELDSFVEFAPHYFRHLTESLTSRSPTCLAKILGLYQVSIKNSKGGREVKMDLMVMENILFQRSISRVYDLKGSVRSRYNSDASGHNKVLLDSNLIEALHTKPIFLGSKAKQRLERAVWNDTSFLASLDVMDYSLLVGVDEEKKELVVGIIDFLRQYTWDKQLETWVKASGILGGPKNESPTVISPIQYKKRFRKAMSSESITRSSLANFERKGDRRLGILYLPVASVFYTNR

SEQ ID NO: 190348 - protein, 1622 aa, Zea Mays
MGLLEFAVGKARSLAAATDLEQRHVHKGELARIETRRCQEAGHGVTTPKAQGPASPVGPPTPPRRLTEARSGGQADAGPRSHPPGCDTRRVDEEAADESGAQFAASVTDFLHDFSDTESSVSNSMYRSMTPSPTGSPTCVVRLDDASDHDATTLTDSDDARELVSAASISGEGELVNGSPHIVDFGDAIWCPPPPEDERDDVESRIFGSDDDDDDAFLEPSCFGDNKIASGYGAFGASQQDGVQNDLLKHFRALVAQLLEAEGISFSSDDNSKSWLEIVSSLAWQAANYVKPDTKKGGSMDPSDYVKIKCIASGKPTDSNFVRGIVCSKNVRHKRMVSEHRSAKLLILGGALEYQKVSNKLASIGTILEQEKEYLKTVVSKIESRHPNVLLVEKSASSFAQELLAKDISLVLNVKRPLLNRISRCTGGQIASSIDNIASARLGQCDLFKVEKVPEPLLAEHGEKGSIKTLMFFEGCVKHLGCTVLLRGTCREDLKKIKRAMQLAVFAAYHLSLETSFLADEGATLPKVPSISVTGAPNISASPTDHGTSDSLKNAEETYPQNSTISQIFEVISASSTLLPLAGVSQGIMPECRASKFLVDPLNSQDPSNLCHPNVSCNGDLISPCSVSGFRATYVGTQHGGSNKSLQSSIAADVWRDGALTLKHSQPCHSENHSSNPAAGNTDDKDKLSAGYLSGTDNNQSILVSLSSTCIPKSFACQRSHLVRIKFYGSFDKPLGRYLREDLFDQAYCCPSCKEPSESHVRCYMHQHGSLTISVRRLQSQKLPGEHDGRIWMWHRCMRCKLKDGMPPATHRVIMSDAAWGLSFGKFLELSFSNHMTANRIASCGHSLQRDCLRFYGYGNMAAAFHYSPMITLSVNLPPPVLDFNTHATQDWVKREAVEVFHTMDLLHTEVYDALNNLEKSIITDDDSTKTSIQRQIVEMKDLLNVERNEYEVLLLPVIMGSSHSFKPNIDILELNRVRRSLLLDAHTWDRRLCGIDSLEADSHISRTDPFNLEKTQGINEGRSDLLQTVRKHGGTYEEPCPQHSSESPRKSLLSTEGHLNDKKYVMVETDLPVGLVDGDAGLDLIFNKLNTCEEGRCLSKYPSKTGPVERLPSLASILADKIDMAWSGFGELDYNLPHGLSKANENTSLNLFGNPSYKKATGPVRIHSFDTVLRLHQREQTGVIPASLHSALKSIDSFRDLTSLVKDPMTNMRRAFSQISPRTRGNLNTVLTRAPKYITSASRMVNDGARLLLPNISCEGSVFVTVYDDEPTSVVSYAMTSQEYAEHVTHKMNANTSFSDFTSSNGLDGSLSSHEELSNFRGAHFRLSFDDDASPTDSTKFSVTCYFARQFAALRKKCCPSNSDYIRSISRCKRWSAQGGKSNVYFAKTMDERFIIKQVTKTELDSFVEFAPHYFRHLTESLTSRSPTCLAKILGLYQVSIKNSKGGREVKMDLMVMENILFQRSISRVYDLKGSVRSRYNSDASGHNKVLLDSNLIEALHTKPIFLGSKAKQRLERAVWNDTSFLASLDVMDYSLLVGVDEEKKELVVGIIDFLRQYTWDKQLETWVKASGILGGPKNESPTVISPIQYKKRFRKAMSSVRSHLERLIQCKFDGEPRRVI

SEQ ID NO: 190349 - protein, 82 aa, Zea Mays
MDPRACWHVGFQVLCDSGGHAGQALRWWCPYQRPHYLPQSCRRSSVSHLYHIRHHVCCLAGLSQTCMILVHLSAVKQILQYL

SEQ ID NO: 190350 - protein, 442 aa, Zea Mays
MLCYWHNHKNDCSGTYEKTMKLEAPSQKKVAGGAQLLLTLPSEMSNIQESSSSILQLEWSTKSTEPNAEDKHLCLGSGSNGKPQGSSSSKKAGKRNSPEMVGETSVLPAAAQGKPNQNHGLVAMAKQAPASVEGYSDAESPGRHTSKKAGKRHKPDDLQKSSVLPSVPQGTTKPKHALVATENNPLSSAERRNDAKSPKTNTSKKPGDWHELQIAQKACSQPADPHKKLKQDLGAPEKKEVFSLMGPSNEKLLGRSSSKKASRQHDREDIQEKNTILPTAPGIRPKASAFAAPEKRRKGKCKRKPVEEKEYAVMSAWLNYYESDRSSGSPEPLVNKRTERRRRERARILTYSRSKKNKTEPLASSGTHASVSSHKIEMAPQDHAVVTTGNQVAVAPATVHQAQPSADSAPCLDLVPFLQPADPLTSPDQSTARDMIVISDDD

SEQ ID NO: 190351 - protein, 287 aa, Zea Mays
MASLIPPCLSVPTAPGRARLAAPGAPRRRRMAVVRAKIREIFMPALSSTMMEGKIVSWTAAEGDRVGKGDPVVVVESDKADMVESLRVPTFRVSYSMITDKLDALYEKVKSKGVTKTVLLVKAAAVALTQHPVVNASCRDGKSFSYNNDVNIGVAVALEGGLLTPVLEDADKMDIYLLARKWRVLLKKARMKQLQPNEYNSGTFTLSNLGMFGVDKFDAILPAGQGAIMAVGASRPTVVADKDGFFSIKSEMLVNVTADHRIIYGADLAAFLQTFAKIVEDPECLTL

SEQ ID NO: 190352 - protein, 211 aa, Zea Mays
MRLEGTPSNARFIPIRAIFLPIILLQVAAVSFAVWRLFSRLLTKLKDGTISQAHISVSSKVDELFMMIQCGSRLLHWWSIDEDSKEEQAHLCYANNIGYSTFCSYPPEVVKEMPKEVLVKEVQRLQLALEEQTEMANHSQQQCDRLRNERILCRICFERDICIVMLPCRHHVLCEPCSNKCQSCPICRLTVEGRLFVYDAVMSSNPSCYAV

SEQ ID NO: 190353 - protein, 261 aa, Zea Mays
MARGVTGDAAGSSAADERGRGEAAPPQSATWQRVRRAGQGVAAHALLLCFTALLALKLDGVLSLSWWALFIPVWLFHAVAARCLFSLPAPSPESCQRVPFHSIVATPLLVAFELLLCVYLEGLNHNGHVEPFIIDLKLVFLPLLALEIITLVDNFRMCGALMPGHGETITEEAIWERLPYFWVAISMVFLLAATSLMLLKLCGDAVTLGWWDLFINFGISQCFAFLVCIRWSNPMVIGGPVLIIPIVVFQVLLCMRLEASY

SEQ ID NO: 190354 - protein, 463 aa, Zea Mays
MARGVTGDAAGSSAADERGRGEAAPPQSATWQRVRRAGQGVAAHALLLCFTALLALKLDGVLSLSWWALFIPVWLFHAVAARCLFSLPAPSPESCQRVPFHSIVATPLLVAFELLLCVYLEGLNHNGHVEPFIIDLKLVFLPLLALEIITLVDNFRMCGALMPGHGETITEEAIWERLPYFWVAISMVFLLAATSLMLLKLCGDAVTLGWWDLFINFGISQCFAFLVCIRWSNPMVIGGPVLIIPIVVFQVLLCMRLEGTPSNARFIPIRAIFLPIILLQVAAVSFAVWRLFSRLLTKLKDGTISQAHISVSSKVDELFMMIQCGSRLLHWWSIDEDSKEEQAHLCYANNIGYSTFCSYPPEVVKEMPKEVLVKERLQLALEEQTEMANHSQQQCDRLRNERILCRICFERDICIVMLPCRHHVLCEPCSNKCQSCPICRLTVEGRLFVYDAVMSSNPSCYAV

SEQ ID NO: 190355 - protein, 370 aa, Zea Mays
MAKARKQKGDGSGTGGGATVLHQKLCLSIDMENQLIYGYTEIKALLAENDTFALHADNMTIRSILVDGETVEFDYSPHWKNETDQPNWSSISCLNTVADAACSTYTSSLNREATPNLIVSSERSIKSMIEQQLDENSEKYEENSGRLEKHGGKTIQTSYDQIVNGCNGSAVEEGIENSAVEEGKKKEKEKEKEEKNGNEKSKENGNETENEKVKNIKLVHIDYILEKAETGIHFVGNVMHSSNQIRRAHCWFPCVDTATQRCPFDLEFTVSTDFIAVSNGDLLYQVLSKEDPSKKTYVYKLNTPVSAQWISLVVGPLEILLDRNDINVSHICLSPALSKLQNTIAFFHDAYRLSCCTVSLRFIQADFSSI

SEQ ID NO: 190356 - protein, 176 aa, Zea Mays
MDTAASCRLLSPASSSPPPCPNAKFRLLCLLHDKSASPTTSVQMQSSQSQLQRLATVLQCGAVWAAVEAPAALAVTGEEDIDLLGILPPLAVFAFFYFLVAPPVIMNWMRLRWYKREFVETYLQFMFTYLFYPAMMFWAPFVNFRKFPRDPTMKYPWSKPKEGTPLFKDRYPPIDS

SEQ ID NO: 190357 - protein, 126 aa, Zea Mays
MDTAASCRLLSPASSSPPPCPKQLPKRRPTFAASQQQSPSSSAKFRLLCLLHDKSASPTTSVQMQSSQSQLQRLATVLQCGAVWAAVEAPAALAVTGEEDIDLLGILPPLAVFAFFYFLVAPCACV

SEQ ID NO: 190358 - protein, 416 aa, Zea Mays
MATLYQHHLLPLQRLPNSPRRPPPRLRLPTKPSRHHNRQLRPRAAASTTATVSAMEDFRRWLASHGAGDGGKAIPAAVPEGLGLVAARDLPRGEVVAEVPKKLWMDADAVAASDIGRACGGGGGLRPWVAVALLLLSEVARGADSPWAPYLAILPRQTDSTIFWSEEELLEIQGTQLLSTTVGVKEYVQSEFDSVQAEIISTNKDLFPGSITFDDFLWAFGMLRSRVFPELRGDKLALIPFADLVNHSPNITSEGSSWEIKGKGLFGRELMFSLRTPVNVKSGQQIYIQYDLDKSNAELALDYGFVESNPSRDSFTVTLEISESDPFYGDKLDIAEANGLGETAYFDDEELSGRENLQPRLAIAIGVRAGEKKVLQHIDGIFKQREEELDGLEYYQERRLKDLGLVSDNGEIIFWE

SEQ ID NO: 190359 - protein, 125 aa, Zea Mays
MGKDSKPKDAKGKGKQAAGSSGGDDGGGKGGKGKGKGKGGKSADGLGTCTYVKARHVLCEKQGKINEAYKKLQDGWLNNGDKVPPAEFAKRMDAVYGQLLVKDGCFSWHMNNASMCIDYREKGFV

SEQ ID NO: 190360 - protein, 128 aa, Zea Mays
MEDKRSLASEDELANVEGKASVLAALDYYISMHSDIFISASPGNMHNALVAHRSYENLKTIRPNMALLGRTFANKSMEWPEFQQVVQAGHKGRYGQIRLRKATQSIYTYPAPDLPNYVLGAKLTLFEV

SEQ ID NO: 190361 - protein, 457 aa, Zea Mays
MDSYGQKKDLWSPLPYQGWKPCLTPSVSHKLPLEPSGYIQVFLDGGLNQQRMGICDAIAVAKILNATLVIPHLEVNPVWKDSSSFEEIFDVDHFINSLKDEVSIIKVLPKEFSWSTREYYGTGIRATRIKTAPLHASANWYLENVSPILQSYGIVAIAPFSHRLAFDDLPVDLQRLRCKVNFQALVFRSHIISLGETLVKRLRSPVRVHSSKSIHQVVGDTNQAEKYAVLHLRFDKDMAAHSACDFGGGRAEQLALAKYRQVIWQGRVLNSQLTDEELRNTGRCPLTPEEIGLLLVALGFDNRTRLYLASHKVYGGEARISSLRKLFPLMEDKRSLASEDELANVEGKASVLAALDYYISMHSDIFISASPGNMHNALVAHRSYENLKTIRPNMALLGRTFANKSMEWPEFQQVVQAGHKGRYGQIRLRKATQSIYTYPAPDLPNYVLGAKLTLFEV

SEQ ID NO: 190362 - protein, 476 aa, Zea Mays
MAGWRRCWCLEWNAPKPMHPSLLNEALRWTATDGQKKDLWSPLPYQGWKPCLTPSVSHKLPLEPSGYIQVFLDGGLNQQRMGICDAIAVAKILNATLVIPHLEVNPVWKDSSSFEEIFDVDHFINSLKDEVSIIKVLPKEFSWSTREYYGTGIRATRIKTAPLHASANWYLENVSPILQSYGIVAIAPFSHRLAFDDLPVDLQRLRCKVNFQALVFRSHIISLGETLVKRLRSPVRVHSSKSIHQVVGDTNQAEKYAVLHLRFDKDMAAHSACDFGGGRAEQLALAKYRQVIWQGRVLNSQLTDEELRNTGRCPLTPEEIGLLLVALGFDNRTRLYLASHKVYGGEARISSLRKLFPLMEDKRSLASEDELANVEGKASVLAALDYYISMHSDIFISASPGNMHNALVAHRSYENLKTIRPNMALLGRTFANKSMEWPEFQQVVQAGHKGRYGQIRLRKATQSIYTYPAPDCMCQG

SEQ ID NO: 190363 - protein, 220 aa, Zea Mays
MAAHSACDFGGGRAEQLALAKYRQVIWQGRVLNSQLTDEELRNTGRCPLTPEEIGLLLVALGFDNRTRLYLASHKVYGGEARISSLRKLFPLMEDKRSLASEDELANVEGKASVLAALDYYISMHSDIFISASPGNMHNALVAHRSYENLKTIRPNMALLGRTFANKSMEWPEFQQVVQAGHKGRYGQIRLRKATQSIYTYPAPDLPNYVLGAKLTLFEV

SEQ ID NO: 190364 - protein, 521 aa, Zea Mays
MRRASPSLSPARGPAVFAAAVVVFLPVLFPGLFSPLGHAFPSVFSEWNAPKPMHPSLLNEALRWTATDGQKKDLWSPLPYQGWKPCLTPSVSHKLPLEPSGYIQVFLDGGLNQQRMGICDAIAVAKILNATLVIPHLEVNPVWKDSSSFEEIFDVDHFINSLKDEVSIIKVLPKEFSWSTREYYGTGIRATRIKTAPLHASANWYLENVSPILQSYGIVAIAPFSHRLAFDDLPVDLQRLRCKVNFQALVFRSHIISLGETLVKRLRSPVRVHSSKSIHQVVGDTNQAEKYAVLHLRFDKDMAAHSACDFGGGRAEQLALAKYRQVIWQGRVLNSQLTDEELRNTGRCPLTPEEIGLLLVALGFDNRTRLYLASHKVYGGEARISSLRKLFPLMEDKRSLASEDELANVEGKASVLAALDYYISMHSDIFISASPGNMHNALVAHRSYENLKTIRPNMALLGRTFANKSMEWPEFQQVVQAGHKGRYGQIRLRKATQSIYTYPAPDLPNYVLGAKLTLFEV

SEQ ID NO: 190365 - protein, 331 aa, Zea Mays
MAGWRRCWCLEWNAPKPMHPSLLNEALRWTATDGQKKDLWSPLPYQGWKPCLTPSVSHKLPLEPSGYIQVFLDGGLNQQRMGICDAIAVAKILNATLVIPHLEVNPVWKDSSSFEEIFDVDHFINSLKDEVSIIKVLPKEFSWSTREYYGTGIRATRIKTAPLHASANWYLENVSPILQSYGIVAIAPFSHRLAFDDLPVDLQRLRCKVNFQALVFRSHIISLGETLVKRLRSPVRVHSSKSIHQVVGDTNQAEKYAVLHLRFDKDMAAHSACDFGGGRAEQLALAKYRQVIWQGRVLNSQLTDEELRNTGRCPLTPEEIGLLLGKSGSFK

SEQ ID NO: 190366 - protein, 318 aa, Zea Mays
MKTAVIVVDDILTYVLLQTDGQKKDLWSPLPYQGWKPCLTPSVSHKLPLEPSGYIQVFLDGGLNQQRMGICDAIAVAKILNATLVIPHLEVNPVWKDSSSFEEIFDVDHFINSLKDEVSIIKVLPKEFSWSTREYYGTGIRATRIKTAPLHASANWYLENVSPILQSYGIVAIAPFSHRLAFDDLPVDLQRLRCKVNFQALVFRSHIISLGETLVKRLRSPVRVHSSKSIHQVVGDTNQAEKYAVLHLRFDKDMAAHSACDFGGGRAEQLALAKYRQVIWQGRVLNSQLTDEELRNTGRCPLTPEEIGLLLGKSGSFK

SEQ ID NO: 190367 - protein, 64 aa, Zea Mays
MQGGSRVDFAAMAVRRGILASALPINCSGFSEASGTLQRPRSVALPRFLGRGVWESRSLARWVT

SEQ ID NO: 190368 - protein, 267 aa, Zea Mays
MATSASTSGEWLKGALQELRERKGSSLEFDSDLISGLVSFCELAPPSDATSYLENFIGKEAAQDIIQEYLRRRGHIGSSNGTESFQSSNLQPYVKPSADAATTQTKKQTRTQKDSASSSSQSSKSQSEIAESQVPSKRGSKKKGAKVISLAEAAKGSIVFKQGKPCSCQARQHDLVSNCLSCGKIVCEQEGEGPCSFCGALVLKEGSTYAGLSDVGLPLSEAETAAEAYAKRLVDYDRNAAARTKVYDDQSDYYEMEGNSWLSSKNM

SEQ ID NO: 190369 - protein, 117 aa, Zea Mays
MVQRLTYRKRHSYATKSNQTRVVKTPGGKLVYQYTKKRASGPKCPVTGKKIQGIPHLRPAEYKRSRLSRNRRTVNRPYGGVLSGTAVRERAEDCQEGVEITEDQRQDFLKKVTLKQK

SEQ ID NO: 190370 - protein, 57 aa, Zea Mays
MGKLCFGRTNSRKATTQWEWRDGESSMYPLWQDAGRWCICALGWHEPILVLRNPVAS

SEQ ID NO: 190371 - protein, 94 aa, Zea Mays
MAPPTAATRQVVATASVMRPLYCAARSVFTPSAATPPPAIAAGCFLAPIPALSLSLSLSLLLQDELGQQKIRAINRTTRKQCSNRRPPVRRPQV

SEQ ID NO: 190372 - protein, 89 aa, Zea Mays
MFCARVDRPAHRRGPSARSNWCSTMGMFLGSVHMIGLLRSTINCIAGMALLFPTNIIKYDCVPSQRTDIIAVYITSISLYKKNVKTEKV

SEQ ID NO: 190373 - protein, 105 aa, Zea Mays
MIILYIPYDMLQLFSLFVYVSFKSLEFVGATYIGDICCGLERSRIRRPMSDDLVVPVHFEVGQELCFCFLDQLLLALLEQELFFSRQGLPCRCDDIAGGNLRAIF

SEQ ID NO: 190374 - protein, 149 aa, Zea Mays
MSSVHSNDLHGKWACAKCTAIAAQQPMHVARSVGDRESGFSRPTHAASSMHRNVGKAASAAAGWSRFTHPNPSTNLATKSRIEAPQAIVVVDLLVAGGLTLSSYSDSPTSSKVRTHVHLIFWLTNSTGIFTGLFIEFVSRSWDLMETNA

SEQ ID NO: 190375 - protein, 55 aa, Zea Mays
MYVALRLKQLLLVGHVFTTSSRLSSSNKLSYYPKVLPPRGNARSHSYNHHELPSS

SEQ ID NO: 190376 - protein, 116 aa, Zea Mays
MHWALFIFFNHENGRNGIIDLFFQDRYLNAIQTNAHHLIRYLATAVVVNKRRRNMLEELIKVIQQEHHSYKDPVTEFLECLYVNYDFDGAQQKLIECEQPERQHILFLCAKHPSVK

SEQ ID NO: 190377 - protein, 51 aa, Zea Mays
MCTNLSSPSSPHFPLRRPPGRIELTPLRPPCSLLSSSPSPSALHRAALLVV

SEQ ID NO: 190378 - protein, 356 aa, Zea Mays
MQPTTREMHAMVAASQISLDDLRAAAGAAGGVHDDFLDQMFGGLPPSAWPELASVAGGKAPDGGAQAEGMEHQPQHFGRGEIAGSVFGGSFVGSLQQQQHFQSHHPQQQTAPPLPGQGFGGGGRGGGRAGAPGGMSQPQAGAAVGGAAAPPRQRVRARRGQATDPHSIAERLRRERIAERMKALQELVSNANKTDKASMLDEIIDYVKFLQLQVKVLSMSRLGGAARSRQGRDGAAAAAGSDGLAVTEQQVAKLMEEDMGTAMQYLQGKGLCLMPVSLAAAISSATCHMRPPVGGPGVAAGHHMAAMRLPHVTNGGAGADDVSASPSMSMLTTPSAMPNGAGAGVDGKDAASVSKP

SEQ ID NO: 190379 - protein, 325 aa, Zea Mays
MPPGRKGIRSTREPPPEITSTEYEKQRAANVMRNNQMFQRLGINQLRTMMTATRVKSKYDGPEESGSLFDGEDSEGSEPEEDSHVAQGVRSHNPTHVADKPTQQTRGSKRVVAPDVHGQQIRFTRQRSAAINQQSSLSLTTTTQAGSRATTNQESTQNLAAATQFTSSVATEQDHTVGLTTAAQPSSPTQAEVNDHNRDEELVLRQRSRGKQLESLSRGLGTKIPIQISNGKRRSEPPIQAAKFASEGGIILRQHLPIFPHWKEYKKQENEGKITDYIGKLAGQFTMDVESNAVKDACVDMLKGGQRQMRYRLEKSTSLEFLQIK

SEQ ID NO: 190380 - protein, 74 aa, Zea Mays
MRSLGAARFPTASAPDLGTGRTRRPRDFHLSHARLRPPRLSPLRARPRARPIWAGARSTLTRRLRDPPVSKRRQ

SEQ ID NO: 190381 - protein, 210 aa, Zea Mays
MVAPDVKAETMKLMDQRGALEAEMDAIIARLTAAGGPGITGGLVDAEGFPRSDIDIPNVLAQRRRLAELRNDHKDITNKIGKNLEVLHSAKLSRNEQSTSRRSDTTDPSHFGSSQSEPMEEDHVTGLPFAMIDEIADGSPASVDGLQLGDEIVKFGNVEAGDQLQERLMSEALSNEDSQVSLVIIRQGSAVNLTITPRKWHGRGLLGSSS

SEQ ID NO: 190382 - protein, 345 aa, Zea Mays
MVVTLSPHNVVAARCASQYLEMTEDMEKGNLIFKIEVFINSSILRSWKDSIIVLQSTKALSPWSEELKVVGRCIDAIASKTSADPANVTWSYSHSSKKGGACAEIVEPAGKPSIAPKDWWVEDLCELDVDLYKRVMVAIKSKGRMSPELIGEALKAYAVRWLPDSYDALVAEDYMRRNQCLVETIIWLLPSDKSSGCSCRFLLKLLKVAILVGGGEHVKEELIRRISFQLHKATVKDLLLPATSPNDGTYDVRLVHNLVQRFVARTALSHNGGFIEKSDEKMIELNFEQESILSVGELVDGYLSEVASDQDLSLSMFVELATAVPEVARPVHDNLYYAVDAYLKT

SEQ ID NO: 190383 - protein, 529 aa, Zea Mays
MVVTLSPHNVVAARCASQYLEMTEDMEKGNLIFKIEVFINSSILRSWKDSIIVLQSTKALSPWSEELKVVGRCIDAIASKTSADPANVTWSYSHSSKKGGACAEIVEPAGKPSIAPKDWWVEDLCELDVDLYKRVMVAIKSKGRMSPELIGEALKAYAVRWLPDSYDALVAEDYMRRNQCLVETIIWLLPSDKSSGCSCRFLLKLLKVAILVGGGEHVKEELIRRISFQLHKATVKDLLLPATSPNDGTYDVRLVHNLVQRFVARTALSHNGGFIEKSDEKMIELNFEQESILSVGELVDGYLSEVASDQDLSLSMFVELATAVPEVARPVHDNLYYAVDAYLKEHPDINKSEKKKICSLVDVKKLSADASVHATQNDRLPLRLVVQVLFFQQLRAGPSKELALIDNGEHACTRPTQDQCDRGERRIPKHPNSLNKQVTSLSARESQQHRISEHRGGRNSFKDQLGGLLLQSRSRRIFDKLWSSKGQGEHGGKGSETSGSSQSPPLSAKPAEVKPSPLPPLRGRRYSVS

SEQ ID NO: 190384 - protein, 439 aa, Zea Mays
MLLWFANTTPNLYVVSDLATDVVVHVGEVKFYLHKFPLLSKSGKLQRLVLKAAEDETDEVRIDDLPGGAKSFEICAKFCYGMVVTLSPHNVVAARCASQYLEMTEDMEKGNLIFKIEVFINSSILRSWKDSIIVLQSTKALSPWSEELKVVGRCIDAIASKTSADPANVTWSYSHSSKKGGACAEIVEPAGKPSIAPKDWWVEDLCELDVDLYKRVMVAIKSKGRMSPELIGEALKAYAVRWLPDSYDALVAEDYMRRNQCLVETIIWLLPSDKSSGCSCRFLLKLLKVAILVGGGEHVKEELIRRISFQLHKATVKDLLLPATSPNDGTYDVRLVHNLVQRFVARTALSHNGGFIEKSDEKMIELNFEQESILSVGELVDGYLSEVASDQDLSLSMFVELATAVPEVARPVHDNLYYAVDAYLKVCSNVEGKHFVRLA

SEQ ID NO: 190385 - protein, 435 aa, Zea Mays
MKFMKLGSKPDAFQSDGADVRYVVSDLATDVVVHVGEVKFYLHKFPLLSKSGKLQRLVLKAAEDETDEVRIDDLPGGAKSFEICAKFCYGMVVTLSPHNVVAARCASQYLEMTEDMEKGNLIFKIEVFINSSILRSWKDSIIVLQSTKALSPWSEELKVVGRCIDAIASKTSADPANVTWSYSHSSKKGGACAEIVEPAGKPSIAPKDWWVEDLCELDVDLYKRVMVAIKSKGRMSPELIGEALKAYAVRWLPDSYDALVAEDYMRRNQCLVETIIWLLPSDKSSGCSCRFLLKLLKVAILVGGGEHVKEELIRRISFQLHKATVKDLLLPATSPNDGTYDVRLVHNLVQRFVARTALSHNGGFIEKSDEKMIELNFEQESILSVGELVDGYLSEVASDQDLSLSMFVELATAVPEVARPVHDNLYYAVDAYLKT

SEQ ID NO: 190386 - protein, 452 aa, Zea Mays
MYISIYKVEGLQCNSTIAIAGQQYTDSVADPRFLDWLQQITLAAEEQAKVANENLSTLSATVKSKQELAYEFLGNLLMETQGINVEMDQWRNSVDSALSFIDELFQNLCIMAQGIREVNHSAHEDSARSCSVIRDYEKLSTCLMDKVYKLELEKKLLEEQSQDQQNEIYKLKANLESCEKAIDDCTLQHELEKDAILLELLNLQKEVSILSSSSLMKEKESIRKELDRTKSKLRETEDKLKNSIQEKTKLQSEKAEAHKEIKKLQSQRTLLERDLRKRDSATVDKRHELNSMPQESSGAFGHMQENYQNLEMHAFDMDAEIYSLQEALVTSIDEKDEALSKVGLITSELEDLANKLNLAESERNSFSNEITLLTEKLIASESSLKSLETSLNSVSREKEDLGMQLTDALLDMESERSIWTAKEKEYVEANHRLNICLDENHKLSEDLMKRGL

SEQ ID NO: 190387 - protein, 898 aa, Zea Mays
MRGSANEPGIIPLAVHDLFQRIQEHMDREFLVRMSYMEIYNEDINDLLVPEHRKLQIHESIEVIESREKGDDNEVEDFCDAVRVSVLNLVDLAGSERAAKTGAEGVRLKEGSHINKSLMTLGTVIKKLSEGIESQGGHVPYRDSKLTRILQPALGGNSNTAIICNITLAQIHTDETKSSLQFASRALRVTNCACVNEILTDAALLKRQRKEIEELRAKLRKSESDHWEEEILNLRNTLLQSELEKERISLELEEEKKAKEQRDRCLIEQAKKIENLSSLVLNSDRDDRSTAFSKNKRRVTWCPGPNAKQFDIEDLRPVQEGSTSSTVRNERDMGMPPLFEELMQESNDEPCANVYSSGPGNVSKDSEDVPLPDSHALLHVTNRRKPKAMKKSDQEQFRGRAGELLIPQDPCDGNDALRHKNTVPCVVSSLSSRESEAILVIKQLQDQIKLLEAEKSSVQTNLDAVLVLATQQKVSFNEEYEELQQITLAAEEQAKVANENLSTLSATVKSKQELAYEFLGNLLMETQGINVEMDQWRNSVDSALSFIDELFQNLCIMAQGIREVNHSAHEDSARSCSVIRDYEKLSTCLMDKVYKLELEKKLLEEQSQDQQNEIYKLKANLESCEKAIDDCTLQHELEKDAILLELLNLQKEVSILSSSSLMKEKESIRKELDRTKSKLRETEDKLKNSIQEKTKLQSEKAEAHKEIKKLQSQRTLLERDLRKRDSATVDKRHELNSMPQESSGAFGHMQENYQNLEMHAFDMDAEIYSLQEALVTSIDEKDEALSKVGLITSELEDLANKLNLAESERNSFSNEITLLTEKLIASESSLKSLETSLNSVSREKEDLGMQLTDALLDMESERSIWTAKEKEYVEANHRLNICLDENHKLSEDLMKRGL

SEQ ID NO: 190388 - protein, 315 aa, Zea Mays
MDKVYKLELEKKLLEEQSQDQQNEIYKLKANLESCEKAIDDCTLQHELEKDAILLELLNLQKEVSILSSSSLMKEKESIRKELDRTKSKLRETEDKLKNSIQEKTKLQSEKAEAHKEIKKLQSQRTLLERDLRKRDSATVDKRHELNSMPQESSGAFGHMQENYQNLEMHAFDMDAEIYSLQEALVTSIDEKDEALSKVGLITSELEDLANKLNLAESERNSFSNEITLLTEKLIASESSLKSLETSLNSVSREKEDLGMQLTDALLDMESERSIWTAKEKEYVEANHRLNICLDENHKLSEDLMKCINGLPTFS

SEQ ID NO: 190389 - protein, 458 aa, Zea Mays
MYISIYKVEGLQCNSTIAIAGQQYTDSVADPRFLDWLQQITLAAEEQAKVANENLSTLSATVKSKQELAYEFLGNLLMETQGINVEMDQWRNSVDSALSFIDELFQNLCIMAQGIREVNHSAHEDSARSCSVIRDYEKLSTCLMDKVYKLELEKKLLEEQSQDQQNEIYKLKANLESCEKAIDDCTLQHELEKDAILLELLNLQKEVSILSSSSLMKEKESIRKELDRTKSKLRETEDKLKNSIQEKTKLQSEKAEAHKEIKKLQSQRTLLERDLRKRDSATVDKRHELNSMPQESSGAFGHMQENYQNLEMHAFDMDAEIYSLQEALVTSIDEKDEALSKVGLITSELEDLANKLNLAESERNSFSNEITLLTEKLIASESSLKSLETSLNSVSREKEDLGMQLTDALLDMESERSIWTAKEKEYVEANHRLNICLDENHKLSEDLMKCINGLPTFS

SEQ ID NO: 190390 - protein, 357 aa, Zea Mays
MWRWISGETRLTVLFLLLMNSFRISASWHKAFVDYEKLSTCLMDKVYKLELEKKLLEEQSQDQQNEIYKLKANLESCEKAIDDCTLQHELEKDAILLELLNLQKEVSILSSSSLMKEKESIRKELDRTKSKLRETEDKLKNSIQEKTKLQSEKAEAHKEIKKLQSQRTLLERDLRKRDSATVDKRHELNSMPQESSGAFGHMQENYQNLEMHAFDMDAEIYSLQEALVTSIDEKDEALSKVGLITSELEDLANKLNLAESERNSFSNEITLLTEKLIASESSLKSLETSLNSVSREKEDLGMQLTDALLDMESERSIWTAKEKEYVEANHRLNICLDENHKLSEDLMKCINGLPTFS

SEQ ID NO: 190391 - protein, 770 aa, Zea Mays
MTLGTVIKKLSEGIESQGGHVPYRDSKLTRILQPALGGNSNTAIICNITLAQIHTDETKSSLQFASRALRVTNCACVNEILTDAALLKRQRKEIEELRAKLRKSESDHWEEEILNLRNTLLQSELEKERISLELEEEKKAKEQRDRCLIEQAKKIENLSSLVLNSDRDDRSTAFSKNKRRVTWCPGPNAKQFDIEDLRPVQEGSTSSTVRNERDMGMPPLFEELMQESNDEPCANVYSSGPGNVSKDSEDVPLPDSHALLHVTNRRKPKAMKKSDQEQFRGRAGELLIPQDPCDGNDALRHKNTVPCVVSSLSSRESEAILVIKQLQDQIKLLEAEKSSVQTNLDAVLVLATQQKVSFNEEYEELQQITLAAEEQAKVANENLSTLSATVKSKQELAYEFLGNLLMETQGINVEMDQWRNSVDSALSFIDELFQNLCIMAQGIRVWDYEKLSTCLMDKVYKLELEKKLLEEQSQDQQNEIYKLKANLESCEKAIDDCTLQHELEKDAILLELLNLQKEVSILSSSSLMKEKESIRKELDRTKSKLRETEDKLKNSIQEKTKLQSEKAEAHKEIKKLQSQRTLLERDLRKRDSATVDKRHELNSMPQESSGAFGHMQENYQNLEMHAFDMDAEIYSLQEALVTSIDEKDEALSKVGLITSELEDLANKLNLAESERNSFSNEITLLTEKLIASESSLKSLETSLNSVSREKEDLGMQLTDALLDMESERSIWTAKEKEYVEANHRLNICLDENHKLSEDLMKCINGLPTFS

SEQ ID NO: 190392 - protein, 952 aa, Zea Mays
MRGSANEPGIIPLAVHDLFQRIQEHMDREFLVRMSYMEIYNEDINDLLVPEHRKLQIHESIEKGIFVAGLREEIVTCAEQVMDFMSFGESHRHIGETNMNLYSSRSHTIFRMVIESREKGDDNEVEDFCDAVRVSVLNLVDLAGSERAAKTGAEGVRLKEGSHINKSLMTLGTVIKKLSEGIESQGGHVPYRDSKLTRILQPALGGNSNTAIICNITLAQIHTDETKSSLQFASRALRVTNCACVNEILTDAALLKRQRKEIEELRAKLRKSESDHWEEEILNLRNTLLQSELEKERISLELEEEKKAKEQRDRCLIEQAKKIENLSSLVLNSDRDDRSTAFSKNKRRVTWCPGPNAKQFDIEDLRPVQEGSTSSTVRNERDMGMPPLFEELMQESNDEPCANVYSSGPGNVSKDSEDVPLPDSHALLHVTNRRKPKAMKKSDQEQFRGRAGELLIPQDPCDGNDALRHKNTVPCVVSSLSSRESEAILVIKQLQDQIKLLEAEKSSVQTNLDAVLVLATQQKVSFNEEYEEQITLAAEEQAKVANENLSTLSATVKSKQELAYEFLGNLLMETQGINVEMDQWRNSVDSALSFIDELFQNLCIMAQGIREVNHSAHEDSARSCSVIRDYEKLSTCLMDKVYKLELEKKLLEEQSQDQQNEIYKLKANLESCEKAIDDCTLQHELEKDAILLELLNLQKEVSILSSSSLMKEKESIRKELDRTKSKLRETEDKLKNSIQEKTKLQSEKAEAHKEIKKLQSQRTLLERDLRKRDSATVDKRHELNSMPQESSGAFGHMQENYQNLEMHAFDMDAEIYSLQEALVTSIDEKDEALSKVGLITSELEDLANKLNLAESERNSFSNEITLLTEKLIASESSLKSLETSLNSVSREKEDLGMQLTDALLDMESERSIWTAKEKEYVEANHRLNICLDENHKLSEDLMKCINGLPTFS

SEQ ID NO: 190393 - protein, 992 aa, Zea Mays
MERIHVAVRSRPLSPEDSRSSPWKISGNAIAHSAQSSSRFEFDRIFGEECRTAEVYQARIKHIVDNVVRGFNGTVFAYGQTNSGKTFTMRGSANEPGIIPLAVHDLFQRIQEHMDREFLVRMSYMEIYNEDINDLLVPEHRKLQIHESIEVIESREKGDDNEVEDFCDAVRVSVLNLVDLAGSERAAKTGAEGVRLKEGSHINKSLMTLGTVIKKLSEGIESQGGHVPYRDSKLTRILQPALGGNSNTAIICNITLAQIHTDETKSSLQFASRALRVTNCACVNEILTDAALLKRQRKEIEELRAKLRKSESDHWEEEILNLRNTLLQSELEKERISLELEEEKKAKEQRDRCLIEQAKKIENLSSLVLNSDRDDRSTAFSKNKRRVTWCPGPNAKQFDIEDLRPVQEGSTSSTVRNERDMGMPPLFEELMQESNDEPCANVYSSGPGNVSKDSEDVPLPDSHALLHVTNRRKPKAMKKSDQEQFRGRAGELLIPQDPCDGNDALRHKNTVPCVVSSLSSRESEAILVIKQLQDQIKLLEAEKSSVQTNLDAVLVLATQQKVSFNEEYEELQQITLAAEEQAKVANENLSTLSATVKSKQELAYEFLGNLLMETQGINVEMDQWRNSVDSALSFIDELFQNLCIMAQGIREVNHSAHEDSARSCSVIRDYEKLSTCLMDKVYKLELEKKLLEEQSQDQQNEIYKLKANLESCEKAIDDCTLQHELEKDAILLELLNLQKEVSILSSSSLMKEKESIRKELDRTKSKLRETEDKLKNSIQEKTKLQSEKAEAHKEIKKLQSQRTLLERDLRKRDSATVDKRHELNSMPQESSGAFGHMQENYQNLEMHAFDMDAEIYSLQEALVTSIDEKDEALSKVGLITSELEDLANKLNLAESERNSFSNEITLLTEKLIASESSLKSLETSLNSVSREKEDLGMQLTDALLDMESERSIWTAKEKEYVEANHRLNICLDENHKLSEDLMKCINGLPTFS

SEQ ID NO: 190394 - protein, 1015 aa, Zea Mays
MERIHVAVRSRPLSPEDSRSSPWKISGNAIAHSAQSSSRFEFDRIFGEECRTAEVYQARIKHIVDNVVRGFNGTVFAYGQTNSGKTFTMRGSANEPGIIPLAVHDLFQRIQEHMDREFLVRMSYMEIYNEDINDLLVPEHRKLQIHESIEKGIFVAGLREEIVTCAEQVMDFMSFGESHRHIGETNMNLYSSRSHTIFRMVIESREKGDDNEVEDFCDAVRVSVLNLVDLAGSERAAKTGAEGVRLKEGSHINKSLMTLGTVIKKLSEGIESQGGHVPYRDSKLTRILQPALGGNSNTAIICNITLAQILTDAALLKRQRKEIEELRAKLRKSESDHWEEEILNLRNTLLQSELEKERISLELEEEKKAKEQRDRCLIEQAKKIENLSSLVLNSDRDDRSTAFSKNKRRVTWCPGPNAKQFDIEDLRPVQEGSTSSTVRNERDMGMPPLFEELMQESNDEPCANVYSSGPGNVSKDSEDVPLPDSHALLHVTNRRKPKAMKKSDQEQFRGRAGELLIPQDPCDGNDALRHKNTVPCVVSSLSSRESEAILVIKQLQDQIKLLEAEKSSVQTNLDAVLVLATQQKVSFNEEYEELQQITLAAEEQAKVANENLSTLSATVKSKQELAYEFLGNLLMETQGINVEMDQWRNSVDSALSFIDELFQNLCIMAQGIREVNHSAHEDSARSCSVIRDYEKLSTCLMDKVYKLELEKKLLEEQSQDQQNEIYKLKANLESCEKAIDDCTLQHELEKDAILLELLNLQKEVSILSSSSLMKEKESIRKELDRTKSKLRETEDKLKNSIQEKTKLQSEKAEAHKEIKKLQSQRTLLERDLRKRDSATVDKRHELNSMPQESSGAFGHMQENYQNLEMHAFDMDAEIYSLQEALVTSIDEKDEALSKVGLITSELEDLANKLNLAESERNSFSNEITLLTEKLIASESSLKSLETSLNSVSREKEDLGMQLTDALLDMESERSIWTAKEKEYVEANHRLNICLDENHKLSEDLMKCINGLPTFS

SEQ ID NO: 190395 - protein, 614 aa, Zea Mays
MRGSANEPGIIPLAVHDLFQRIQEHMDREFLVRMSYMEIYNEDINDLLVPEHRKLQIHESIEKGIFVAGLREEIVTCAEQVMDFMSFGESHRHIGETNMNLYSSRSHTIFRMVIESREKGDDNEVEDFCDAVRVSVLNLVDLAGSERAAKTGAEGVRLKEGSHINKSLMTLGTVIKKLSEGIESQGGHVPYRDSKLTRILQPALGGNSNTAIICNITLAQIHTDETKSSLQFASRALRVTNCACVNEILTDAALLKRQRKEIEELRAKLRKSESDHWEEEILNLRNTLLQSELEKERISLELEEEKKAKEQRDRCLIEQAKKIENLSSLVLNSDRDDRSTAFSKNKRRVTWCPGPNAKQFDIEDLRPVQEGSTSSTVRNERDMGMPPLFEELMQESNDEPCANVYSSGPGNVSKDSEDVPLPDSHALLHVTNRRKPKAMKKSDQEQFRGRAGELLIPQDPCDGNDALRHKNTVPCVVSSLSSRESEAILVIKQLQDQIKLLEAEKSSVQTNLDAVLVLATQQKVSFNEEYEELQQITLAAEEQAKVANENLSTLSATVKSKQELAYEFLGNLLMETQGINVEMDQWRNSVDSALSFIDELFQNLCIMAQGIRGL

SEQ ID NO: 190396 - protein, 700 aa, Zea Mays
MERIHVAVRSRPLSPEDSRSSPWKISGNAIAHSAQSSSRFEFDRIFGEECRTAEVYQARIKHIVDNVVRGFNGTVFAYGQTNSGKTFTMRGSANEPGIIPLAVHDLFQRIQEHMDREFLVRMSYMEIYNEDINDLLVPEHRKLQIHESIEKGIFVAGLREEIVTCAEQVMDFMSFGESHRHIGETNMNLYSSRSHTIFRMVIESREKGDDNEVEDFCDAVRVSVLNLVDLAGSERAAKTGAEGVRLKEGSHINKSLMTLGTVIKKLSEGIESQGGHVPYRDSKLTRILQPALGGNSNTAIICNITLAQIHTDETKSSLQFASRALRVTNCACVNEILTDAALLKRQRKEIEELRAKLRKSESDHWEEEILNLRNTLLQSELEKERISLELEEEKKAKEQRDRCLIEQAKKIENLSSLVLNSDRDDRSTAFSKNKRRVTWCPGPNAKQFDIEDLRPVQEGSTSSTVRNERDMGMPPLFEELMQESNDEPCANVYSSGPGNVSKDSEDVPLPDSHALLHVTNRRKPKAMKKSDQEQFRGRAGELLIPQDPCDGNDALRHKNTVPCVVSSLSSRESEAILVIKQLQDQIKLLEAEKSSVQTNLDAVLVLATQQKVSFNEEYEELQQITLAAEEQAKVANENLSTLSATVKSKQELAYEFLGNLLMETQGINVEMDQWRNSVDSALSFIDELFQNLCIMAQGIR

SEQ ID NO: 190397 - protein, 792 aa, Zea Mays
MTYSSVFKSIWTESFLCGCPTWKFTMKILMTFLCLNIENCRFMRVLRKGIFVAGLREEIVTCAEQVMDFMSFGESHRHIGETNMNLYSSRSHTIFRMVIESREKGDDNEVEDFCDAVRVSVLNLVDLAGSERAAKTGAEGVRLKEGSHINKSLMTLGTVIKKLSEGIESQGGHVPYRDSKLTRILQPALGGNSNTAIICNITLAQIHTDETKSSLQFASRALRVTNCACVNEILTDAALLKRQRKEIEELRAKLRKSESDHWEEEILNLRNTLLQSELEKERISLELEEEKKAKEQRDRCLIEQAKKIENLSSLVLNSDRDDRSTAFSKNKRRVTWCPGPNAKQFDIEDLRPVQEGSTSSTVRNERDMGMPPLFEELMQESNDEPCANVYSSGPGNVSKDSEDVPLPDSHALLHVTNRRKPKAMKKSDQEQFRGRAGELLIPQDPCDGNDALRHKNTVPCVVSSLSSRESEAILVIKQLQDQIKLLEAEKSSVQTNLDAVLVLATQQKVSFNEEYEELQQITLAAEEQAKVANENLSTLSATVKSKQELAYEFLGNLLMETQGINVEMDQWRNSVDSALSFIDELFQNLCIMAQGIREVNHSAHEDSARSCSVIRDYEKLSTCLMDKVYKLELEKKLLEEQSQDQQNEIYKLKANLESCEKAIDDCTLQHELEKDAILLELLNLQKEVSILSSSSLMKEKESIRKELDRTKSKLRETEDKLKNSIQEKTKLQSEKAEAHKEIKKLQSQRTLLERDLRKRDSATVDKRHELNSMPQESSGAFGHMQVDFYISL

SEQ ID NO: 190398 - protein, 150 aa, Zea Mays
MGMACTEPASSTCNVSAASHPSERTDTSFARTLQQKAATQLVKLKSSNNASMKNKKMILVVTWSHKARAGELPYLTSASRARLLRFLLASLLFFASVSDSPAAGRGSPARARGTCPRCRSPSPRAPPAAASSCPCSSAPAASPRRRPSRR

SEQ ID NO: 190399 - protein, 95 aa, Zea Mays
MHLFMFCNGTSLLKYPKAWEIAHALHAWRSLFEFPCSTIRFPTRCRCMKRNEGKPSPGYLHPLQATNIRDTELFGVHVYGTDLDVEILNAKIAAT

SEQ ID NO: 190400 - protein, 400 aa, Zea Mays
MEFASRSRPTTTAADDEENDCLRRFPDHPPSQPQGHGEPNTSGVDAALLARRQKLLLELLKGSIQQGLILRELVETEHAMGFIAGSHNPVPALPQDFLRCWTPSMSTLEAHLRQPCPCGCGNSMAVRAPPVNPHLERSSHAPEQTRPGNDAEQHQEDRSSGVRTHPFNGHFKLCHSPSKQTPVPGKAGVNQMRPSSGHQQAIVWEKIGVEVVHNMQPLNEIKNHSSEGQKAVDSAIEVCVKKPIQQRLQYKPVDQENAANNEHAPEQTRQGNDAEHHQEGRSSGVRTHPFNGYFELCRSPSKQIPLAGKAGINQVRPLSGHQQGVVWEKIGVEVVHNMQPLHEIKNPSSEGRKAIDSGIEDCVKKPMHHRLQYKPVDQENAASNDQKSTEFNELRELPLG

SEQ ID NO: 190401 - protein, 317 aa, Zea Mays
MFADFEPSPEARRLLVPFAASGDPPCVLAMVQVTFLKCGGVAVGTGMHHVTMDGAGAIQFIRAWTALARGEAPAWTPSHDRTLLRARSPPHVPACEHPVYSPAYLNGAPRPFVTRVYAVPPKLLAGIRSRCAPGASTYCAVTAHLWRAMCVARGLPAASDTRLRVPANVRQRLRPPLPASYFGNAIVRDLVTVRVGDVLSQPLGFVAERIKRAVARVDDARVRSVVDYLELESDKGNQAARGQFMPESDLWVVSWLGMPIHDADFGWGRPGFVAPAQMFGSGTAYVTQGRDKDDPINVLFALEPEYLNTFEKAFYGE

SEQ ID NO: 190402 - protein, 51 aa, Zea Mays
MKVEVVETTLVPPSEATPRHALWLSNLDLAVPKTHTPLVYYYPRWYRRTRW

SEQ ID NO: 190403 - protein, 564 aa, Zea Mays
MDAIKSHAKKVDLVDETLRPPLVPSEKHNAFRVRNVASRCKTDLADATKIRRCTSPSLGQTSAIEGTPAPKRAQSADRRRPTPSTPPSKVSTPSTPVSRSITPVRDTTRDLHKSSKRIASTKAPDGLWPAMRNLSSSFQSESVAAPTTRNDKVVTALDCSKGQVSVLTERKRSPFRRKNIGEHCENAQPSEEPPKRLIEQHRWPAMIAGQAPKNLMSRSIDLSDKANIPVASSNTSRGLSPRKTPSVRPVPSSNTSRGLSPRKTPSVGPVPSSNTSRCPSPMKTPSVEASVKLSNQSLDEVARSLAIQSSRKDDKVDSQTIERSKSLSRPNRTVTFPVPILQRSSSPSRALPATSSTSRAFQSPSRTRPSTPCQSQSVGAIQSSVPSSLINYMVDARKGKKNASQIENIHQVRLLHNRHLQWLFINAYAEDALSFQKATVENTMYNVWRNTVNLRDSVNMKRIMVQHFQQELRLYNILKEQIAYLEQWPTLERENSISLLGATEALKASTLRLPVTLGAKANTIALKNAVSSAVDVMQVLGSSVCCIHSKFRTLCHSRTREDHA

SEQ ID NO: 190404 - protein, 563 aa, Zea Mays
MDAIKSHAKKVDLVDETLRPPLVPSEKHNAFRVRNVASRCKTDLADATKIRRCTSPSLGQTSAIEGTPAPKRAQSADRRRPTPSTPPSKVSTPSTPVSRSITPVRDTTRDLHKSSKRIASTKAPDGLWPAMRNLSSSFQSESVAAPTTRNDKVVTALDCSKGQVSVLTERKRSPFRRKNIGEHCENAQPSEEPPKRLIEQHRWPAMIAGQAPKNLMSRSIDLSDKANIPVASSNTSRGLSPRKTPSVRPVPSSNTSRGLSPRKTPSVGPVPSSNTSRCPSPMKTPSVEASVKLSNQSLDEVARSLAIQSSRKDDKVDSQTIERSKSLSRPNRTVTFPVPILQRSSSPSRALPATSSTSRAFQSPSRTRPSTPCQSQSVGAIQSSVPSSLINYMVDARKGKKNASQIENIHQVRLLHNRHLQWLFINAYAEDALSFQKATVENTMYNVWRNTVNLRDSVNMKRIMVQHFQQELRLYNILKEQIAYLEQWPTLERENSISLLGATEALKASTLRLPVTLGAKANTIALKNAVSSAVDVMQVLGSSVCCIHSKDKRRSCLMNAENS

SEQ ID NO: 190405 - protein, 475 aa, Zea Mays
MRNLSSSFQSESVAAPTTRNDKVVTALDCSKGQVSVLTERKRSPFRRKNIGEHCENAQPSEEPPKRLIEQHRWPAMIAGQAPKNLMSRSIDLSDKANIPVASSNTSRGLSPRKTPSVRPVPSSNTSRGLSPRKTPSVGPVPSSNTSRCPSPMKTPSVEASVKLSNQSLDEVARSLAIQSSRKDDKVDSQTIERSKSLSRPNRTVTFPVPILQRSSSPSRALPATSSTSRAFQSPSRTRPSTPCQSQSVGAIQSSVPSSLINYMVDARKGKKNASQIENIHQVRLLHNRHLQWLFINAYAEDALSFQKATVENTMYNVWRNTVNLRDSVNMKRIMVQHFQQELRLYNILKEQIAYLEQWPTLERENSISLLGATEALKASTLRLPVTLGAKANTIALKNAVSSAVDVMQVLGSSVCCIHSKITDSTSLVSELSVIAGQEKIMLDECRELLATAAKLQVQESSLRTHLVQQRQRLQD

SEQ ID NO: 190406 - protein, 595 aa, Zea Mays
MDAIKSHAKKVDLVDETLRPPLVPSEKHNAFRVRNVASRCKTDLADATKIRRCTSPSLGQTSAIEGTPAPKRAQSADRRRPTPSTPPSKVSTPSTPVSRSITPVRDTTRDLHKSSKRIASTKAPDGLWPAMRNLSSSFQSESVAAPTTRNDKVVTALDCSKGQVSVLTERKRSPFRRKNIGEHCENAQPSEEPPKRLIEQHRWPAMIAGQAPKNLMSRSIDLSDKANIPVASSNTSRGLSPRKTPSVRPVPSSNTSRGLSPRKTPSVGPVPSSNTSRCPSPMKTPSVEASVKLSNQSLDEVARSLAIQSSRKDDKVDSQTIERSKSLSRPNRTVTFPVPILQRSSSPSRALPATSSTSRAFQSPSRTRPSTPCQSQSVGAIQSSVPSSLINYMVDARKGKKNASQIENIHQVRLLHNRHLQWLFINAYAEDALSFQKATVENTMYNVWRNTVNLRDSVNMKRIMVQHFQQELRLYNILKEQIAYLEQWPTLERENSISLLGATEALKASTLRLPVTLGAKANTIALKNAVSSAVDVMQVLGSSVCCIHSKITDSTSLVSELSVIAGQEKIMLDECRELLATAAKLQLRQSHGMMA

SEQ ID NO: 190407 - protein, 531 aa, Zea Mays
MPAPTAEPALPAAFLCVPSPLLSTPLPGAALSASPAPSSHHASFLPRPRGGPRALSVAISVPGPTFSVASRLHQMWGEFARFVRLHGNQIAPLGFASMGLGFGGGGGDNVGGGGGGGGGDVDGVGEVEEAAARAEAPKKVLILMSDTGGGHRASAEAIKAAFTQEFGDDYQVFVTDLWTDHTPWPFNQLPRSYSFLVKHGPLWKMTYYGTAPRVVHQPHFAATSTFIAREVAKGLMKYQPDVIISVHPLMQHVPLRILRSKGLLDKIPFATVITDLSTCHPTWFHKLVTRCYCPSTEVEKRALKAGLKPAQIKVYGLPVRPSFVKPVRPKDELRRELGMDEDLPAVLLMGGGEGMGPIEATAKALGDSLYDENLGEPTGQILVICGRNKKLVNRLQSINWKVPVQVKGFVTKMEECMGACDCIITKAGPGTIAEAMIRGLPIILNDYIAGQEAGNVPYVVENGCGKFSKSPKQIAKIVADWFGPRSDEFRASTVVGAACRLGYEPNPMKFSMDYLDDMDFLGTCLTLILES

SEQ ID NO: 190408 - protein, 430 aa, Zea Mays
MPAPTAEPALPAAFLCVPSPLLSTPLPGAALSASPAPSSHHASFLPRPRGGPRALSVAIKAAFTQEFGDDYQVFVTDLWTDHTPWPFNQLPRSYSFLVKHGPLWKMTYYGTAPRVVHQPHFAATSTFIAREVAKGLMKYQPDVIISVHPLMQHVPLRILRSKGLLDKIPFATVITDLSTCHPTWFHKLVTRCYCPSTEVEKRALKAGLKPAQIKVYGLPVRPSFVKPVRPKDELRRELGMDEDLPAVLLMGGGEGMGPIEATAKALGDSLYDENLGEPTGQILVICGRNKKLVNRLQSINWKVPVQVKGFVTKMEECMGACDCIITKAGPGTIAEAMIRGLPIILNDYIAGQEAGNVPYVVENGCGKFSKSPKQIAKIVADWFGPRSDEFRVMSQNALKLARPDAVFKIVHDLHELVREKCFVPQYACAT

SEQ ID NO: 190409 - protein, 413 aa, Zea Mays
MPAPTAEPALPAAFLCVPSPLLSTPLPGAALSASPAPSSHHASFLPRPRGGPRALSVAISVPGPTFSVASRLHQMWGEFARFVRLHGNQIAPLGFASMGLGFGGGGGDNVGGGGGGGGGDVDGVGEVEEAAARAEAPKKVLILMSDTGGGHRASAEAIKAAFTQEFGDDYQVFVTDLWTDHTPWPFNQLPRSYSFLVKHGPLWKMTYYGTAPRVVHQPHFAATSTFIAREVAKGLMKYQPDVIISVHPLMQHVPLRILRSKGLLDKIPFATVITDLSTCHPTWFHKLVTRCYCPSTEVEKRALKAGLKPAQIKVYGLPVRPSFVKPVRPKDELRRELGMDEDLPAVLLMGGGEGMGPIEATAKALGDSLYDENLGEPTGQILVICGRNKKLVNRLQSINWKVPVQFLDVAFSP

SEQ ID NO: 190410 - protein, 59 aa, Zea Mays
MEEGGLRPKQHVKEASTRHMCNERESQGHQPRLGKGFKRKATRRKKLKACVERKKEKRQ

SEQ ID NO: 190411 - protein, 80 aa, Zea Mays
MCQRLREGRTEPHNRGREGRAVPSWKGGLVSGARPCAPTPQQKAKKGHRRQQKSHRHHQRNGGAGLEDRSPRYYARDSIL

SEQ ID NO: 190412 - protein, 76 aa, Zea Mays
MLCVSLMERLHPSNCYNKLCTLGTIRTCNNYHSSYVVKLELWKCKICFVKYSALSPKCVCIECDYCNMHECGRSLG

SEQ ID NO: 190413 - protein, 74 aa, Zea Mays
MSSRAASPTGEVSLAPAMTADAGTCRSPSSAGTHVIPFTASSANRPSAIPITLLACLAEVPDSIFMANHCIPRA

SEQ ID NO: 190414 - protein, 64 aa, Zea Mays
MAHRNTPSILSEKNMWRHCVTVVLKDIRSFIPSVVITQVSPSKHFCSKKGLVVTVLLLPSSTQN

SEQ ID NO: 190415 - protein, 253 aa, Zea Mays
MMMATIPVHRNGRYRQRELTVPVGLGSQTGSRRCHHSRVRCRLHQRVGFDHLHEPRPHPSAAEEPRPVAAGVGHHRHGRGPQPTMAHPGQHEAGLPEPEVPVDGELKQPEHEERGAPEPQIHRLCPLVVVPECRLPLLHPVYQLLEPRRRRDPRDGRAHHARHLGERHARTSGAAMARWRRMSQGIQDLIAACAAGVVGTRDARSGGGRGMERQNIAACGRRAEIGGRPVAAIIGPNLTNEHGAGSRDRLREM

SEQ ID NO: 190416 - protein, 658 aa, Zea Mays
MAPGLRLAYPWGRDVRRGTPVVVTMENPNYSVVEIDGPEAEALRAGVPPMDKGRGRGRSAKQFTWVLLLRAHRAAGCLASLAAVTWALPSAVAKRFRRAAAAEGVGRGRGWLLYRFIKVLLALSLLALTVELAAYWKGWHFQRPNLTMPEFHVPEVEDIQGWLHTAYLAWMSFRADYIRRPIEFLSKVCILLFVVQSLDRLVLCIACFWIKLKKIKPRLEGDPFREGSGYLHPMVLVQIPMCNEKEVYEQSISAVCQLDWPRDKFLIQVLDDSSDESIQMLIKAEVSKWNQQGVNIVYRHRVLRTGYKAGNLNSAMSCDYVKNFEFVAIFDADFQPSTDFLKKTIPHFDGNPELGLVQARWSFVNKDENLLTRLQNINLCFHFEVEQQVNGVFLNFFGFNGTAGVWRIQALEESGGWLERTTVEDMDIAVRAHLNGWKFIFLNDVKVLCEVPESYEAYRKQQHRWHSGPMHLFRLCFPDIITAKISSWKKANLILLFFLLRKLILPFYSFTLFCVILPLTMFVPEAELPVWVICYVPICMSFLNILPSPRSFPFIVPYLLFENTMSVTKFNAMVSGLFKLGSSYEWVVTKKSGRSSELDLLTSEEKNRKCTTLPQLQNQLPENSELVEINVRKEQREKVPNDAKRGDVIPCRWPRSNW

SEQ ID NO: 190417 - protein, 76 aa, Zea Mays
MSMQKPLGIPSSDLIKLLNPDFPGTPILSTLFTGKSHPLGVFSLPPGHTIVLISSFFSRILDMFNPGVQKPTALLS

SEQ ID NO: 190418 - protein, 228 aa, Zea Mays
MGRAPCCDKATVKKGPWAPEEDAVLKAYIDEHGAGGNWIQLPHKIGLNRCGKSCRLRWLNYLRPNIRHGGFTEEEDRLICNLYISIGGRWATIAAQLPGRTDNDVKNHWNTKLKRRLLGGGRRPRAEARLQLLTTSPFWQHRDSLASSAAALERMQVSTRLHRRHQPRLDDPAAAAAAFTLYNNYGSLGAPLWPSLLSPSSSPSPAASETSEILPRQPPPASATQELE

SEQ ID NO: 190419 - protein, 117 aa, Zea Mays
MMNNNSGGGAGGPGGGMGTGVGGGGDGRHDDEAALTEFLSSLMDYTPTIPDELVEHYLGRSGFHCPDLRLTRLVAVATQKFLSDIASDSLQHCKARVAAPIKDNKSKQPKTSCINHG

SEQ ID NO: 190420 - protein, 54 aa, Zea Mays
MISLAASFDKKPFRPLLVELEDHYITGLRGITMRTCYKKKEKEKNSDIQIRQLE

SEQ ID NO: 190421 - protein, 82 aa, Zea Mays
MPQELDALAQDRGAANAAGSLQLARAWMRLLARAWVWLGMRLRPGRLSRVVAWWRSQREPGERGQRATPSWCRSGSSALWSR

SEQ ID NO: 190422 - protein, 158 aa, Zea Mays
MMEGPSSWSAVKAKLKPATMRPIPHSRKQQMHPFMGFPETSLHETSIVKPSLPAAPTVKHNSVSSATTTHRKSTSGPSHTPSVIQLNPLPMKKHGCDRLPIQVCSEEDFLKDVMQFLIQRGHNRLVPHGGLAEFPDAILNAKRLDLYNLYKERWILCG

SEQ ID NO: 190423 - protein, 309 aa, Zea Mays
MSQIQSFSRNNCALLAVLCGKYAENRTPAARSGLEAKRPRPAYPFPELSSAGRLEVHTLFNPTPEQFLEAQRVVQPNFLYIQGQQLEDEKEIGSLVWGDADVSDPQAFSTLISPPFPTIVYLEVPIGEKLAQAVHSKGIPYVIYWRNSFSSYAASHFRHALMSAIQSSVSHTWDAFQLAHASFRLYCVRNNHVQSVKLGPRLLGDAPKINISPPETEMVDEEGSSEVTPAIKIYDEEINMKLLLCGVPCTLDPCLLGSLEDGLNALLNIELHLYHVGWLLCAVISVLAVLPMCHSSFLVAHKLVLMTSF

SEQ ID NO: 190424 - protein, 383 aa, Zea Mays
MSQIQSFSRNNCALLAVLCGKYAENRTPAARSGLEAKRPRPAYPFPELSSAGRLEVHTLFNPTPEQFLEAQRVVQPNFLYIQGQQLEDEKEIGSLVWGDADVSDPQAFSTLISPPFPTIVYLEVPIGEKLAQAVHSKGIPYVIYWRNSFSSYAASHFRHALMSAIQSSVSHTWDAFQLAHASFRLYCVRNNHVQSVKLGPRLLGDAPKINISPPETEMVDEEGSSEVTPAIKIYDEEINMKLLLCGVPCTLDPCLLGSLEDGLNALLNIEIRGSKLQNRISASPPPLEAASLPRGMVTMRCDISTCSSSHVSLLVSGSAQTCFDDQLLESHIKNEIIEKSQLVRALSNSEDKLPSSEPLTSMSTACGASTFEVWMSLPKWAAQ

SEQ ID NO: 190425 - protein, 306 aa, Zea Mays
MPYIFFFLRFSISTSCCQHEQLVEAPDIPGARPIFIKAKARHGRVMCEAGRRAAVAAPHSLRRSALRVRRRRQHGVIGSEDRGGVVRGHGGGRRVVVPRPRPHQVGGAGAVGVAALVVGDGEHSVGRGRPPLITGHHRHRRRRDEEAATATATLGGGWLRCRNLLLIVTERKHRKQIIVVVVVVVLQVVKDLIGRWPVTSACRVIGKIHLRFLAADLASFGVVCPSCLLGGVVGSEPDADALVRVPDLSCPFAPRPLPDSPVLVLPAALFYCSISLDILWRRSHHAIYNKKTVVYQSVRLNKTYLA

SEQ ID NO: 190426 - protein, 216 aa, Zea Mays
MAGHAPARDKTTTGFAATCSLLSQFLKEKKGGLQGLGGLAMAPAPAAGAFRPPTTMNLLSALDAAKATVGEPEGHGQRTGGNPREAAGEEAQQLTIFYGGKVVVFDRFPSAKVKDLLQIVSPPGADAVVDGAGAGAAVPTQNLPRPSHDSLSADLPIARRNSLHRFLEKRKDRITAKAPYQVNSSVGAEASKAEKPWLGLGQEQEGSDGRQAGEEM

SEQ ID NO: 190427 - protein, 106 aa, Zea Mays
MCSILPNKKEQHTLSSKERTNERTCDIYIYTHIYHYGQITETVFLQGGSWGGGAAADHLLRRESGRLRQVPLRQGQGPAADREPAGGRRRGGRCRCRCRCPYAEPA

SEQ ID NO: 190428 - protein, 387 aa, Zea Mays
MAVHLLLAVAVALLLCPGDASVHDYRGLSFANKGNAFILHAGSEGLYAASHANTTAEDDEDTAAVADAFIRFDKVTFRRPEDTNDSVKETSSAKVHILVFEVEDREMIGGSAYGGQKAICCSSDLAKLGACKEGSVIYRPSQVNPGWPKLFVASFEGSDLIATLPSRTIQITKTGMYNMYFIHCDPSLASLEIEGKTIWKNPTGYLPGRMAPLKNFFGLMSFAFVVLGIYWFYQYMKSWKEVLPLQNCITLVITLGMLEMALWYFEYAEFNETGVRPKGITFWAVTFGTVKRTAAEVIVLIVSMGYGVVAPTLGGLTSKVVMLGGTFFLATEILELVENLGAVNDLSGKARLFLVYPVAILDAAFVVWIFISLAKTIGKLQKVDGQT

SEQ ID NO: 190429 - protein, 270 aa, Zea Mays
MKIFSWVANKIGGKQEPKRSAAHYRGNVSECRNDEFSDWPQSLLAIGTFGNRQLEEGVVETSSGNVQAAQDPAKFTEEEEADSIRRELEVLLLQGNNNNGGQAEAQGSRGDERRQVAWKEHDGECSKEKQPTSGEMVTSKARAREMVAGKKRSTLKPRSVASLLRLLACKGGFATPVLEPRSPFPQSRMEKLLKAILEKKIHPQNPSTAAARRHQLDWKLDEKEIDECLDDALRDLDDDGAKWVKTDSDCPEALSWRPGANIYMIIRLYM

SEQ ID NO: 190430 - protein, 225 aa, Zea Mays
MPPVKWLMHWHPSPGATLNSQILAEACGCAESLGGSKDGRWKTSIFFYRAMTRDGAGGPAVQQHPDLPRELLGVALHERPGLYFSIVRAQRLVLQADAAFPQVMEKLQSYRIRVALNFEGFQYQLGDFCLRIGKCVPNNSEALRGIMMEVEYYPLTSIEKSKAVMEDFFDIWQETVAKKSLPGQFIHVDSNFSEYGLSDQYSFQHTAVQYATCLQQLMAAVTVRG

SEQ ID NO: 190431 - protein, 201 aa, Zea Mays
MPPVKWLMHWHPSPGATLNSQILAEACGCAESLGGSKDGRWKTSIFFYRAMTRDGAGGPAVQQHPDLPRELLGVALHERPGLYFSIVRAQRLVLQADAAFPQVMEKLQSYRIRVALNFEGFQYQLGDFCLRIGKCVPNNSEALRGIMMEETVAKKSLPGQFIHVDSNFSEYGLSDQYSFQHTAVQYATCLQQLMAAVTVRG

SEQ ID NO: 190432 - protein, 438 aa, Zea Mays
MIKLIITSLLPMPPQLFTHFIKTPLRRLPTASSSPHPALLFRVTCGSVNWSNPPLSLRRKRAGGRERGGAWVAGPSDSSFQSTAIKPRRPGESRRFHYWSLAGSRMELALSLGETMADAGRDLMLGLGMGVGVRREEEAQRGRRDREVRRELEFTARSARSSPEPAVRLTLLHGLGLPWPPPPSSETNRHLEASARGFDVNRAPSLSAAGGAAEEDEEQDEAAAAAASSSPNNSASSFPTDFSAQGQVAPGADRACSRASDEDDGGSARKKLRLSKEQSAFLEDSFKEHATLNPKQKLALAKQLNLRPRQVEVWFQNRRARTKLKQTEVDCEYLKRCCETLTEENRRLQKELSELRALKTVHPFYMHLPATTLSMCPSCERVASNSAPAPASSPSPATGIAAPAPEQRPSSFAALFSSPLNRPLAAQAQPQPQAPANS

SEQ ID NO: 190433 - protein, 484 aa, Zea Mays
MLGVGGLGSGSGMEPGTSCGALLRELQQIWAEVGESEGEKNKALLDIERECLEVYRRKVDDANRTRVQLHQSVAAKEAEVASLMATLGEHKLYLKKDKGVVPLKEQLATVAPVLESLKCKKEERIKQFSNIRSQIEKIRFELSEYNDQGDDPSSLAAEEHDLSMRKLNSYQTQLRALQKDKSERLRKVLEYINEVHSLCGVLGIDFGSTVHEVHPSLHQNGVEQSRNISNSTLEGLASTIYKLKAERKSRIHKAREIMESLCQLWKLMDSPEEEKRQFSNVMSSLILPEEGITSPGVLSEETIEKMEFEVERLTRLKTSRLKEIVMKRRAELEAICQNAHIEPDVSTAPEQTDALIDSGLIDPSELLANIESQILKAKEESLSRKDIMDRINRWIAACDEEAWLEEYNQDPKRYSAGRGAHINLKRAEKARILVRKIPSMVDDLINRTFAWENARNKPFLYDGPLDLRALLIGTPNICTRRVQA

SEQ ID NO: 190434 - protein, 64 aa, Zea Mays
MRRFISLMLQFEELVAPSREGGDRHGATIDDSLQSANAESTDLYDLWSSRRNVRICVDPAGNLA

SEQ ID NO: 190435 - protein, 358 aa, Zea Mays
MKPKNGGLASDRRLLSRRILILCFLSFFLGILVTDLFGSVPSPVVVQTGWHEHEHEHDTELQSLSEDFVAKPKPAEDRDIMGEVSKTHEAIQYLEKSIDTLQMELAAKRSINELHGESTGGGVSKQRRRVFVVIGVNTAFSSRKRRDSVRETWMPQGEKLKKLEEKGIVVRFTIGHSATSNNVLDKAIDAEDEIHGDFLRLDHVEGYHKLSAKTKTFFSTAVALWDADFYVKVDDDVHLNLGMLVATLGRHKLKPRVYIGCMKSGPVLSDKNAKYHEPEFWKFGEDGNKYFRHATGQIYAISKDLATYISINQPILHKYANEDVSLGAWFIGLDVEHIDDRDMCCGTPPGGERLHRVV

SEQ ID NO: 190436 - protein, 352 aa, Zea Mays
MDVHGGGTGAGKLTRTPSSLLRSPTVRNCSSFQAVVVEDPEPDDKKAQAHPKPPPHHFHPGGGSNHPLLVLVLPLAFLPLLLLLRGGDGRHLALLAASAAAALAAAAGAARLLRGRLRRSPGSGSVQWFIGDDDDKPQKRADKAAAAPHGRVVREGVEFYSNGDCYEGEFHKGNCNGSGVYNFFGKGKYEGDWVDGKYDGYGVESWARGSRYRGQYRQGLRHGHGVYRFYSGDCYAGEWAGGQSHGIGAQTCSDGSSYVGEFKCGVKHGLGSYHFRNGDRYAGEYFGDKIHGFGVYSFANGHCYEGSWHEGKKQGFGMYTFRNGDKRSGDWDSGTLKTPLPPADPSVQRAVQ

SEQ ID NO: 190437 - protein, 57 aa, Zea Mays
MGKEALVNPVEVVLVDPVMRKIIRCWCRNVELLPSQLQPCVIQGYHLFLLFSSCRIC

SEQ ID NO: 190438 - protein, 92 aa, Zea Mays
MDNSGNVCFQVNATIKELGNQNVDISTSTAGSHQSSLMFSQGASSNMEDTPHKTDTLSSPLTPLTPQGSVATTKYLETVDAGDTGCVTTQSS

SEQ ID NO: 190439 - protein, 54 aa, Zea Mays
MTHSCSRWGCSSRRCSCSCPRARRGTSQTTTTCSLLKSKLVSLWKSQCHSLLLT

SEQ ID NO: 190440 - protein, 315 aa, Zea Mays
MDSSSRVIAFDCSSFKLYMDGQVERAAQRMETVPAGFDADTGVASKDVVIDVATGATVRLYLPPVQGATTKLPVVVFFHGGYFIVGSAREPMYHRYVNSLVARARVVAVSADYRLAPEHPLPAAYDDSWAALKWAVSGADQWLSDHGDLGRVFLVGISAGGNIAHNMAISVGVSGLPAAEPPRIEGVILLHPSFSGEQKMDVEEEEFWRSNNSRWAVIFPGATGGADDPRINPMADGAPSLEKLVGERLLVCTASLDPRAPRGPGYCEAVRASGWRGKVEWFETEGEDHGFFVLNPGSHKAVEVMDRVVAFLADQ

SEQ ID NO: 190441 - protein, 295 aa, Zea Mays
MLASPEAARFVLVTQAHLFKPTYPRSKERMIGPSALFFHQGDYHLRLRKLVQGALGPDALRALVPEVEAAVRSTLASWDAGHVRSTFHAMKTLSFDVGIVTIFGGRLDERRKAELRKNYSVVEKGYNSFPNSLPGTLHYKAMQVILESLRMASIISFTFREAVADVEYKGFLIPKGWKVMPLFRNIHHSPDYFQDPHKFDPSRFQVAPRPSTFLPFGHGVHACPGNELAKLEMLVLIHHLVTGYRWQIVGSSDEVEYSPFPVPKHGLPVRLWRQNNPVDRKGRETDDDHVERIFI

SEQ ID NO: 190442 - protein, 405 aa, Zea Mays
MAFFLALVCILILLAIASYVQYTRWQKGKGRFGGHGRSAPLKLPPGSMGWPYLGETLQLYSQDPSFFFASKQKRYGEIFKTHLLGCPCVMLASPEAARFVLVTQAHLFKPTYPRSKERMIGPSALFFHQGDYHLRLRKLVQGALGPDALRALVPEVEAAVRSTLASWDAGHVRSTFHAMKTLSFDVGIVTIFGGRLDERRKAELRKNYSVVEKGYNSFPNSLPGTLHYKAMQDTTASALTWIVKYLHDHPKLLEAVRAEQAAVREATGGGRQPLAWAHTKSMALTHRVILESLRMASIISFTFREAVADVEYKGFLIPKGWKVMPLFRNIHHSPDYFQDPHKFDPSRFQVAPRPSTFLPFGHGVHACPGNELAKLEMLVLIHHLVTGYRCVHLLSDPLHIFPLVL

SEQ ID NO: 190443 - protein, 439 aa, Zea Mays
MAFFLALVCILILLAIASYVQYTRWQKGKGRFGGHGRSAPLKLPPGSMGWPYLGETLQLYSQDPSFFFASKQKRYGEIFKTHLLGCPCVMLASPEAARFVLVTQAHLFKPTYPRSKERMIGPSALFFHQGDYHLRLRKLVQGALGPDALRALVPEVEAAVRSTLASWDAGHVRSTFHAMKTLSFDVGIVTIFGGRLDERRKAELRKNYSVVEKGYNSFPNSLPGTLHYKAMQDTTASALTWIVKYLHDHPKLLEAVRAEQAAVREATGGGRQPLAWAHTKSMALTHRVILESLRMASIISFTFREAVADVEYKGFLIPKGWKVMPLFRNIHHSPDYFQDPHKFDPSRFQVAPRPSTFLPFGHGVHACPGNELAKLEMLVLIHHLVTGYRWQIVGSSDEVEYSPFPVPKHGLPVRLWRQNNPVDRKGRETDDDHVERIFI

SEQ ID NO: 190444 - protein, 95 aa, Zea Mays
MSPLALSLAPPLSSRSLCFWILPMPLLAPSVAADAPRRHRRLIGRNHMDSPEVVASASPAAAASERQERPARLRRKISSAFCACMGHPPASHVQQ

SEQ ID NO: 190445 - protein, 153 aa, Zea Mays
MACVDMYNPEHHHQHQPAPPSFMAPRMSFSSDFAVEPPPPAAARGGGDADFEFSVGSHPMMAADQLFSKGRLLPLREAPQQAAGGRPVTLRDELRADERHGRAPRATNIRWKELLGLKKAPKKQQAAAAAAEAAAGASTDAHMDLGGQGSTRG

SEQ ID NO: 190446 - protein, 92 aa, Zea Mays
MPHNNLELVRRNLGEMRERRRKKRQRVASLFVATVMGMIAEYYYRKRPRHLMDPSEVIERDVAGRKQMRKYESLIALPLILRKRWLLKQLKK

SEQ ID NO: 190447 - protein, 364 aa, Zea Mays
MRSISACFFFVLLIVCLLGSHANSSQEARLREFILSRRSSGSAFSAHDESASTATSRLRSEYSGTDQSAQKAADKITELPGQPGGVGFDQYSGYVTVDEESGRALFYYFVEAAHDAPAKPLLLWLNGGPGCSSVGYGAMIEIGPFRITSDNKTLSRNENAWNSEANVLFLESPAGVGFSYSNTSSDYGKSGDQRTADDAFVFLINWLERFPEYKARAFYISGESYAGHYVPQLATAILSHSIKSESGIINLRAILVGNAYLDDNKNTKGQIDYLWSHGVISDEVWANITKNCKFSLADGDACSDAMAAYDSGYISGYNIYAPVCIDQPNGNYYPSSNVRAFISFSSFLFPAKEYEVFFFWTCCC

SEQ ID NO: 190448 - protein, 347 aa, Zea Mays
MSKTKMARNQISHCIPLLAILLALLPLTTNAALDQPALLRQLMESRRSARRSVGVSDETDGGTWTDPVSSFGKLPTYCESPEQQGSKEADRIAALPGQPRRVNFEQYAGYVTVDEEHGRALFYYFVESPYDAAAKPLVLWLNGGPGCSSLGAGAMQELGPFRVNPDGKTLSRNRHSWNNVANVIFLESPAGVGFSYSNTSSDYDESGDTRTAVDSYTFLLHWLERFPEYKGRDLYISGESYAGHYVPELAAVIVAVRELTGQNPTNLKGIFVGNPVLDDYKNDKGSLEFLWNHGVMSDEIWANITAHCSFGPSDGVSCEEAKSAFDFRPNFVKNAGNINPCLATTRA

SEQ ID NO: 190449 - protein, 123 aa, Zea Mays
MCRTDDSSPVYSLYAVVVHRNVRNATVSGHYVCYVKDSQGKWHEMDDNKVKPVSVQKVLSRCAYMLLYARCSPRAPTSARAKKPKQMARSGSFPSGGGRYRSRHQGGLYPIWEEQMESYEAMY

SEQ ID NO: 190450 - protein, 267 aa, Zea Mays
MCRTDDSSPVYSLYAVVVHRNVRNATVSGHYVCYVKDSQGKWHEMDDNKVKPVSVQKVLSRCAYMLLYARCSPRAPTSARAKKPKQMARSGSFPSGGGRYRSRHQGGQLSKDDAVHNLTYTLGTSDTSSYPVAPCFSGSNSSSLFSSSDAGSSCTFSSDSTDSAGKSSMEYDRIFGTSGYMCPVVSSAVVPEGDNQSYLRQGSSWNPSSSGHDMDEAGKFARQYQGGYQAGGGAPVGGWETPSFSYADQGGLYPIWEEQMESYEAMY

SEQ ID NO: 190451 - protein, 334 aa, Zea Mays
MQSASMEEAKKNGIQQLAEETTLVQFIFGGYLRSKIKCTKCQVISKHSERILDLTVEIDGDISTLDGALRRFTSSEILDGDNRYHCSRCNSYERAQKKLTILEAPNILTIALKRYQVKPVSVQKVLSRCAYMLLYARCSPRAPTSARAKKPKQMARSGSFPSGGGRYRSRHQGGQLSKDDAVHNLTYTLGTSDTSSYPVAPCFSGSNSSSLFSSSDAGSSCTFSSDSTDSAGKSSMEYDRIFGTSGYMCPVVSSAVVPEGDNQSYLRQGSSWNPSSSGHDMDEAGKFARQYQGGYQAGGGAPVGGWETPSFSYADQGGLYPIWEEQMESYEAMY

SEQ ID NO: 190452 - protein, 190 aa, Zea Mays
MQSASMEEAKKNGIQQLAEETTLVQFIFGGYLRSKIKCTKCQVISKHSERILDLTVEIDGDISTLDGALRRFTSSEILDGDNRYHCSRCNSYERAQKKLTILEAPNILTIALKRYQVKPVSVQKVLSRCAYMLLYARCSPRAPTSARAKKPKQMARSGSFPSGGGRYRSRHQGGLYPIWEEQMESYEAMY

SEQ ID NO: 190453 - protein, 416 aa, Zea Mays
MISFNRYAIDNMQSASMEEAKKNGIQQLAEETTLVQFIFGGYLRSKIKCTKCQVISKHSERILDLTVEIDGDISTLDGALRRFTSSEILDGDNRYHCSRCNSYERAQKKLTILEAPNILTIALKRYQSGVLGKISKAVKFPEHLNLSQYMCRTDDSSPVYSLYAVVVHRNVRNATVSGHYVCYVKDSQGKWHEMDDNKVKPVSVQKVLSRCAYMLLYARCSPRAPTSARAKKPKQMARSGSFPSGGGRYRSRHQGGQLSKDDAVHNLTYTLGTSDTSSYPVAPCFSGSNSSSLFSSSDAGSSCTFSSDSTDSAGKSSMEYDRIFGTSGYMCPVVSSAVVPEGDNQSYLRQGSSWNPSSSGHDMDEAGKFARQYQGGYQAGGGAPVGGWETPSFSYADQGGLYPIWEEQMESYEAMY

SEQ ID NO: 190454 - protein, 236 aa, Zea Mays
MLLYARCSPRAPTSARAKKPKQMARSGSFPSGGGRYRSRHQGGQLSKDDAVHNLTYTLGTSDTSSYPVAPCFSGSNSSSLFSSSDAGSSCTFSSDSTDSAGKSSMEYDRIFGTSGYMCPVVSSAVVPEGDNQSYLRQGSSWNPSSSGHDMDEAGKFARQYQGGYQAGGGAPVGGWETPSFSYADQGKYQGSSSRRNRSFGSSCKLTQQRRSTGRAFFYIRSIRERIQGGLGSGLGS

SEQ ID NO: 190455 - protein, 532 aa, Zea Mays
MASISGAAAAPSSAACRLRLRRHILLRPSHLRLRAPHSIADLSRSSSSSSSAPTRAQPLGSRPENGGGVRAVEKDPIKLWERYVEWLYQHKELGLFVDVSRMGFTEDFLRQMEPRMQRAFAAMRELEKGAIANPDEARMVGHYWLRDPALAPNSFLRSKIETTLDRILAFSQDVVSGKIQSPSGRFTSILSIGIGGSALGPQFVAEALAPDNPPLKIRFIDNTDPAGIDHQIAQLGPELATTLVIVISKSGGTPETRNGLLEVQKAFRDAGLQFSKQGVAITQENSLLDNTARIEGWLARFPMFDWVGGRTSEMSAVGLLPAALQGIDIKEMLAGAALMDEETRNTVVKENPAALLALCWYWASEGIGNKDMVVLPYKDSLLLLSRYLQQLVMESLGKEFDLDGNRVNQGLSVYGNKGSTDQHAYIQQLREGVHNFFVTFIEVLRDRPAGHDWELEPGVTCGDYLFGMLQGTRSALYANDRESISVTVQEVTPRAVGALVALYERAVGLYASLVLRLGKRQQEKCWPFRKGC

SEQ ID NO: 190456 - protein, 424 aa, Zea Mays
MASISGAAAAPSSAACRLRLRRHILLRPSHLRLRAPHSIADLSRSSSSSSSAPTRAQPLGSRPENGGGVRAVEKDPIKLWERYVEWLYQHKELGLFVDVSRMGFTEDFLRQMEPRMQRAFAAMRELEKGAIANPDEARMVGHYWLRDPALAPNSFLRSKIETTLDRILAFSQDVVSGKIQSPSGRFTSILSIGIGGSALGPQFVAEALAPDNPPLKIRFIDNTDPAGIDHQIAQLGPELATTLVIVISKSGGTPETRNGLLEVQKAFRDAGLQFSKQGVAITQENSLLDNTARIEGWLARFPMFDWVGGRTSEMSAVGLLPAALQGIDIKEMLAGAALMDEETRNTVVKENPAALLALCWYWASEGIGNKDMVVLPYKDSLLLLSRYLQQLVMESLGKEFDLDGNRVNQGLSVYGNKGSTDQHA

SEQ ID NO: 190457 - protein, 366 aa, Zea Mays
MDVEARKDSTPTTRGKVMRRLLVVLNCGMLALGTTAGPLLTRLYYDKGGQRQWLSAWLQSVGWPLLLLPVAASYAARRARDRAAPVLLTPPRVLLAAAGLGVATGADNFIYAYSLRYLPVSTSAILISTQLAFTVFFAFLIVRQRLTPATVNAVALLTAGAAVLGLHVSSDRPAGVTRGKYLLGFALALGAAALYGLILPLVELTYKRAAGGGRAVTYALVMEMQLVMGFFATVFCTVGMIIDKDFQAIPREARRYKLGEARYYAVLAWSAVLWQCFFLGAVGVIFCVHTLLAGILIAVFIPVTEVAAVIFLRERFSSEKGVALVLSLWGLASYSYGEWSEARAKKRKTRTEEGAAAAEALQQANP

SEQ ID NO: 190458 - protein, 73 aa, Zea Mays
MTPIDNCCCGYTSDSANRVQAACQEGGIPFLVRKACYLPVAHSRRSPIRLHLPSAPSLNHTALGLWSCKEEDI

SEQ ID NO: 190459 - protein, 400 aa, Zea Mays
MTSFRGIDNKVYYMLDLNNSAQLLNFSGCGNTLNCNHPVVKELVLDSLRHWVKEYHIDGFRFDLASVLCRGPDGSPLDAPPLIKEIAKDSVLSRCKIIAEPWDCGGLYLVGRFPNWDRWAEWNGKYRDDIRRFIKGDPGMKGVFATRVSGSADLYQVNNRKPYHSVNFVIAHDGFTLCDLVSYNSKHNDANGEGGRDGCNDNYSWNCGIEGETNDLNVLSLRSRQMKNFHVALMISQGTPMMLMGDEYGHTRYGNNNSYGHDTHINNFQWGQLEERKDGHFRFFSEMIKFRHNHPILRRDRFLNKNDVTWHENRWENQDSKFLAFTIHDHSSGGDIYLAFNAHEYFVDAVIPPPPHHKSWSRVVDTNLESPKDIVPEGVPFTGSGYRIAPYSSILLKAKP

SEQ ID NO: 190460 - protein, 527 aa, Zea Mays
MNVRAFTADESSRLAPAIRGSYLGVIDKIPHLLELGVNAVELLPVFEFDELELKRFPNPRDHMVNTWGYSTINFFAPMSRYASAGGGPVAASKELKQMVKAFHNSGIEVILDVVYNHTNEADDVNPYMTSFRGIDNKVYYMLDLNNSAQLLNFSGCGNTLNCNHPVVKELVLDSLRHWVKEYHIDGFRFDLASVLCRGPDGSPLDAPPLIKEIAKDSVLSRCKIIAEPWDCGGLYLVGRFPNWDRWAEWNGKYRDDIRRFIKGDPGMKGVFATRVSGSADLYQVNNRKPYHSVNFVIAHDGFTLCDLVSYNSKHNDANGEGGRDGCNDNYSWNCGIEGETNDLNVLSLRSRQMKNFHVALMISQGTPMMLMGDEYGHTRYGNNNSYGHDTHINNFQWGQLEERKDGHFRFFSEMIKFRHNHPILRRDRFLNKNDVTWHENRWENQDSKFLAFTIHDHSSGGDIYLAFNAHEYFVDAVIPPPPHHKSWSRVVDTNLESPKDIVPEGVPFTGSGYRIAPYSSILLKAKP

SEQ ID NO: 190461 - protein, 488 aa, Zea Mays
MELLPVFEFDELELKRFPNPRDHMVNTWGYSTINFFAPMSRYASAGGGPVAASKELKQMVKAFHNSGIEVILDVVYNHTNEADDVNPYMTSFRGIDNKVYYMLDLNNSAQLLNFSGCGNTLNCNHPVVKELVLDSLRHWVKEYHIDGFRFDLASVLCRGPDGSPLDAPPLIKEIAKDSVLSRCKIIAEPWDCGGLYLVGRFPNWDRWAEWNGKYRDDIRRFIKGDPGMKGVFATRVSGSADLYQVNNRKPYHSVNFVIAHDGFTLCDLVSYNSKHNDANGEGGRDGCNDNYSWNCGIEGETNDLNVLSLRSRQMKNFHVALMISQGTPMMLMGDEYGHTRYGNNNSYGHDTHINNFQWGQLEERKDGHFRFFSEMIKFRHNHPILRRDRFLNKNDVTWHENRWENQDSKFLAFTIHDHSSGGDIYLAFNAHEYFVDAVIPPPPHHKSWSRVVDTNLESPKDIVPEGVPFTGSGYRIAPYSSILLKAKP

SEQ ID NO: 190462 - protein, 748 aa, Zea Mays
MDSVGTNRPPLRPVAAAATRRSALLRPPSHLGLGNRFAETKLGIASGCGGGGGYFGKVQGFDALRSTTTKVQSGKAGRSVTKEMGHTSSGNEVPLKYSSGKAFPLGVSQVDDGLNFAIFSQHASSVTLCLNFPERGNQDDVDIVEFALDRQKNKTGDIWHVSVEGLPASGVLYGYRINGPQGWQQGHRFDDSVILLDPYAKLVYGRKHFAVEKEKPSQLFGTYDFDSSPFDWGDNYKLPNLPETDLVIYEMNVRAFTADESSRLAPAIRGSYLGVIDKIPHLLELGVNAVELLPVFEFDELELKRFPNPRDHMVNTWGYSTINFFAPMSRYASAGGGPVAASKELKQMVKAFHNSGIEVYYMLDLNNSAQLLNFSGCGNTLNCNHPVVKELVLDSLRHWVKEYHIDGFRFDLASVLCRGPDGSPLDAPPLIKEIAKDSVLSRCKIIAEPWDCGGLYLVGRFPNWDRWAEWNGKYRDDIRRFIKGDPGMKGVFATRVSGSADLYQVNNRKPYHSVNFVIAHDGFTLCDLVSYNSKHNDANGEGGRDGCNDNYSWNCGIEGETNDLNVLSLRSRQMKNFHVALMISQGTPMMLMGDEYGHTRYGNNNSYGHDTHINNFQWGQLEERKDGHFRFFSEMIKFRHNHPILRRDRFLNKNDVTWHENRWENQDSKFLAFTIHDHSSGGDIYLAFNAHEYFVDAVIPPPPHHKSWSRVVDTNLESPKDIVPEGVPFTGSGYRIAPYSSILLKAKP

SEQ ID NO: 190463 - protein, 768 aa, Zea Mays
MDSVGTNRPPLRPVAAAATRRSALLRPPSHLGLGNRFAETKLGIASGCGGGGGYFGKVQGFDALRSTTTKVQSGKAGRSVTKEMGHTSSGNEVPLKYSSGKAFPLGVSQVDDGLNFAIFSQHASSVTLCLNFPERGNQDDVDIVEFALDRQKNKTGDIWHVSVEGLPASGVLYGYRINGPQGWQQGHRFDDSVILLDPYAKLVYGRKHFAVEKEKPSQLFGTYDFDSSPFDWGDNYKLPNLPETDLVIYEMNVRAFTADESSRLAPAIRGSYLGVIDKIPHLLELGVNAVELLPVFEFDELELKRFPNPRDHMVNTWGYSTINFFAPMSRYASAGGGPVAASKELKQMVKAFHNSGIEVILDVVYNHTNEADDVNPYMTSFRGIDNKVYYMLDLNNSAQLLNFSGCGNTLNCNHPVVKELVLDSLRHWVKEYHIDGFRFDLASVLCRGPDGSPLDAPPLIKEIAKDSVLSRCKIIAEPWDCGGLYLVGRFPNWDRWAEWNGKYRDDIRRFIKGDPGMKGVFATRVSGSADLYQVNNRKPYHSVNFVIAHDGFTLCDLVSYNSKHNDANGEGGRDGCNDNYSWNCGIEGETNDLNVLSLRSRQMKNFHVALMISQGTPMMLMGDEYGHTRYGNNNSYGHDTHINNFQWGQLEERKDGHFRFFSEMIKFRHNHPILRRDRFLNKNDVTWHENRWENQDSKFLAFTIHDHSSGGDIYLAFNAHEYFVDAVIPPPPHHKSWSRVDIVPEGVPFTGSGYRIAPYSSILLKAKP

SEQ ID NO: 190464 - protein, 382 aa, Zea Mays
MLDLNNSAQLLNFSGCGNTLNCNHPVVKELVLDSLRHWVKEYHIDGFRFDLASVLCRGPDGSPLDAPPLIKEIAKDSVLSRCKIIAEPWDCGGLYLVGRFPNWDRWAEWNGKYRDDIRRFIKGDPGMKGVFATRVSGSADLYQVNNRKPYHSVNFVIAHDGFTLCDLVSYNSKHNDANGEGGRDGCNDNYSWNCGIEGETNDLNVLSLRSRQMKNFHVALMISQGTPMMLMGDEYGHTRYGNNNSYGHDTHINNFQWGQLEERKDGHFRFFSEMIKFRHNHPILRRDRFLNKNDVTWHENRWENQDSKFLAFTIHDHSSGGDIYLAFNAHEYFVDAVIPPPPHHKSWSRVVWILSDSANMFIPSNLLFSPRMFKCQVSSCKL

SEQ ID NO: 190465 - protein, 83 aa, Zea Mays
MLESDRLLNAPVIFYSADTVVFLCGSADAKLEYVASFPPSWRDEQGYDYRCLPELILKLSGSQRLSGTSACGTGKKNAEPSPA

SEQ ID NO: 190466 - protein, 50 aa, Zea Mays
MALGVLFHGAQLALDLAVAGMSLAVALGFFALITTLLCSAAFLHHSKPAA

SEQ ID NO: 190467 - protein, 140 aa, Zea Mays
MERRGIEPYSDTLAALSEGHSNSLQLDLAEEFLERISEIKPKHIGSFNALLSGCAIMNEPERAVRILAKMKHVNMKPTLRTYELLFSLFGNVNVPYEQGDVLSHVDVSKRISIIEMDMFNNGIQHSFVSMKNLDNQDPFF

SEQ ID NO: 190468 - protein, 854 aa, Zea Mays
MQRILSRAARRCTNSSAAFNSPHAQANAASVHSEDAPTCSNMITENDDFTWKTSFVRPMQSEVVNALRRGDRQRASLILSNFHHTKESLTKEDFSYILEYCAEAPDPLFVMETLELMEEKAIGMSKSIYRYVIRALSRGGYAKEVLHWLALLGEKESTHATTPIFNIFLNACGRANLKDAENCLEILENLFLGKSEITYCELLKLAVLQGNLPAAYDIWKECSRYYSPSIVTQRRFIRALTALGDLQSAYHILQHMVALAAQSCDYLRVSSKRRYRSSRLDIPVPALNEFEDLNLPSCQGKLATGEHLVDAQPELFDEKTRPGNNLSYKVVVDASVANTLKSAPSTVKQILRWAFNDVLHACVPFNNCQLAEHLFTEMQKLGLQPTSYTYDGFIKTVIAGKGIAYANKVINAMERRGIEPYSDTLAALSEGHSNSLQLDLAEEFLERISEIKPKHIGSFNALLSGCAIMNEPERAVRILAKMKHVNMKPTLRTYELLFSLFGNVNVPYEQGDVLSHVDVSKRISIIEMDMFNNGIQHSFVSMKNLIRAFGAEGMIEEMLRYLNIAENTLWNINPHQKSDLYSTALHALVDVKETHRAVKMFKIMRSCSLPTNISIYNTMIECCKWLPCFKSASALLSLMLRDGFNPTVVTFTSLLKVVLENDNFEGALDLLDICKIEGLQPGIQTFNTVLLRAYARGQIHVLEYILECIHRSKIQPDPSTLWYTFCAYEEHELYNTAIESLLVLSMRMISEDAGIPSEKRIVFEDLILSEEPDAEFRIIRAFQAGEEFLATALLNLRWCATMGATVSWSPEESLWAMRLAASYDANKRPHINPSDAPKSWGRNPLNRPYWEANG

SEQ ID NO: 190469 - protein, 568 aa, Zea Mays
MNLKISTCHHAKGSWLPANIWLMLNLSYLMRKLGQLCSGNNLSYKVVVDASVANTLKSAPSTVKQILRWAFNDVLHACVPFNNCQLAEHLFTEKLGLQPTSYTYDGFIKTVIAGKGIAYANKVINAMERRGIEPYSDTLAALSEGHSNSLQLDLAEEFLERISEIKPKHIGSFNALLSGCAIMNEPERAVRILAKMKHVNMKPTLRTYELLFSLFGNVNVPYEQGDVLSHVDVSKRISIIEMDMFNNGIQHSFVSMKNLIRAFGAEGMIEEMLRYLNIAENTLWNINPHQKSDLYSTALHALVDVKETHRAVKMFKIMRSCSLPTNISIYNTMIECCKWLPCFKSASALLSLMLRDGFNPTVVTFTSLLKVVLENDNFEGALDLLDICKIEGLQPGIQTFNTVLLRAYARGQIHVLEYILECIHRSKIQPDPSTLWYTFCAYEEHELYNTAIESLLVLSMRMISEDAGIPSEKRIVFEDLILSEEPDAEFRIIRAFQAGEEFLATALLNLRWCATMGATVSWSPEESLWAMRLAASYDANKRPHINPSDAPKSWGRNPLNRPYWEANG

SEQ ID NO: 190470 - protein, 301 aa, Zea Mays
MIEEMLRYLNIAENTLWNINPHQKSDLYSTALHALVDVKETHRAVKMFKIMRSCSLPTNISIYNTMIECCKWLPCFKSASALLSLMLRDGFNPTVVTFTSLLKVVLENDNFEGALDLLDICKIEGLQPGIQTFNTVLLRAYARGQIHVLEYILECIHRSKIQPDPSTLWYTFCAYEEHELYNTAIESLLVLSMRMISEDAGIPSEKRIVFEDLILSEEPDAEFRIIRAFQAGEEFLATALLNLRWCATMGATVSWSPEESLWAMRLAASYDANKRPHINPSDAPKSWGRNPLNRPYWEANG

SEQ ID NO: 190471 - protein, 552 aa, Zea Mays
METLELMEEKAIGMSKSIYRYVIRALSRGGYAKEALHWLALLGEKESTHATTPIFNIFLNACGRANLKDAENCLEILENLFLGKSEITYCELLKLAVLQGNLPAAYDIWKECSRYYSPSIVTQRRFIRALTALGDLQSAYHILQHMVALAAQSCDYLRVSSKRRYRSSRLDIPVPALNEFEDLNLPSCQGKLATGEHLVDAQPELFDEKTRPGNNLSYKVVVDASVANTLKSAPSTVKQILRWAFNDVLHACVPFNNCQLAEHLFTEMQKLGLQPTSYTYDGFIKTVIAGKGIAYANKVINAMERRGIEPYSDTLAALSEGHSNSLQLDLAEEFLERISEIKPKHIGSFNALLSGCAIMNEPERAVRILAKMKHVNMKPTLRTYELLFSLFGNVNVPYEQGDVLSHVDVSKRISIIEMDMFNNGIQHSFVSMKNLIRAFGAEGMIEEMLRYLNIAENTLWNINPHQKSDLYSTALHALVDVKETHRAVKMFKIMRSCSLPTNISIYNTMIECCKWLPCFKSASALLSLMLRDGFNPTVVTFTSLLKIGCIRK

SEQ ID NO: 190472 - protein, 684 aa, Zea Mays
MRRRANLKDAENCLEILENLFLGKSEITYCELLKLAVLQGNLPAAYDIWKECSRYYSPSIVTQRRFIRALTALGDLQSAYHILQHMVALAAQSCDYLRVSSKRRYRSSRLDIPVPALNEFEDLNLPSCQGKLATGEHLVDAQPELFDEKTRPGNNLSYKVVVDASVANTLKSAPSTVKQILRWAFNDVLHACVPFNNCQLAEHLFTEMQKLGLQPTSYTYDGFIKTVIAGKGIAYANKVINAMERRGIEPYSDTLAALSEGHSNSLQLDLAEEFLERISEIKPKHIGSFNALLSGCAIMNEPERAVRILAKMKHVNMKPTLRTYELLFSLFGNVNVPYEQGDVLSHVDVSKRISIIEMDMFNNGIQHSFVSMKNLIRAFGAEGMIEEMLRYLNIAENTLWNINPHQKSDLYSTALHALVDVKETHRAVKMFKIMRSCSLPTNISIYNTMIECCKWLPCFKSASALLSLMLRDGFNPTVVTFTSLLKVVLENDNFEGALDLLDICKIEGLQPGIQTFNTVLLRAYARGQIHVLEYILECIHRSKIQPDPSTLWYTFCAYEEHELYNTAIESLLVLSMRMISEDAGIPSEKRIVFEDLILSEEPDAEFRIIRAFQAGEEFLATALLNLRWCATMGATVSWSPEESLWAMRLAASYDANKRPHINPSDAPKSWGRNPLNRPYWEANG

SEQ ID NO: 190473 - protein, 477 aa, Zea Mays
MQKLGLQPTSYTYDGFIKTVIAGKGIAYANKVINAMERRGIEPYSDTLAALSEGHSNSLQLDLAEEFLERISEIKPKHIGSFNALLSGCAIMNEPERAVRILAKMKHVNMKPTLRTYELLFSLFGNVNVPYEQGDVLSHVDVSKRISIIEMDMFNNGIQHSFVSMKNLIRAFGAEGMIEEMLRYLNIAENTLWNINPHQKSDLYSTALHALVDVKETHRAVKMFKIMRSCSLPTNISIYNTMIECCKWLPCFKSASALLSLMLRDGFNPTVVTFTSLLKVVLENDNFEGALDLLDICKIEGLQPGIQTFNTVLLRAYARGQIHVLEYILECIHRSKIQPDPSTLWYTFCAYEEHELYNTAIESLLVLSMRMISEDAGIPSEKRIVFEDLILSEEPDAEFRIIRAFQAGEEFLATALLNLRWCATMGATVSWSPEESLWAMRLAASYDANKRPHINPSDAPKSWGRNPLNRPYWEANG

SEQ ID NO: 190474 - protein, 331 aa, Zea Mays
MQRILSRAARRCTNSSAAFNSPHAQANAASVHSEDAPTCSNMITENDDFTWKTSFVRPMQSEVVNALRRGDRQRASLILSNFHHTKESLTKEDFSYILEYCAEAPDPLFVMETLELMEEKAIGMSKSIYRYVIRALSRGGYAKEALHWLALLGEKESTHATTPIFNIFLNACGRANLKDAENCLEILENLFLGKSEITYCELLKLAVLQGNLPAAYDIWKECSRYYSPSIVTQRRFIRALTALGDLQSAYHILQHMVALAAQSCDYLRVSSKRRYRSSRLDIPVPALNEFEDLNLPSCQGKLATGEHLVDAQPELFDEKTRPALFRQQSFL

SEQ ID NO: 190475 - protein, 442 aa, Zea Mays
METLELMEEKAIGMSKSIYRYVIRALSRGGYAKEALHWLALLGEKESTHATTPIFNIFLNACGRANLKDAENCLEILENLFLGKSEITYCELLKLAVLQGNLPAAYDIWKECSRYYSPSIVTQRRFIRALTALGDLQSAYHILQHMVALAAQSCDYLRVSSKRRYRSSRLDIPVPALNEFEDLNLPSCQGKLATGEHLVDAQPELFDEKTRPGNNLSYKVVVDASVANTLKSAPSTVKQILRWAFNDVLHACVPFNNCQLAEHLFTEMQKLGLQPTSYTYDGFIKTVIAGKGIAYANKVINAMERRGIEPYSDTLAALSEGHSNSLQLDLAEEFLERISEIKPKHIGSFNALLSGCAIMNEPERAVRILAKMKHVNMKPTLRTYELLFSLFGNVNVPYEQGDVLSHVDVSKRISIIEMDMFNNGIQHSFVSMKNLDNQDPFF

SEQ ID NO: 190476 - protein, 287 aa, Zea Mays
MILHGRLVLLDPCNQKSSMPSVEFVMETLELMEEKAIGMSKSIYRYVIRALSRGGYAKELAVLQGNLPAAYDIWKECSRYYSPSIVTQRRFIRALTALGDLQSAYHILQHMVALAAQSCDYLRVSSKRRYRSSRLDIPVPALNEFEDLNLPSCQGKLATGEHLVDAQPELFDEKTRPGNNLSYKVVVDASVANTLKSAPSTVKQILRWAFNDVLHACVPFNNCQLAEHLFTEMQKLGLQPTSYTYDGFIKTVIAGKGIAYANKVDDCMDARVDQDPISRPNRRPNRD

SEQ ID NO: 190477 - protein, 410 aa, Zea Mays
MRNPKEVEKTEYNEFYKKTFNEFLDPLAYTHFTTEGEVEFRSVLYVPGMAPLSNEEIMNPKTKNIRLYVKRVFISDDFDGELFPRYLSFVKGVVDSNDLPLNVSREILQESRIVRIMRKRLVRKTFDMIQEIAEKDGKEDYNKFWESFGKFMKLGCIEDTGNHKRLAPLLRFYSSKNETDLISLDQYVENMPENQKAIYYIATDSLQSAKTAPFLEKLVQKDIEVLYLIEPIDEVAIQNLQTYKEKKFVDISKEDLELGDEDEDKEKESKQEYTLLCDWIKQQLGDKVAKVQISKRLSSSPCVLVSGKFGWSANMERLMKAQTLGDTSSLEFMRGRRIFEINPDHPIIKDLNAACKNEPESTEAKRAAELLYEAALISSGYTVSAANPRACCWPIYDCEYDVIVHLCYPA

SEQ ID NO: 190478 - protein, 401 aa, Zea Mays
MAPLSNEEIMNPKTKNIRLYVKRVFISDDFDGELFPRYLSFVKGVVDSNDLPLNVSREILQESRIVRIMRKRLVRKTFDMIQEIAEKDGKEDYNKFWESFGKFMKLGCIEDTGNHKRLAPLLRFYSSKNETDLISLDQYVENMPENQKAIYYIATDSLQSAKTAPFLEKLVQKDIEVLYLIEPIDEVAIQNLQTYKEKKFVDISKEDLELGDEDEDKEKESKQEYTLLCDWIKQQLGDKVAKVQISKRLSSSPCVLVSGKFGWSANMERLMKAQTLGDTSSLEFMRGRRIFEINPDHPIIKDLNAACKNEPESTEAKRAAELLYEAALISSGYTPDSPAELGGKIYEMMTMALGGRWGRLETEEAEVIASIDDADSSEGATTTTEVVEPSEVRTESDPWKD

SEQ ID NO: 190479 - protein, 264 aa, Zea Mays
MLRVELPMIREACLRVLVLSTVFLKEAAAFGLCLSEIGDMMSRQFTAKEEEPSQLELLCMETRKWVEERELFLPDEAGVEDGDDDFTQFPLDSDAFEPPAFCKFGSVKTSSRNPLSKLDECDEEDGDLSEEEGEHGDVLTSGALPQKVPPISKLSSSMKGLGFIGKSKPYRTGGVPKGKVTGRTNYSGKASEHQSGSRSANELLPPSASFVKLSDMSRKEWSAFLEKFQELLPSALRTRKHSAGVGQRPMPRLGTCMEPVEEVV

SEQ ID NO: 190480 - protein, 154 aa, Zea Mays
MHARLQQHGGSRAHEDEVELHRPRDVPLPKISPGYAYPWWKEKVIDSDAKRKDGLCPLTPEETALVLQALGIDRGYQIYIAAGEIYGGQRRMAALTSAYPNVVRKETLLPWEVGLFQNHSSQMAALDYMVSLESDVFIPTYDGNMAKVVEGHRR

SEQ ID NO: 190481 - protein, 269 aa, Zea Mays
MQRLRCRVNYNALRFTPEIEDLGRRLVRALRRNGPFVVLHLRYEMDMLAFSGCTHGCSSMEAQELTKMRYAYPWWKEKVIDSDAKRKDGLCPLTPEETALVLQALGIDRGYQIYIAAGEIYGGQRRMAALTSAYPNVVRKETLLPWEVGLFQNHSSQMAALDYMVSLESDVFIPTYDGNMAKVVEGHRRYLGFRKTVLLDRRRIVELVDEYRNGTLRWTDFSSAVMASHTSRMGEPSRRQTVPDRPKEEDYFYANPHECLHQPEDVSAL

SEQ ID NO: 190482 - protein, 396 aa, Zea Mays
MVSCNGGLNQMRAAICDMVTIARYLNVTLIVPELDKASFWADPSDFQDIFDVDYFIASLRDEVRILKQLPPRLKRRVEMGSLRSLPPVSWSDIGYYRRQILPLVKKYKVVHLNRTDARLANNGLPVEMQRLRCRVNYNALRFTPEIEDLGRRLVRALRRNGPFVVLHLRYEMDMLAFSGCTHGCSSMEAQELTKMRYAYPWWKEKVIDSDAKRKDGLCPLTPEETALVLQALGIDRGYQIYIAAGEIYGGQRRMAALTSAYPNVVRKETLLPWEVGLFQNHSSQMAALDYMVSLESDVFIPTYDGNMAKVVEGHRRYLGFRKTVLLDRRRIVELVDEYRNGTLRWTDFSSAVMASHTSRMGEPSRRQTVPDRPKEEDYFYANPHECLHQPEDVSAL

SEQ ID NO: 190483 - protein, 379 aa, Zea Mays
MVTIARYLNVTLIVPELDKASFWADPSDFQDIFDVDYFIASLRDEVRILKQLPPRLKRRVEMGSLRSLPPVSWSDIGYYRRQILPLVKKYKVVHLNRTDARLANNGLPVEMQRLRCRVNYNALRFTPEIEDLGRRLVRALRRNGPFVVLHLRYEMDMLAFSGCTHGCSSMEAQELTKMRYAYPWWKEKVIDSDAKRKDGLCPLTPEETALVLQALGIDRGYQIYIAAGEIYGGQRRMAALTSAYPNVVRKETLLPWEVGLFQNHSSQMAALDYMVSLESDVFIPTYDGNMAKVVEGHRRYLGFRKTVLLDRRRIVELVDEYRNGTLRWTDFSSAVMASHTSRMGEPSRRQTVPDRPKEEDYFYANPHECLHQPEDVSAL

SEQ ID NO: 190484 - protein, 277 aa, Zea Mays
MVFVIESDNLREGLWPIRKRVDKVQYFLEHHNGFFYILTNAPVNDTETTTEGYYLARCRAEKSLVDRWQDMDIFHDNLVLFLRKNGTPLFCSISMPIDVDVQEPKELDDLNPWFFPIPSELCSIVAGSNNDFMSSTYQLVISSPVIPDLTVDYDLRKKTFTILHQEEVTTISANLGGLGFQSNVSSIQQNMQLVKTSQNWSDLSKLFSCERVEVISHDGVSIPLVILYSWGAHCHGESPGILYGYGAYGEDLDKSWCSERLSLLSRGWVLAFADVRL

SEQ ID NO: 190485 - protein, 583 aa, Zea Mays
MLCRRPCPGVFLRLFATSCRRSSLHPSQPHLRTATALPTLPVAKKVPFNVSAHGRSWSDPYHWMRDTSDPDLAVLLAAENAYADAFVGSAGGGGLRAHLAAEMRARLPASTATPPQLWGPWLYYQYVPEGKEYPVLSRKLRPSSGLVGTLLDYLSGSEKEQVLLDWNEVAEKNGYVHIGSCRISPDHRFLAYTVDTSGGELFSLEVKDLLSEHVIFSSPDKGVVSLAWSGNNESLFYTVCDETLRPNQVFCKKLQSDEAGFLVFTEKDVNCCVDITSTKDFKYMTVNSNTRTSSEVFVIESDNLREGLWPIRKRVDKVQYFLEHHNGFFYILTNAPVNDTETTTEGYYLARCRAEKSLVDRWQIVTVPDSDCTIQDMDIFHDNLVLFLRKNGTPLFCSISMPIDVDVQEPKELDDLNPWFFPIPSELCSIVAGSNNDFMSSTYQLVISSPVIPDLTVDYDLRKKTFTILHQEEVTTISANLGGLGFQSNVSSIQQNMQLVKTSQNWSDLSKLFSCERVEVISHDGVSIPLVILYSWGAHCHGESPGILYGYGAYGEDLDKSWCSERLSLLSRGWVLAFADVRL

SEQ ID NO: 190486 - protein, 772 aa, Zea Mays
MLCRRPCPGVFLRLFATSCRRSSLHPSQPHLRTATALPTLPVAKKVPFNVSAHGRSWSDPYHWMRDTSDPDLAVLLAAENAYADAFVGSAGGGGLRAHLAAEMRARLPASTATPPQLWGPWLYYQYVPEGKEYPVLSRKLRPSSGLVGTLLDYLSGSEKEQVLLDWNEVAEKNGYVHIGSCRISPDHRFLAYTVDTSGGELFSLEVKDLLSEHVIFSSPDKGVVSLAWSGNNESLFYTVCDETLRPNQVFCKKLQSDEAGFLVFTEKDVNCCVDITSTKDFKYMTVNSNTRTSSEVFVIESDNLREGLWPIRKRVDKVQYFLEHHNGFFYILTNAPVNDTETTTEGYYLARCRAEKSLVDRWQDMDIFHDNLVLFLRKNGTPLFCSISMPIDVDVQEPKELDDLNPWFFPIPSELCSIVAGSNNDFMSSTYQLVISSPVIPDLTVDYDLRKKTFTILHQEEVTTISANLGGLGFQSNVSSIQQNMQLVKTSQNWSDLSKLFSCERVEVISHDGVSIPLVILYSWGAHCHGESPGILYGYGAYGEDLDKSWCSERLSLLSRGWVLAFADVRGGGDLSWHMAGTKANKMHSIQDFAACGRHLIKQGFVHQNRLCAIGCSAGGLLVGAVINMLPDLFSAAVLKVPFLDICNTMLDPTLPLTVLDYEEFGDPNSPDEFEAISSYSPYDNLAPDVCYPPVLVTASFNDTRVGVWEAAKWVAKVRDVACPSCSQSVILKTNMQSGHFGEGGRFTHCDETAFEYAFLMKALGLDDVAMM

SEQ ID NO: 190487 - protein, 730 aa, Zea Mays
MLCRRPCPGVFLRLFATSCRRSSLHPSQPHLRTATALPTLPVAKKVPFNVSAHGRSWSDPYHWMRDTSDPDLAVLLAAENAYADAFVGSAGGGGLRAHLAAEMRARLPASTATPPQLWGPWLYYQYVPEGKEYPVLSRKLRPSSGLVGTLLDYLSGSEKEQVLLDWNEVAEKNGYVHIGSCRISPDHRFLAYTVDTSGGELFSLEVKDLLSEHVIFSSPDKGVVSLAWSGNNESLFYTVCDETLRPNQVFCKKLQSDEAGFLVFTEKDVNCCVDITSTKDFKYMTVNSNTRTSSEVFVIESDNLREGLWPIRKRVDKVQYFLEHHNGFFYILTNAPVNDTETTTEGYYLARCRAEKSLVDRWQIVTVPDSDCTIQDMDIFHDNLVLFLRKNGTPLFCSISMPIDVDVQEPKELDDLNPWFFPIPSELCSIVAGSNNDFMSSTYQLVISSPVIPDLTVDYDLRKKTFTILHQEEVTTISANLGGLGFQSNVSSIQQNMQLVKTSQNWSDLSKLFSCERVEVISHDGVSIPLVILYSWGAHCHGESPGILYGYGAYGEDLDKSWCSERLSLLSRGWVLAFADVRGGGDLSWHMAGTKANKMHSIQDFAACGRHLIKQGFVHQNRLCAIGCSAGGLLVGAVINMLPDLFSAAVLKVPFLDICNTMLDPTLPLTVLDYEEFGDPNSPDEFEAISSYSPYDNLAPDVCYPPVLVTASFNDTRVGVWEAAKWVAKG

SEQ ID NO: 190488 - protein, 289 aa, Zea Mays
MVFVIESDNLREGLWPIRKRVDKVQYFLEHHNGFFYILTNAPVNDTETTTEGYYLARCRAEKSLVDRWQIVTVPDSDCTIQDMDIFHDNLVLFLRKNGTPLFCSISMPIDVDVQEPKELDDLNPWFFPIPSELCSIVAGSNNDFMSSTYQLVISSPVIPDLTVDYDLRKKTFTILHQEEVTTISANLGGLGFQSNVSSIQQNMQLVKTSQNWSDLSKLFSCERVEVISHDGVSIPLVILYSWGAHCHGESPGILYGYGAYGEDLDKSWCSERLSLLSRGWVLAFADVRL

SEQ ID NO: 190489 - protein, 422 aa, Zea Mays
MIVTVPDSDCTIQDMDIFHDNLVLFLRKNGTPLFCSISMPIDVDVQEPKELDDLNPWFFPIPSELCSIVAGSNNDFMSSTYQLVISSPVIPDLTVDYDLRKKTFTILHQEEVTTISANLGGLGFQSNVSSIQQNMQLVKTSQNWSDLSKLFSCERVEVISHDGVSIPLVILYSWGAHCHGESPGILYGYGAYGEDLDKSWCSERLSLLSRGWVLAFADVRGGGDLSWHMAGTKANKMHSIQDFAACGRHLIKQGFVHQNRLCAIGCSAGGLLVGAVINMLPDLFSAAVLKVPFLDICNTMLDPTLPLTVLDYEEFGDPNSPDEFEAISSYSPYDNLAPDVCYPPVLVTASFNDTRVGVWEAAKWVAKVRDVACPSCSQSVILKTNMQSGHFGEGGRFTHCDETAFEYAFLMKALGLDDVAMM

SEQ ID NO: 190490 - protein, 300 aa, Zea Mays
MLCRRPCPGVFLRLFATSCRRSSLHPSQPHLRTATALPTLPVAKKVPFNVSAHGRSWSDPYHWMRDTSDPDLAVLLAAENAYADAFVGSAGGGGLRAHLAAEMRARLPASTATPPQLWGPWLYYQYVPEGKEYPVLSRKLRPSSGLVGTLLDYLSGSEKEQVLLDWNEVAEKNGYVHIGSCRISPDHRFLAYTVDTSGGELFSLEVKDLLSEHVIFSSPDKGVVSLAWSGNNESLFYTVCDETLRPNQVFCKKLQSDEAGFLVFTEKDVNCCVDITSTKDFKYMTVNSNTRTSSEEGFCN

SEQ ID NO: 190491 - protein, 720 aa, Zea Mays
MIHVDGTNKFVTEDNIFSEDEITNFQQHILEIIGSTQMAGRRFTQNGSSSTQIYAQMTLPYVSNQGGYMDLMMEQIRNSQGEPVSELGNEMQSALCTQNETMNKNLLVAPCETYTQMILEEDSTLANADISKFGYMDLMMEQIYNSQGESVSEVGNEMQSGLCTQNETMNNNLIGAPCETYTQMILEEDSPLANADISKETFGECNEADTSKYGEAVYHGDLFEIMHVQQLTECAQNDDGKETKTSRDEELTEDQIDAFIMSEQIAATEGNNASIDSKYTPQVGMEFKIRGDAEHFLFFYGFLAGFKPAITHTFRTSNKKRSNEVTKIWKRNYKNIEPQQHTYTEDDSYIVLSERRNIGIPEDFEDIVNYSLTVSEFERDWKQMVEDYHLENNKYFSKMWETRARFIPVYFKNDFFPFLQSTGRSEGTNSRFKDNVTSTYSVISFLREYQRIVEQVNVSEEYEDNESNRKRPKELMFGYTIERQAQEVYNRNIFKKFQFQLQSTPRLSYNRTSNLHTFEVYPKSNQEETPHKIRRYLVMANLTYGMEEFTCVCGKFDKDGILCSHILKVIIEEGLTKIPEQYILTRWKKKQKQIDGPLLRASMPTHPVLRHNLLSRKAALLTSAAAKTEKTMEFICEELDKLQEKDLRQDKEDNAAKHTGPIVENLHNPEAVKQKGRPKKPTRLKPLVEEIRIKMKKAEQRKTRKQAMQQQAHKERRRRR

SEQ ID NO: 190492 - protein, 338 aa, Zea Mays
MLRQMPYPDGANLWNVRPFHNIHPLGFRRLLLDMLKTLLPKNCCPSLHDSPYTLHDSLILYKGRIWLGNNRDLHLKVISAMHSSAIEGHSGILVTYSRLKQLFHWLGIKQTVHDYIRSCSICQQAKPDRVKYPGLLMPLPVPPHAWHTISMDFIEDLPMSTTFSCTMVVVDKWSKYGHFIPLAHPFSAPKVAKVFLDNVYKLHGLPVVIISDRDKIFTSAFWQEPFLLSDTKLNMSSAYHPQSNGQTECVNQCLETFLRCFVHACPKKWSQWLAVEEFWYISCAHVGLGKSPFEVLYGHTPRHFGITDVAAISILDLQTWMQERELMQKLIKQHLLRA

SEQ ID NO: 190493 - protein, 419 aa, Zea Mays
MAGASNHGSLTDEWLPPPTPSPRSLVSSFLNEEFSPGPFSGLFSKHGANRPHDQSEKGRGALNSSEEFPTHAVKDPFQKGFSLEPNLFSANHISNSNGGLAERRAARAGFSVPKIDTSRVGSSAVIRSPVSIPPGLSPTTLLESPVFLYNKMAQPSPTTGTLPFLTATNDKSTIPPATKITEDSAVYNDVFSFQPHLGSKETGFSTAEKDYGAYQQKHSLWNIHQQESSLQSSFTAVKDNTSATIGETKTSSSMFSDSHYSADQQQGEETNMKEQGKGVEARSAAFLPAPVHNDASLLDSQDAVDVSSTLSNEEDERATHGTVSIECEGDEDETESKRRKLELDALGAIAIATTSTTSTIDMGPASSRAVREPRVVVQTTSEVDILDDGYRWRKYGQKELLQVYTPWLFSAQACGKSIT

SEQ ID NO: 190494 - protein, 399 aa, Zea Mays
MAGASNHGSLTDEWLPPPTPSPRSLVSSFLNEEFSPGPFSGLFSKHGANRPHDQSEKGRGALNSSEEFPTHAVKDPFQKGFSLEPNLFSANHISNSNGGLAERRAARAGFSVPKIDTSRVGSSAVIRSPVSIPPGLSPTTLLESPVFLYNKMAQPSPTTGTLPFLTATNDKSTIPPATKITEDSAVYNDVFSFQPHLGSKETGFSTAEKESSLQSSFTAVKDNTSATIGETKTSSSMFSDSHYSADQQQGEETNMKEQGKGVEARSAAFLPAPVHNDASLLDSQDAVDVSSTLSNEEDERATHGTVSIECEGDEDETESKRRKLELDALGAIAIATTSTTSTIDMGPASSRAVREPRVVVQTTSEVDILDDGYRWRKYGQKVVKGNPNPRSHFHYHFLH

SEQ ID NO: 190495 - protein, 108 aa, Zea Mays
MGKFCNHPKKIFIWNVRGLNSPSKQQSVRTFVDSVGADIVCLQETNIQNISRGTIFAILGVTFEEFLFLPSFGASGGILLAWKRHVQATGHNRVGSYSVQFQQSNGQP

SEQ ID NO: 190496 - protein, 139 aa, Zea Mays
MEAAKERQQRKAAGEGDSTTVQLPTETSPYVQYEGLEDYKMRGYPTAAPALRRPPSPALPSPWRSRSAATTSSLSETWEETEEGASGAPGTRPPTPSTATACRSFSLALAGSRPGARVSRRPGHMAEPLVNVSLSVCWM

SEQ ID NO: 190497 - protein, 357 aa, Zea Mays
MVTASLFSLPSLRVLSRTSAHGPRFQILAARKPVESSTATSGSRRGGSKGAGLLSVLDRAMADEEEYRRARAQVQRKGVEVEGYAIEGISVGGHETCITVPSLNVAFDIGRGPQFAVSQDYLFITHAHLDHIGGLPMYIATRGLYNLKPPTVFVPPCIRDDVEDLLQVHRRTSQIELKVELVALDLGETYEIRNDLVARPFQTYHTIPSQGYVIYSIRRKLKKQYAHLKGSQIMKLKQSGTEITDTILYPEVAFTGDTKSDFILDPRNADALRAKVLITEATFLDDHVDVEHAREHGHMHLSEIMEHFQWFRNETIVLTHFSNRYSLEDIRQAVSRLQPKLNSKVVALTEGFKSDYR

SEQ ID NO: 190498 - protein, 505 aa, Zea Mays
MGTPLLIPLLVTLQLFTTSSPAVASSHISAIISQSGLDFAKDLLVSHAVATLTPMNVPDIERTMSIPLVGTVRMAASGIVLHGLAVTNSTVAVGDAGVVVAASLASANLTMEWNYSYDAWIVTISDSGNASVQVEGMEVGVSMVMKNQNGSIKLSVTECSCYMEDLDITLNGGASWFYQVFIDGFSNHIISSVENAIKNKVMEGALKLDSFLGNLPKKIDLDSVAAMNVTVVNDPIFKSSSVEFDIDGLFIPSDETAPRDMHLGDTQFALPLGSSSKMLWISLDEDVFNSVSALYFKAGLLQRMVDKIPDQFFLNTASWRFLVPRLYREFPDDNMLLNISAVSPPSVRINSVDVYGAAAVSENNLVGRVELDYFSFTLKWSKVGKLHTILVQTVLRILLKKLFVPYVNSYLKHGFRLPIIKGFSVTDAYILTSYSRMIVSCDVAFIEPEVLSPVQESNTNEDLSYEVLSPVQESKTNEELTNEDLSFEVLSSLLLGSAKTSQPTA

SEQ ID NO: 190499 - protein, 310 aa, Zea Mays
MGTPLLIPLLVTLQLFTTSSPAVASSHISAIISQSGLDFAKDLLVSHAVATLTPMNVPDIERTMSIPLVGTVRMAASGIVLHGLAVTNSTVAVGDAGVVVAASLASANLTMEWNYSYDAWIVTISDSGNASVQVEGMEVGVSMVMKNQNGSIKLSVTECSCYMEDLDITLNGGASWFYQVFIDGFSNHIISSVENAIKNKVMEGALKLDSFLGNLPKKIDLDSVAAMNVTVVNDPIFKSSSVEFDIDGLFIPSDETAPRDMHLGDTQFALPLGSSSKMLWISLDEDVFNSVSALYFKLEIFGSSIVSRVS

SEQ ID NO: 190500 - protein, 407 aa, Zea Mays
MGTPLLIPLLVTLQLFTTSSPAVASSHISAIISQSGLDFAKDLLVSHAVATLTPMNVPDIERTMSIPLVGTVRMAASGIVLHGLAVTNSTVAVGDAGVVVAASLASANLTMEWNYSYDAWIVTISDSGNASVQVEGMEVGVSMVMKNQNGSIKLSVTECSCYMEDLDITLNGGASWFYQVFIDGFSNHIISSVENAIKNKVMEGALKLDSFLGNLPKKIDLDSVAAMNVTVVNDPIFKSSSVEFDIDGLFIPSDETAPRDMHLGDTQFALPLGSSSKMLWISLDEDVFNSVSALYFKAGLLQRMVDKIPDQFFLNTASWRFLVPRLYREFPDDNMLLNISAVSPPSVRINVGRIDATVDLDITVNVLDFGEIVPVACLSVRLMFMELQQYQRIILLGEWNWTISHLP

SEQ ID NO: 190501 - protein, 205 aa, Zea Mays
MGHRATDTGPHHHYHPTHTLFSPRHSQPAPDTSTRQSLLATYRATYETHTHTERDASNNRSVLNSKIPCHTAMYARERLPRHARTPIPWALAAAAACARPHSLAFSGSSGAATSSASAAGSWGPAGAGASGSSAASSSGAAASASATGSAAAGSSAPAGGAAAASSSAAASCSAAGVSSGPAGAARVSDQLRVRSIELGCVRQMP

SEQ ID NO: 190502 - protein, 833 aa, Zea Mays
MSAALACLRRTSKRRRDAPDHALPPLLKQPLMAHAGAEAAESSSSSSASASGVDGASAAAAAASASSPSASPRVVHFFVRATDSRTIAMHAGWDDTVGAVLDHLGACGYGRDLRLLYAGRQLALDSTLAELRLPPDSTLHLLARLRSTQHPHAWQLASHIASTAAIAESEPSRMPSAAFSLDELVKEFILRAHRANLRLSRYDRAATVEDRAAADHTAEYLEIFLQAGAALALVRLYLSKSPFRSYAESAIKCFVPTDPSSLPMDLLIVLLEFCRLLSLAAGRNELLYRSCRRTLASALSTRPKLPPSMNSPTRLIEQVLPFARETVDMVLDGLASMPMIISPSDLDEFSNFLKVMCQQARRWISDEGPIPSIFYSRESQHGDTWIWRFHIMSMYMLKRLDECLKTLEMDLPLSSESIGVMESQTIWAARSHILVMLTELDFIAAIYEDVGHNLQLVLLAHKAPLNALVRCSKRNERLHWLVKHKNLLCFEARRSLVFMMLPEGKDDFGELHEMLIDRSHLLDESFNYIAQAEQAELHGALFMEFKNEEATGPGVLREWFCLVCQALFSPKQVLFSPCPEDKRRFYLNETSAVDPLHLKYFTFAGRIIGLALMHKVQVGVVLDRTLFLHLAGRSITLEDISVADPVKYASCKKILEMDAAEIDNLYLTFSRGAHELGTEKIIDLCPGGEDVSVNIGNRKHYIDLLIKNIFVDSISSQLTHFAEGFADILVNPKRREELFECLDLEDFDRLLGGSNNAINLQDWNSVKYLPSDGFCGLSSKLYIYKTSDSPDRLPSSQTCFYRLCLPPYTSMKMMENQLQKITQEHVSCSFGAW

SEQ ID NO: 190503 - protein, 627 aa, Zea Mays
MSAALACLRRTSKRRRDAPDHALPPLLKQPLMAHAGAEAAESSSSSSASASGVDGASAAAAAASASSPSASPRVVHFFVRATDSRTIAMHAGWDDTVGAVLDHLGACGYGRDLRLLYAGRQLALDSTLAELRLPPDSTLHLLARLRSTQHPHAWQLASHIASTAAIAESEPSRMPSAAFSLDELVKEFILRAHRANLRLSRYDRAATVEDRAAADHTAEYLEIFLQAGAALALVRLYLSKSPFRSYAESAIKCFVPTDPSSLPMDLLIVLLEFCRLLSLAAGRNELLYRSCRRTLASALSTRPKLPPSMNSPTRLIEQVLPFARETVDMVLDGLASMPMIISPSDLDEFSNFLKVMCQQARRWISDEGPIPSIFYSRESQHGDTWIWRFHIMSMYMLKRLDECLKTLEMDLPLSSESIGVMESQTIWAARSHILVMLTELDFIAAIYEDVGHNLQLVLLAHKAPLNALVRCSKRNERLHWLVKHKNLLCFEARRSLVFMMLPEGKDDFGELHEMLIDRSHLLDESFNYIAQAEQAELHGALFMEFKNEEATGPGVLREWFCLVCQALFSPKQVLFSPCPEDKRRFYLNESQEHVPQDEAHEGCCDEFVSGLGRRLPVNYGCWIVVFV

SEQ ID NO: 190504 - protein, 145 aa, Zea Mays
MDRSHRPGRRGGTVVLDVGNSAVIVVVESPAAPGARRAAADEAVAAAEGAGVVLERALVLELGAAEAVPEPAAVLLVRAPVALDGEGLAAAAAEEGLEAVLALVVRLQRAEVLERLGARVVDVVAAPRRAAVARQPQHGRRLDAP

SEQ ID NO: 190505 - protein, 465 aa, Zea Mays
MTSPIQLAAAPLLLLVVVVAGTRSSRIFSVADYGAAGDGFRYDTAAIQAAVDACAAAGGGRVLLPAPGNYLTATVQLRSRVVLEVPPGARLLGGTRQADYPPESRRWYVVLAENTTGAGITGGGEINGQGGAFVVRPSEVKNVMVSWNATGDCLGDECRPRLVGFIDSKDVRIHDITLNQPAYWWLYTCIARSLHLVRCDNTVIHNVSIFGDFKTPNNDGIDIEDSNNTVITDCHIDTGDDAISPKSTTGPVYNLTATNCWMRTKSCAIKFGSASFFDFKRLVFDNITIVDSHRGLGMQIRDGGNVNDVVFSNIKMRTRYYHPLWWGRAEPIYITTCPRHPDSKEGAISDIRFINISSVSENGVFLAGSKHGLLRNLKFKNIDLTYKRWTNYTGGLYDYRPGCQEMVKHKTGGMMLEHISGLEIDNVRMRWARGSLKGWNVNPILFRPSTIDNLSFHDWQSVDVQ

SEQ ID NO: 190506 - protein, 204 aa, Zea Mays
MRTKSCAIKFGSASFFDFKRLVFDNITIVDSHRGLGMQIRDGGNVNDVVFSNIKMRTRYYHPLWWGRAEPIYITTCPRHPDSKEGAISDIRFINISSVSENGVFLAGSKHGLLRNLKFKNIDLTYKRWTNYTGGLYDYRPGCQEMVKHKTGGMMLEHISGLEIDNVRMRWARGSLKGWNVNPILFRPSTIDNLSFHDWQSVDVQ

SEQ ID NO: 190507 - protein, 470 aa, Zea Mays
MSHILCCRTIHRRMGSSLIASVVPTFVPEGQSGVSVSLAVGPSVVCGCDIGSSLSGWRDGINKSLCLVKGDYRTNEQISETLNYLRSTASLRLCCVPLFLLLSSGFPSPLLTIGIRFLRSSALSSMMSSSPIDALTQALEHQTRVILAEIDKRFNAIDYKWEYYPVVADPLLQGIRGAAISVPSDLAPIAGEAMVVMGAAADAGDPTRLDPPTPLDANLTRGGPPSIDGQSASLIPFIHDAATQCCYQEVEAHLTASNAATDGRIRQIEADTSARAPCVSALESYAADANVNTDSPLRQIEEDGGVRVAALESVVQVFDVWRPQVDSFIEHLQTSVAQIRASLPSLESPWSQYTRRDGPGHPNAYGATSILVPVKCVLHKPPLGGYDGSLDDDPEFGVTYIDAPLDQAVGCVGHAPAAAVALRTDVVGVVGRGLLAQRRRWNKGQRLYNLFFLRRNRCSSPHPLIVNSEV

SEQ ID NO: 190508 - protein, 393 aa, Zea Mays
MHVEPSPKGEISLVLSPAPVGSKQPRSPDHHHHQQAAMEELAGSRRQQEHLHLQHHQPFAAAAEPAAPGMIKDVKPLAKKDHRRGTSTAERDPKTLRRLAQNREAARKSRLRKKAYIQQLESSRIRLAQLEQELHTARAQGVFFPNSGILADQGVAGKGVPIGGIDGLSSEAAMFDVEYGRWQEEHYRLMYELRAALQQHLPEGELQMYVESCLAHHDEMVGIKEGAIKGDVFHLISGVWRSPAERCFLWLGGFRPSEVIKMLLSHVEPLTEQQIVGVYGLQQSALETEEALSQGLEALYQSLSDTVVSDALSCPSNVSNYMGQMAVAMNKLSTLEGFVRQAENLRQQTLHRLHQVLTTRQMARSLLAVSDYFHRLRTLSSLWVTRPRAPQEQ

SEQ ID NO: 190509 - protein, 485 aa, Zea Mays
MVSGGSTKEQQHEMNISFGMMNQHHQPPSSSSSSSMHAAAASFMSGKEASGAYDHLGELDQALFMYLDHGSSHGGGATQQERRQTLNIFPSQPMHVEPSPKGEISLVLSPAPVGSKQPRSPDHHHHQQAAMEELAGSRRQQEHLHLQHHQPFAAAAEPAAPGMIKDVKPLAKDHRRGTSTAERDPKTLRRLAQNREAARKSRLRKKAYIQQLESSRIRLAQLEQELHTARAQGVFFPNSGILADQGVAGKGVPIGGIDGLSSEAAMFDVEYGRWQEEHYRLMYELRAALQQHLPEGELQMYVESCLAHHDEMVGIKEGAIKGDVFHLISGVWRSPAERCFLWLGGFRPSEVIKMLLSHVEPLTEQQIVGVYGLQQSALETEEALSQGLEALYQSLSDTVVSDALSCPSNVSNYMGQMAVAMNKLSTLEGFVRQAENLRQQTLHRLHQVLTTRQMARSLLAVSDYFHRLRTLSSLWVTRPRAPQEQ

SEQ ID NO: 190510 - protein, 221 aa, Zea Mays
MIAFSCCVYDGGDEEKEMDAAREIGWRGKFTKRGRVIRPGIIRMSGKCPLTPLEVGLMLRGMDFSNKTAIFLASGKIYKAEKNMASLLEMFPLLQTKETLASEEELAPFKMAAVDYSICAQSEVFVTTQGGNPAFFMGHRRYLYGGHSKTIKPDKRRLAVLFNNPRIGWTALKRHLLNMRAYSDVKGIEMKRPNESIYTFPCPDCMCRLNRTEHSKSKQSR

SEQ ID NO: 190511 - protein, 114 aa, Zea Mays
MIAFSCCVYDGGDEEKEMDAAREIGWRGKFTKRGRVIRPGIIRMSGKCPLTPLEVGLMLRGMDFSNKTAIFLASGKIYKAEKNMASLLEMFPLLQTKETLASEEELAPFKNFSF

SEQ ID NO: 190512 - protein, 132 aa, Zea Mays
MGSRNRRWPRPPTWVVASADETQRQGARGNDVMDLISQLMSWFMPLIASRRGSPRPPHAARHGQRCRLHEARHGVLPQGGHRCWGQGIPRHGKITDDEINAASVTCCRIYLRSESEPGISQVLRRVLQLLIP

SEQ ID NO: 190513 - protein, 340 aa, Zea Mays
MASPPPPRVCVTGGGGYVASWLVKLLLSRGYAVHATVRDPSDPKNAHLQQLDGARERLRLFKADVLDRDALATAVVACEGVFHVASPVPADKVLDPESEVLSPAVKGTLNVLQACSANNVQKVVVVSSTAAVYFNPSWPQGRTKDESCWSDRDLCIKNENWYCAAKTIAEETAVEYGEKNGLIVVTVCPCIVLGPLLQPLINASSELLVYIIKGGPRVLKNLPWNIVDVRDVADALLLVYEKVESSGRYICAPNRISTNNMVNLFKKSYPNYNYVNCDNKDYESEISPVTSEKLKSLGWNPRTMEKTLLDNIEYFEKAGFLRDGEGYPCRLPHIFHFASD

SEQ ID NO: 190514 - protein, 87 aa, Zea Mays
MNASWLQRLVTSTLRGYPNNAHLKELEKAPENLYLFKADEPDHDTLTAAVEGCEGIFHLATPAVPEDKIVDPESEVLETAVKGTLMC

SEQ ID NO: 190515 - protein, 632 aa, Zea Mays
METPPRGRWPPGFRFSPTDEELVLYFLKRRIASGRPSPYVADVEVYKSHPSHLPERSALQTGDRQWFFFSRMDRKYPNGSRASRTTGDGYWKATGKDRFICGGGRAVGNKKTLVYHHGRAPRGERTDWVMHEYTLLADALPPAAQGREFYALYKLFQKSGAGPKNGEQYGAPFREEDWLDDDDERVIAGAAANPVPNTNSPPSTMEEHAITDRELPIEGLDQPLSDFGNDPELFSEAQPVSSHGQGQGWLSEGGDKAEFQCDDRQVWLDAEMGHEVYAADPTASSGAVVTAECTVTELPLGDLEGLLLQIANDQHMVESQSDLSAPTPHHNFNQADIGDLHESHGARVGNLSCIVQESTFCEPRTEPSDQFPQSNVTNLPFSGEANSSEGTSVAHSVSGLISYHSQDADEEFLEINDFFDLEDVGQNANCMTTEYMMSATNGMFDNLEYSDASSFLPGSFDTVGLVAENQYFDTDYSGIQNQGYQNTTEVRTYNQAALTVRSHMKHDHVVLSSHASGTLNIHAANELHNQSSTSSQSWFNAALSALLDSVPSSPALAAEIENTVINRTLQRISSFRSQQATGEEPGTPSIQVTRGGRLMFISLLVILASVIWTFTSGSALNFCKGLWKSSST

SEQ ID NO: 190516 - protein, 409 aa, Zea Mays
METPPRGRWPPGFRFSPTDEELVLYFLKRRIASGRPSPYVADVEVYKSHPSHLPERSALQTGDRQWFFFSRMDRKYPNGSRASRTTGDGYWKATGKDRFICGGGRAVGNKKTLVYHHGRAPRGERTDWVMHEYTLLADALPPAAQGREFYALYKLFQKSGAGPKNGEQYGAPFREEDWLDDDDERVIAGAAANPVPNTNSPPSTMEEHAITDRELPIEGLDQPLSDFGNDPELFSEAQPVSSHGQGQGWLSEGGDKAEVVDASISNDVVVVAENTCTDISLGDIEQFLMQISDDQQNDELFSDLSTPLPKLQFQCDDRQVWLDAEMGHEVYAADPTASSGAVVTAECTVTELPLGDLEGLLLQIANDQHMVESQSDLSAPTPHHNFNQFRKAHFVNHGLNQVINFHSLM

SEQ ID NO: 190517 - protein, 522 aa, Zea Mays
MLSENVVPNEATLAGAITAFARCGAPATVGMIHGFALQRALDGFVIVATNLVHAYAGVLELCSARALFDGMTYRNTVTWNVMLNGYVKAKMIDMAAEVFWRIPERDEVSWLTLIDGYICADLISDAMKAYVQMVGEVGANDYEVLLVDLMKACARYSAVTEGQQLHTVILKNGFDAHAFVQATLVHFYGCCGLIGLAQMTFRLSDKSHTASWNALLAALLRNGLIREARELFDDMPERDTVSWSTMISGYVQTGRSDMALKLFYSMLNTSIEPNEVTLASALSAIADSGTLDQGKWIHDYIMNRPVQLTDNLSSGLIDMYAKCGSIADAVQFFNRVNDKFSSVSPWNAMICSLAIHGYAHMSLDLFSQLQRTSIKPNSITFIGVLSACCHAGTVTKGKYYFESMTREYGIQPTIKHYGCMVDLLGRAGYLEEAEQLVSMMPMKPDVVIWGSILSASRAQGNVALGERAAEELAKLDQTHGASKIALSNIYADAGHWINVSVVRKELQDANLERLTGRSGIVQ

SEQ ID NO: 190518 - protein, 306 aa, Zea Mays
MLFGSELFEDYIGQLAMASMASLDGFTENEQIDPRRLQEQMRVVQKEREEKLAEALKDRLHLYVQGNKEEFIQYADAEVTRLSNAAYGVDMLSTIGYVYSRQASKELGKQAKYLGVPFIAEWFRNKGHSIKSQITAATGALALMQLQEDWRKHLSDECHYNEEELEAYMLTHKSVMVDSLWKLNVADIEETLSHVCQMVLHDSSARKEELRVRAKGLKTLGKIFHQAKLSTAEGDPAAMNNTINNLDENDDSSPESSPRSPRDQMFDTNPPYSQSPYVEAPELGGYFSFDFPMPIAPPGAQRDPIP

SEQ ID NO: 190519 - protein, 296 aa, Zea Mays
MVRETGYYDVLEVSPTASEAEIKKAYYVKARQVHPDKNPDDPLAAARFQELGEAYQVLSNPKQREDYDLHGKPGISTEAIIDPAAIFAMLFGSELFEDYIGQLAMASMASLDGFTENEQIDPRRLQEQMRVVQKEREEKLAEALKDRLHLYVQGNKEEFIQYADAEVTRLSNAAYGVDMLSTIGYVYSRQASKELGKQAKYLGVPFIAEWFRNKGHSIKSQITAATGALALMQLQEDWRKHLSDECHYNEEELEAYMLTHKSVMVDSLWKLNVADIEETLSHVCQMCQERGTASSS

SEQ ID NO: 190520 - protein, 238 aa, Zea Mays
MESSKSPQSSKNSRIVVPSDSNRSRFDNDGFSSETASNQMVVFNSEAADELGENRLQKSVITKGISPSIGAFTVQCAKCFKWRLIPTKEKYEEIRERIIQEPFVCKRAREWRPDITCNDPEDISQDGSRLWAIDKPNIAQPPHGWERQIRIRGEGGTKFADVYYTSPTGRKLRSLVEVDRFLQENPEHVAQGVTLAQFSFQIPRPLRQDYVKKKPKLINASDEASTITSKSSEPEEGL

SEQ ID NO: 190521 - protein, 760 aa, Zea Mays
MADVGRLEHLEQRRRQKPERTEERIRVYWRLGGFLAGLWLAIHVMTQIEHRGLQKQWTWEPMMGESLILALVDNNDDVRQVGRALLEHVSQARGLTSGLQFLCSSASSLTAVFLGLRYVVQLVGTRSVLADFSSFHHLFFVICKLLKEVVVQRPQIAQPAKPPEGGFLRQPYSSVLASPPEHAVDVSNWEKFCTLLSATLWPFISTCLREGKELIGLKQCQISCVRLLELLPLVYERVNSNCRTLSCSTTTVFQNPMDISWFIHLVHWGKSSLLVIIRHWKQCMLSLLKELKCSHSGTIQCYIEDLDNIISHDAVNINELEERVSNLELVLSKEVATKIERRGLADLPMFKEPIVSVPSPVHERHSGMDSFVDVESTKSSHPPDVHEIILLSDSEDNLLAPDVSSEEVLSSVMENDASTASNMLKDATPLEQSTLNDNRHSPLEPQICHPVSNISASSKPVSTDSRDNIAATKGLLRMKKPRPPMNTNNNSTSPKMVKSSVTGTSQQLHPKLLSDTEKFKSIFRDISDDEDDPLDHALDNYRRPQVLSRKPCILVPKRQVVQLPVPVGRKPGSGSRVTSTRRLQPPKLGSWFRNILEMDYFAVVGLSSPEIVRKPALKEVPVCFDSPAQYVEIFQPLVLEEFKAQLQNAYVETPPDDMMCGCVSILAVERVDDFLIVRARPEHSQSIKFRGCTENDLVLLTKDPLKNQGQQVHVLGKVERRESDKNKALIFVMKFFLSSDNARLNKVKRFLVESIRVIIQ

SEQ ID NO: 190522 - protein, 714 aa, Zea Mays
MADVGRLEHLEQRRRQKPERTEERIRVYWRLGGFLAGLWLAIHVMTQIEHRGLQKQWTWEPMMGESLILALVDNNDDVRQVGRALLEHVSQARGLTSGLQFLCSSASSLTAVFLGLRYVVQLVGTRSVLADFSSFHHLFFVICKLLKEVVVQRPQIAQPAKPPEGGFLRQPYSSVLASPPEHAVDVSNWEKFCTLLSATLWPFISTCLREGKELIGLKQCQISCVRLLELLPLVYERVNSNCRTLSCSTTTVFQNPMDISWFIHLVHWGKSSLLVIIRHWKQCMLSLLKELKCSHSGTIQCYIEDLDNIISHDAVNINELEERVSNLELVLSKEVATKIERRGLADLPMFKEPIVSVPSPVHERHSGMDSFVDVESTKSSHPPDVHEIILLSDSEDNLLAPDVSSEEVLSSVMENDASTASNMLKDATPLEQSTLNDNRHSPLEPQICHPVSNISASSKPVSTDSRDNIAATKGLLRMKKPRPPMNTNNNSTSPKMVKSSVTGTSQQLHPKLLSDTEKFKSIFRDISDDEDDPLDHALDNYRRPQVLSRKPCILVPKRQVVQLPVPVGRKPGSGSRVTSTRRLQPPKLGSWFRNILEMDYFAVVGLSSPEIVRKPALKEVPVERVDDFLIVRARPEHSQSIKFRGCTENDLVLLTKDPLKNQGQQVHVLGKVERRESDKNKALIFVMKFFLSSDNARLNKVKRFLVESIRVIIQ

SEQ ID NO: 190523 - protein, 498 aa, Zea Mays
MAAARRIDLADRWRRMQEDEDADDGGESSAAKHRRLIRAKEEWFSHCYTFLINLPKEDHIWCGYADIMSPFMETFHGFFDDEDENSSLRIMWTRVSREMGICTQCVCEHHQAQGFFNTEYQSDTVDPLLKVLRLLDEERITGHLIHINTKLQLKEYDPSCHGAEVVSIMFEVLMYPVLLDDQSLANQFQMFIEKIDETYEVSLSTNQQYPGVYALLFFKSCKARAIGLRLARSMGKLRRAVDLEPLQPLLQKYIIFLEAEVLPSTSEHSRPRVQLKRADVWLGFKSLLGFLEAPAFEDGILEKYPFLNIVLNHVSDDTSDLSCAVSCLKASFEMLGCKLWLRTTLSPSVMRNTLLGHCFHTHTEKSHKEIFDLFLPFLQSLEALQDGEHEKQRRNILYFLLHQVTRSSNFSALMRKTATKIALLIVQRGYTMNPPCPPSECAHMWGPSLISSVEDTSLHVSLRQPALVLIYIIIISDASALIYYKLKYGAVQKVNVSN

SEQ ID NO: 190524 - protein, 445 aa, Zea Mays
MAAARRIDLADRWRRMQEDEDADDGGESSAAKHRRLIRAKEEWFSHCYTFLINLPKEDHIWCGYADIMSPFMETFHGFFDDEDENSSLRIMWTRVSREMGICTQCVCEHHQAQGFFNTEYQSDTVDPLLKVLRLLDEERITGHLIHINTKLQLKEYDPSCHGAEVVSIMFEVLMYPVLLDDQSLANQFQMFIEKIDETYEVSLSTNQQYPGVYALLFFKSCKARAIGLRLARSMGKLRRAVDLEPLQPLLQKYIIFLEAEVLPSTSEHSRPRVQLKRADVWLGFKSLLGFLEAPAFEDGILEKYPFLNIVLNHVSDDTSDLSCAVSCLKASFEMLGCKLWLRTTLSPSVMRNTLLGHCFHTHTEKSHKEIFDLFLPFLQSLEALQDGEHEKQRRNILYFLLHQVTRSSNFSALMRKTATKIALLIVQRGYTMNPPCPPSECAHMW

SEQ ID NO: 190525 - protein, 174 aa, Zea Mays
MLLASSAPGPLLVASSSIAFLISASFFLSCFVFRRLPYLLCFSLNALSTAALLIRSDCLVRYIFFPLLAGPIRFGGYVMRFPCAHFYTCFVSISFFAVSASSSSFFSNVSFFQVIYFRHIRYPAYPSLGIIDSALSGVFHFHNILYTHVSFMCSKYVYFFVELRPFDHVKRLLA

SEQ ID NO: 190526 - protein, 307 aa, Zea Mays
MAASNGEGHGRFDVIVVGAGIMGSCAAYAASSRGARVLLLERFDLLHHRGSSHGESRTIRAVLRDRTEVVDITSSKRGEGEGSIISVRTSSGEEFHGTKCIVTVGAWTSKLIKSVTGLELPVQPVHTLICYWKVRPGREQELTPEAGFPTFASYGDPYIYSTPSMEFPGLIKIAMHGGPPCDPDGRDWSTGAGDLVEPVARWIDAVMPGHVDTTGGPVVRQCCMYSVTPDDDYVVDFLGGEFGKDVVIGAGFSGHGFKMGPAVGRILAEMALDGEASTAAEAGVDLRPLTIGRFAGNPKGNLSASQG

SEQ ID NO: 190527 - protein, 385 aa, Zea Mays
MGLKATGARSNTMKLDNNAEMNSVDMAGVEDLMDTIEEVKPCWTKPSPKNQPSNGFVTFSLTMGPEYHISQITDAVVVARYLGATFVLPDIRGNELGNKRKFQDMYNVDKFVRSLDGVVEVIDEIPDEVSAKKPAVIRVPNRVTESFIMDTIQPIFKKNKYLRLAVIFSSVSLRPKETSNKDLDATACLAMFSGLELKHEYSEVARKMLDRLQELSKKSDGKVLAIDLRTDLLEKKSCKTTSGARRKGCYNPNEVLAFLRSVGFSANTTIYLTETWWHKGLNDLKEEFPNTYTKDDIMPAENKGEFLKSSNADLASALDLEICSQSDVFIPAVAGLFYGHVTGKRIASGRTQIIVPSQSSTSTHASDFTSTYISNKNHLAYTCYC

SEQ ID NO: 190528 - protein, 51 aa, Zea Mays
MTRRVSEELLGLKMTTRIKARRHRTGKSRNGRRRGSSTVAWDLASWRCVAE

SEQ ID NO: 190529 - protein, 82 aa, Zea Mays
MASALSWRLGRWRILEEQSKEWKHLATVIAPEQSSMASSSYLCFRCLAVAAVKGWSQHVRLYHAGFRRRLYPAGLGGGCTRT

SEQ ID NO: 190530 - protein, 69 aa, Zea Mays
MANLGRTIKRMVRPCHSNSARTVVDGFKLLLVFPVFGCCGCKRLESACTAVPCWIQAAAVPCWTRRRLY

SEQ ID NO: 190531 - protein, 58 aa, Zea Mays
MEVVPLMDRLVSISVICITTVTCSCQQNTQTLVVCFWDSKSNIGSVECVGYIYIWIYL

SEQ ID NO: 190532 - protein, 425 aa, Zea Mays
MDQMDWIEKITGVIASLLSSQSPERHLISSPKGSSHHRTASSSSSFSSSTELEHSISEDCMLEKNSGSGYFEHSARVAQHHRTSMMKPDKPIDLLRKVAGNNCCADCGASEPDWASLNLGILLCIECSGVHRNMGVHISKVRSLTLDVRVWEQSVINLFQSIGNTFANSVWEEMLPSSSCVDHGDISRADGLENMSHGFAPKKPKQSDSIAVKEKFIHAKYAEKDFVRKHNMDGIQLAEQMWDNVSSNNKKGVYSLIVGSNADVNFSYGHTSFNSALTLGKALLLQEQSASPSNGSSRCFDRNPLEKGCTGDSVSPASTSARIDGPDDYVEGLSLLHLACRAADLGMVELLLQYGANVNSTDSRGRTPLHHSIMKGRHVYAKLLLSRGADSQAADRDGRTALQYAIDSGTIEDEEILVLLEDPSR

SEQ ID NO: 190533 - protein, 744 aa, Zea Mays
MTKFTIALREIGTYKEVLRSQVEHMLNDKLLQFVDIDLHEMKDARKRFDKATLLYDQAREKYLSLKKGTRTDVATAVEDVTALSNIEAKKRFEFLEAVSGTMDAHLRYFKQGYELLHQMEPYINQVLAFAQQSRERSNYEQAALLERMQEFKRQIDRESRWSPNGMNDSPNGDGIQTIGRSSHKMIEEAMQSASKGKVQTIRQGYLSKRSSNLRGDWKRRFFVLDSRGMLYYYRKQNSRPSSGYSNQRTSIPSEHGSGLLSRWFSSHYHGGVHDEKSVARHTVNLLTSTIKVDADQSDLRFCFRIISPTKNYTLQAESAMDQMDWIEKITGVIASLLSSQSPERHLISSPKGSSHHRTASSSSSFSSSTELEHSISEDCMLEKNSGSGYFEHSARVAQHHRTSMMKPDKPIDLLRKVAGNNCCADCGASEPDWASLNLGILLCIECSGVHRNMGVHISKVRSLTLDVRVWEQSVINLFQSIGNTFANSVWEEMLPSSSCVDHGDISRADGLENMSHGFAPKKPKQSDSIAVKEKFIHAKYAEKDFVRKHNMDGIQLAEQMWDNVSSNNKKGVYSLIVGSNADVNFSYGHTSFNSALTLGKALLLQEQSASPSNGSSRCFDRNPLEKGCTGDSVSPASTSARIDGPDDYVEGLSLLHLACRAADLGMVELLLQYGANVNSTDSRGRTPLHHSIMKGRHVYAKLLLSRGADSQAADRDGRTALQYAIDSGTIEDEEILVLLEDPSR

SEQ ID NO: 190534 - protein, 185 aa, Zea Mays
MCFILTNLCQMYHFRFLMFYPFAVVNGHIKRPQDEDIQSNVLEIVGTNVQSTYITCPADPSATLGIKLPFLAIIVKNLKKYFTFEIQVLDDKNVRRRFRASNFQSVTRVKPYICTMPLKLDDGWNNIQLNLADLTKRAYGTNYVETLRVQVHANCRLRRIYFSDRLYSEEELPPEFKLYLPIQKS

SEQ ID NO: 190535 - protein, 66 aa, Zea Mays
MLMLVFLTLVCFTLEFTPAQFVGPCSLTARPAQVSLYTGCVKKKHRLVSSCANHDQAMFLSINPCP

SEQ ID NO: 190536 - protein, 722 aa, Zea Mays
MGLPQIPVVKEEEPTEVSTPAGSSFSVDGPCDSGKLLEGSSSGSWFQNPSISDFKRKFAPGAASNGLNSQFRTRHAVDDPAGYQSLNPKPRDPNYRSCTKIKSTLHIPAMRVVGFDSGTDGSTGGPDIMVSHKMHSSLVIGNCDSSVVHHEVQARKRVLSPLTNALPAGQFYGNALNIGSGDEKVQNPRCVRQLSYSGFHDSKKANTGALDSFQPSTRSELRYSDWSTGQGFCKFSSNTFTDGPLLEGRELFSCSDQPGVEGIMNLAKVPARLSHSPPPTLSPLRPKWMHRMKAARAQRDLTGRIENDIIDLKEMGRSNFDDYSEYVGTIRMGDILEETSILHDGFDTMIPKRNFHRRYRCLGPESAPVSTHIECINSSNLLPVRRSLVGSFEESLLSGRYSCGKDNQSIDGFLAILNVTGGSFSPPTQKFPFTVSSIDEDSSLLYYSSIDLAGRLPTNNTKGPKLKRSLSSSDSRSTNSRLRIPVKGRIQLVVSNPEKTPLHTFFCTYDLSDMPAGTKTFMRQKITLSSASPSHPTREESKASDVKVESVQCGSELREFGALFSECSDNGHELEKGRSADMECFSMECDVREPNENGTSGNSENDANAEGCCCQINSCEGGKIYFNRSPKVNDIPAGGVLRYALHLRFLSPFSKKSSKSRYHCKLDMSSQPHSRSRTEEERRFYLYNDIRVVFPQRHSDSDEGEINPSLPLTENAGRRWME

SEQ ID NO: 190537 - protein, 568 aa, Zea Mays
MGLPQIPVVKEEEPTEVSTPAGSSFSVDGPCDSGKLLEGSSSGSWFQNPSISDFKRKFAPGAASNGLNSQFRTRHAVDDPAGYQSLNPKPRDPNYRSCTKIKSTLHIPAMRVVGFDSGTDGSTGGPDIMVSHKMHSSLVIGNCDSSVVHHEVQARKRVLSPLTNALPAGQFYGNALNIGSGDEKVQNPRCVRQLSYSGFHDSKKANTGALDSFQPSTRSELRYSDWSTGQGFCKFSSNTFTDGPLLEGRELFSCSDQPGVEGIMNLAKVPARLSHSPPPTLSPLRPKWMHRMKAARAQRDLTGRIENDIIDLKEMGRSNFDDYSEYVGTIRMGDILEETSILHDGFDTMIPKRNFHRRYRCLGPESAPVSTHIECINSSNLLPVRRSLVGSFEESLLSGRYSCGKDNQSIDGFLAILNVTGGSFSPPTQKFPFTVSSIDEDSSLLYYSSIDLAGRLPTNNTKGPKLKRSLSSSDSRSTNSRLRIPVKGRIQLVVSNPEKTPLHTFFCTYDLSDMPAGTKVLTMGMSWKRDVLQIWNVSPWNVTLENQMKMVLRGIQKMMLMLRGAAVK

SEQ ID NO: 190538 - protein, 596 aa, Zea Mays
MGLPQIPVVKEEEPTEVSTPAGSSFSVDGPCDSGKLLEGSSSGSWFQNPSISDFKRKFAPGAASNGLNSQFRTRHAVDDPAGYQSLNPKPRDPNYRSCTKIKSTLHIPAMRVVGFDSGTDGSTGGPDIMVSHKMHSSLVIGNCDSSVVHHEVQARKRVLSPLTNALPAGQFYGNALNIGSGDEKVQNPRCVRQLSYSGFHDSKKANTGALDSFQPSTRSELRYSDWSTGQGFCKFSSNTFTDGPLLEGRELFSCSDQPGVEGIMNLAKVPARLSHSPPPTLSPLRPKWMHRMKAARAQRDLTGRIENDIIDLKEMGRSNFDDYSEYVGTIRMGDILEETSILHDGFDTMIPKRNFHRRYRCLGPESAPVSTHIECINSSNLLPVRRSLVGSFEESLLSGRYSCGKDNQSIDGFLAILNVTGGSFSPPTQKFPFTVSSIDEDSSLLYYSSIDLAGRLPTNNTKGPKLKRSLSSSDSRSTNSRLRIPVKGRIQLVVSNPEKTPLHTFFCTYDLSDMPAGTKTFMRQKITLSSASPSHPTREESKASDVKVLTMGMSWKRDVLQIWNVSPWNVTLENQMKMVLRGIQKMMLMLRGAAVK

SEQ ID NO: 190539 - protein, 723 aa, Zea Mays
MGLPQIPVVKEEEPTEVSTPAGSSFSVDGPCDSGKLLEGSSSGSWFQNPSISDFKRKFAPGAASNGLNSQFRTRHAVDDPAGYQSLNPKPRDPNYRSCTKIKSTLHIPAMRVVGFDSGTDGSTGGPDIMVSHKMHSSLVIGNCDSSVVHHEVQARKRVLSPLTNALPAGQFYGNALNIGSGDEKVQNPRCVRQLSYSGFHDSKKANTGALDSFQPSTRSELRYSDWSTGQGFCKFSSNTFTDGPLLEGRELFSCSDQPGVEGIMNLAKVPARLSHSPPPTLSPLRPKWMHRMKAARAQRDLTGRIENDIIDLKEMGRSNFDDYSEYVGTIRMGDILEETSILHDGFDTMIPKRNFHRRYRCLGPESAPVSTHIECINSSNLLPVRRSLVGSFEESLLSGRYSCGKDNQSIDGFLAILNVTGGSFSPPTQKFPFTVSSIDEDSSLLYYSSIDLAGRLPTNNTKGPKLKRSLSSSDSRSTNSRLRIPVKGRIQLVVSNPEKTPLHTFFCTYDLSDMPAGTKTFMRQKITLSSASPSHPTREESKASDVKVESVQCGSELREFGALFSECSDNGHELEKGRSADMECFSMECDVREPNENGTSGNSENDANAEGCCCQINSCEGGKIYFNRSPKVNDIPAGGVLRYALHLRFLSPFSKKSSKSRYHCKLDMSSQPHSRSRTEEERRFYLYNDIRVVFPQRHSDSDEGELRVEHDFPANPKYFDISN

SEQ ID NO: 190540 - protein, 511 aa, Zea Mays
MESMRVHVLNTITTPSLSLLNELQTVEEMKRQCDEKRELYEFMLNAQKEKGRSKNAKGDNVASEQLKQAQEDYQEEATLFLFRLKSLKQGQFRSLFTQAARHHAAQLNLFRKGVKSLEAVEPHVRLAAEQQHIDHQFSALEEEDYVVEDENDDEYNDSHDGELSFDYGENKETEKSGIASRNHTEDFFNSSKEDYSSVPHERQRIESQSAPLFPGKKVNTEERIKDLRRSATRKLNTYVLPTPNDVRATSQIASGNPISGPLESKGAFHSSPLHPSADIRDLRDNKLPSPARLSNVQSVLKESNTNTAETRKVLPVGDLALPGYYDLKTLDNNKVKRGSFSGPIASRPRPTENNDVISAAPRHSSAHQPVHMRVSPGNSPPPISSPKIKELHELPRPPVNTSKNTTFPSLVAHSAPLVANPASLTPKVQDHFRARQMLPSTASPLPTPPPGSISRSFSIPSRGRTGSDGKEIEDQQDKGAARMSLSSLPSAQTLLEDRQPLSAAAGSVSKT

SEQ ID NO: 190541 - protein, 547 aa, Zea Mays
MKSSLRKLRGFALQRHEQRVDRDRGRGHSTTAAEELLAAAQDMTDMRSCYDNLLSVAAAIANSAYEFSEALQDMGACLLKRITPNKDGINDKVLLLLGKSQFELRKLVDSYRVHVLNTITTPSLSLLNELQTVEEMKRQCDEKRELYEFMLNAQKEKGRSKNAKGDNVASEQLKQAQEDYQEEATLFLFRLKSLKQGQFRSLFTQAARHHAAQLNLFRKGVKSLEAVEPHVRLAAEQQHIDHQFSALEEEDYVVEDENDDEYNDSHDGELSFDYGENKETEKSGIASRNHTEDFFNSSKEDYSSVPHERQRIESQSAPLFPGKKVNTEERIKDLRRSATRKLNTYVLPTPNDVRATSQIASGNPISGPLESKGAFHSSPLHPSADIRDLRDNKLPSPARLSNVQSVLKESNTNTAETRKVLPVGDLALPGYYDLKTLDNNKVKRGSFSGPIASRPRPTENNDVISAAPRHSSAHQPVHMRVSPGNSPPPISSPKIKELHELPRPPVNTSKNTTFPSLVAHSAPLVANPASLTPKVQDHFRGENRFRR

SEQ ID NO: 190542 - protein, 539 aa, Zea Mays
MKSSLRKLRGFALQRHEQRVDRDRGRGHSTTAAEELLAAAQDMTDMRSCYDNLLSVAAAIANSAYEFSEALQDMGACLLKRITPNKDGINDKVLLLLGKSQFELRKLVDSYRVHVLNTITTPSLSLLNELQTVEEMKRQCDEKRELYEFMLNAQKEKGRSKNAKGDNVASEQLKQAQEDYQEEATLFLFRLKSLKQGQFRSLFTQAARHHAAQDFFNSSKEDYSSVPHERQRIESQSAPLFPGKKVNTEERIKDLRRSATRKLNTYVLPTPNDVRATSQIASGNPISGPLESKGAFHSSPLHPSADIRDLRDNKLPSPARLSNVQSVLKESNTNTAETRKVLPVGDLALPGYYDLKTLDNNKVKRGSFSGPIASRPRPTENNDVISAAPRHSSAHQPVHMRVSPGNSPPPISSPKIKELHELPRPPVNTSKNTTFPSLVAHSAPLVANPASLTPKVQDHFRARQMLPSTASPLPTPPPGSISRSFSIPSRGRTGSDGKEIEDQQDKGAARMSLSSLPSAQTLLEDRQPLSAAAGSVSKT

SEQ ID NO: 190543 - protein, 494 aa, Zea Mays
MRSCYDNLLSVAAAIANSAYEFSEALQDMGACLLKRITPNKDGINDKVLLLLGKSQFELRKLVDSYRVHVLNTITTPSLSLLNELQTVEEMKRQCDEKRELYEFMLNAQKEKGRSKNAKGDNVASEQLKQAQEDYQEEATLFLFRLKSLKQGQFRSLFTQAARHHAAQDFFNSSKEDYSSVPHERQRIESQSAPLFPGKKVNTEERIKDLRRSATRKLNTYVLPTPNDVRATSQIASGNPISGPLESKGAFHSSPLHPSADIRDLRDNKLPSPARLSNVQSVLKESNTNTAETRKVLPVGDLALPGYYDLKTLDNNKVKRGSFSGPIASRPRPTENNDVISAAPRHSSAHQPVHMRVSPGNSPPPISSPKIKELHELPRPPVNTSKNTTFPSLVAHSAPLVANPASLTPKVQDHFRARQMLPSTASPLPTPPPGSISRSFSIPSRGRTGSDGKEIEDQQDKGAARMSLSSLPSAQTLLEDRQPLSAAAGSVSKT

SEQ ID NO: 190544 - protein, 157 aa, Zea Mays
MKSSLRKLRGFALQRHEQRVDRDRGRGHSTTAAEELLAAAQDMTDMRSCYDNLLSVAAAIANSAYEFSEALQDMGACLLKRITPNKDGINDKVLLLLGKSQFELRKLVDSYRVHVLNTITTPSLSLLNELQTVEEMKRQCDEKRKKREDLRMLKVIM

SEQ ID NO: 190545 - protein, 121 aa, Zea Mays
MLSLLQAAEILSKEGISAEVINLRSIRPLDRAAINASVRKTNRLVTVEEGFPQHGIGAEICMSVVEESFEYLDAPVERIAGADVPMPYAANLERMAVPQVDDIVRAAKRACYRAVPMAAAA

SEQ ID NO: 190546 - protein, 122 aa, Zea Mays
MVGYALQAAEILSKEGISAEVINLRSIRPLDRAAINASVRKTNRLVTVEEGFPQHGIGAEICMSVVEESFEYLDAPVERIAGADVPMPYAANLERMAVPQLLSTSWIYLEDCPAMLRSTVVS

SEQ ID NO: 190547 - protein, 249 aa, Zea Mays
MDRPAQAPTQLPPGFRFHPTDEELVVLYLRRKALARPLPAAVIPVVHDVARLDPWDVTGASEGEGYFFSLRRAPATGRRRRAGSGYWKATGKEKPVFLQCGGEQRQLLVGVKTALAFHRREPPPPSSRTGWVMHEYRLAVPRGVADQRKKNARHGCVAEPGEWVVCRVFLKNRPNRDAGSKTLRHGASARRRRRQQQPEDVRGQQPLPFSAPQPSSSSCVTDVTDCLSDEDEDEASSGSTARAAPQREA

SEQ ID NO: 190548 - protein, 80 aa, Zea Mays
MTPQTTTAGMPLPLRPSTACRIRRTRATTAMETQKHLPGMGYPSGNNIHLGTGMGKHFYPNRVWVLCRVHFFVAGASMKR

SEQ ID NO: 190549 - protein, 96 aa, Zea Mays
MCCVEAPRPGTLQAAEELRTSVARHADRSSWPSRHSKPSTGGTSSLYTPCWSVVRSASRDSSSDDVEFTLKLHLISTLAPAYALQNHHAAVSPIVF

SEQ ID NO: 190550 - protein, 148 aa, Zea Mays
MGRGRVELKRIENKINRQVTFAKRRNGLLKKAYELSVLCDAEVALIVFSNRGKLYEFCSGPSITRTLERYEKNSYAGPDTAVQNKENELVQNSRNEYLKLKAKVDNLQRTQRNLLGEDLGSLGVKELDQLEKQIDSSLSHIRSTRVTR

SEQ ID NO: 190551 - protein, 363 aa, Zea Mays
MLRCHTPPQCARAPLRHHGRWESPPAAAPAVVVRCARGAPQVSGIEAASPGHAAVTAALAKAEGGDARPSLAERLRLGNLLEDGLSYKESFIVRCYEVGINKTATVETIANLLQEVGCNHAQSVGFSTDGFATTTTMRKLGLIWVTNRMHIEIYKYPAWGDVVEIETWCQEDGRIGTRRDWILKDLANGEVIGRATSKWVMMNQNTRRLQRVSDDVRDEVFMHCPKAPRLAFPEENNGSLKKIPNLSDPAEYSRLGLVPRRADLDMNQHVNNVTYIGWSIPQDIIDTHELQTITLDYRRECQQDDIVDSLTCIEEGEEKSMNGSASAAAPHKEERQQFLHCLRFAANGHEINRGRTVWRKLAR

SEQ ID NO: 190552 - protein, 362 aa, Zea Mays
MLRCHTPPQCARAPLRHHGRWESPPAAAPAVVVRCARGAPQVSGIEAASPGHAAVTAALAKAEGGDARPSLAERLRLGNLLEDGLSYKESFIVRCYEVGINKTATVETIANLLQEVGCNHAQSVGFSTDGFATTTTMRKLGLIWVTNRMHIEIYKGDVVEIETWCQEDGRIGTRRDWILKDLANGEVIGRATSKWVMMNQNTRRLQRVSDDVRDEVFMHCPKAPRLAFPEENNGSLKKIPNLSDPAEYSRLGLVPRRADLDMNQHVNNVTYIGWVLESIPQDIIDTHELQTITLDYRRECQQDDIVDSLTCIEEGEEKSMNGSASAAAPHKEERQQFLHCLRFAANGHEINRGRTVWRKLAR

SEQ ID NO: 190553 - protein, 326 aa, Zea Mays
MLRCHTPPQCARAPLRHHGRWESPPAAAPAVVVRCARGAPQVSGIEAASPGHAAVTAALAKAEGGDARPSLAERLRLGNLLEDGLSYKESFIVRCYEVGINKTATVETIANLLQEVGCNHAQSVGFSTDGFATTTTMRKLGLIWVTNRMHIEIYKYPAWGDVVEIETWCQEDGRIGTRRDWILKDLANGEVIGRATSKWVMMNQNTRRLQRVSDDVRDEVFMHCPKAPRLAFPEENNGSLKKIPNLSDPAEYSRLGLVPRRADLDMNQHVNNVTYIEEGEEKSMNGSASAAAPHKEERQQFLHCLRFAANGHEINRGRTVWRKLAR

SEQ ID NO: 190554 - protein, 153 aa, Zea Mays
MVLLLLYHSILLRVAGAGDSSSTDSPGGSLRRAHRDRGSTMAANFWTSSHCKQLLDPEDVDLVPAADRERGITPEEFRLIKIHMSFHIWRLAQQVKVRQRVVATAIAYFRRVYTRKSMSDYDPRLVAPTCLYLASKVPMISIGLKLRIFLKWK

SEQ ID NO: 190555 - protein, 222 aa, Zea Mays
MPYQYKHLMISDIWRLAQQVKVRQRVVATAIAYFRRVYTRKSMSDYDPRLVAPTCLYLASKVEESTVQARLLVFYIKKMCGSDDKYRFEIKDILEMEMKLLEALDYYLVVFHPYRPLLQLLQDAGITDLTQFAWGLVNDTYKMDLILIYPPYMIALACIYIASVLKDKDTTAWFEELRVDMNIVKNISMEILDFYDTYKIDPQRGIPEDKISPVMNKLPAKA

SEQ ID NO: 190556 - protein, 80 aa, Zea Mays
MYLLIVFLPLLGSSVAGFFGRFLGSEGTAIMTTTCVSFEFGLGRTRQVMMKHEHVCFFVTAAKTAPALEHRNFTGISSKT

SEQ ID NO: 190557 - protein, 164 aa, Zea Mays
MSIIFLRTVQLSFTRKSYALLMVLSCFCSRWWDLMQNLSHCALFAIIVLHLKASTNSLVLSSSMTPARITTTDKKCLTCESTIIEVDFNKKTTPLQDGATLHEGCILCDDLLHSLIEMKHGKSFFIRRGRGRGRGRGRGRGSSRGRGRRGNSRYDDPKMSFRDF

SEQ ID NO: 190558 - protein, 677 aa, Zea Mays
MDNLVLPNKDESLSVDARQEIDLKVGVAFTRFQTRYFQGKYGNLDSRVISYGPCQTPTLGFCVQRHQQITTFKPEKFWSLKTYIIKDSDEIQLEWDRKKLFDFDVTVMFQKMVISDGTLKVADISVKEECKTRPSGLNTVNMLKVASSALGIGPQTAMHLAERLYTQGFISYPRTESTAYPSSFDFRGALAALLNNPLWSNDVRKLLDAGFVKPRQGHDAGDHPPITPMRTAIEFTSGGETFHCVGYRVTSKGFTSIMPWLAVSENSLPAFKKGDSVSIHKADIYEGSTTPPDYLTESELISLMEKNGIGTDASIPVHINNICERNYVQVNSGRRLVPTPLGTTLIRGYQCIDADLCLPDIRSFIEQQITLIAKGKADHLRVVQHVIQQFMKKYSYFVKKIENMDALFEAQFSPLADSGRLLSKCGKCGRYMKYISTQPMRLYCITCEDVYYLPQNGSIKLYKEIVCPLDGFELLLFSMVGPDAKSFPLCPFCYNCPPFEGIDKLFGALKLDDTGKVGKGAGMPCFLCPHPTCKQSMITQGVCACPECSGTLILDPVSAPKWRLYCNMCNCIVLLPHAAHRITTTDKKCLTCESTIIEVDFNKKTTPLQDGATLHEGCILCDDLLHSLIEMKHGKSFFIRRGRGRGRGRGRGRGSSRGRGRRGNSRYDDPKMSFRDF

SEQ ID NO: 190559 - protein, 267 aa, Zea Mays
MFQKMVISDGTLKVADISVKEECKTRPSGLNTVNMLKVASSALGIGPQTAMHLAERLYTQGFISYPRTESTAYPSSFDFRGALAALLNNPLWSNDVRKLLDAGFVKPRQGHDAGDHPPITPMRSATEASLGTDAWRLYQYICQHFIGTVSPDCRYTRTAIEFTSGGETFHCVGYRVTSKGFTSIMPWLAVSENSLPAFKKGDSVSIHKADIYEGSTTPPDYLTESELISLMEKNGIGTDASIPVHINNICERNYVQVNSGRRYQKLY

SEQ ID NO: 190560 - protein, 410 aa, Zea Mays
MQPKVIDCTGIPENEAGRRIFRARFSSVTEKDISSAMDNLVLPNKDESLSVDARQEIDLKVGVAFTRFQTRYFQGKYGNLDSRVISYGPCQTPTLGFCVQRHQQITTFKPEKFWSLKTYIIKDSDEIQLEWDRKKLFDFDVTVMFQKMVISDGTLKVADISVKEECKTRPSGLNTVNMLKVASSALGIGPQTAMHLAERLYTQGFISYPRTESTAYPSSFDFRGALAALLNNPLWSNDVRKLLDAGFVKPRQGHDAGDHPPITPMRSATEASLGTDAWRLYQYICQHFIGTVSPDCRYTRTAIEFTSGGETFHCVGYRVTSKGFTSIMPWLAVSENSLPAFKKGDSVSIHKADIYEGSTTPPDYLTESELISLMEKNGIGTDASIPVHINNICERNYVQVNSGRRYQKLY

SEQ ID NO: 190561 - protein, 75 aa, Zea Mays
MCPVCLCSYKLAPIELSVFLHMKVVNKSVCCPRKVRWIDCFCGYMKGLRLALWLVIKMVILMEATGYSGPTLPQY

SEQ ID NO: 190562 - protein, 57 aa, Zea Mays
MVLHVAHPVTCRHASFLCVVRFAARCSHMLCCFVCRQHAVSRVSVCRLHAVVLFRAS

SEQ ID NO: 190563 - protein, 51 aa, Zea Mays
MFGLQVAMRLMVLGIDSSNGKWYSFRLERSTFGLITWVKSKTWLSLLVIII

SEQ ID NO: 190564 - protein, 152 aa, Zea Mays
MSQKICQQFYGIGKYSYRFMQLGLACIPQSSGGLPFNTTFTHRRALLLTMKVKISEVILKLHTMSLPEQSLNNRRSYLLPDNKKNERIELKFKVPRYIIWKEVASCKEDNINGKDESIPFMLDFVSIAKYRANDIIIPDPVPQVSVTFVNRI

SEQ ID NO: 190565 - protein, 330 aa, Zea Mays
MSQKICQQFYGIGKYSYRFMQLGLACIPQSSGGLPFNTTFTHRRALLLTMKVKISEVILKLHTMSLPEQSLNNRRSYLLPDNKKNERIELKFKVPRYIIWKEVASCKEDNINGKDESIPFMLDFVSIAKYRANDIIIPDPVPQRVNGVFIDIYGKLVPILQNDSVWCFLRLLKDCSNKGMTWTFSITSETLTFMVNSNSLRCVKVVLEGKTPKLCGMHANPNCINSYGYFPIHKAADKFFCDMIKLLLRHGAPFDLHTVGNDVIENLLPLHVIVLNTCMHKYLEDNLSISKIFMDTIRLLAEKTNNLLEELWNYIENVKLIQSAVLLLAA

SEQ ID NO: 190566 - protein, 197 aa, Zea Mays
MRVCWSCWCQIGWWGNACMWSGNSFCPVKLCGIIDQFAQQPSLKESSSLNRLEIINKCFSKRTVEEIISALEVEASNSADEWVATTIQSLKKASPTSLKISLRSIREGRTQTVGECLQREYRMVCHVMRGDFSRDFFEGCRAILLDKDRNPKWMPPRLEQVHDEAVEQYFSRIDDPQWEDLNLPARRSHGRNIESKL

SEQ ID NO: 190567 - protein, 472 aa, Zea Mays
MVVTAPYDAHDRVLVGVVVAVSMPRGEVDMEGEGIEELEVVATISSSSGRELGREGTNWQREDMASLVIRDQRCFLVRRKRMTSMSPPSAAGDDSDQVLFLYILVEVNGFTRTLILNRPKQLNALSSTMIMGLLRCFTAYEKDDGVKLLIMKGKGRAFCAGGDVAAVVRSIHKDSWKYGADFFRNEFLLNYIIATYTKPQVSLLSGIVMGGGAGVSLHGRFRVATDNTVFAMPETALGLFPDIGASYFLSRLPGFYGEYVGLAGARLDGGEMLACGLATHFVQSNSLLSLEESLKKVDTSNAFAVCGIIDQFAQQPSLKESSSLNRLEIINKCFSKRTVEEIISALEVEASNSADEWVATTIQSLKKASPTSLKISLRSIREGRTQTVGECLQREYRMVCHVMRGDFSRDFFEGCRAILLDKDRNPKWMPPRLEQVHDEAVEQYFSRIDDPQWEDLNLPARRSHGRNIESKL

SEQ ID NO: 190568 - protein, 264 aa, Zea Mays
MGGGAGVSLHGRFRVATDNTVFAMPETALGLFPDIGASYFLSRLPGFYGEYVGLAGARLDGGEMLACGLATHFVQSNSLLSLEESLKKVDTSNAFAVCGIIDQFAQQPSLKESSSLNRLEIINKCFSKRTVEEIISALEVEASNSADEWVATTIQSLKKASPTSLKISLRSIREGRTQTVGECLQREYRMVCHVMRGDFSRDFFEGCRAILLDKDRNPKWMPPRLEQVHDEAVEQYFSRIDDPQWEDLNLPARRSHGRNIESKL

SEQ ID NO: 190569 - protein, 231 aa, Zea Mays
MGGGAGVSLHGRFRVATDNTVFAMPETALGLFPDIGASYFLSRLPGFYGEYVGLAGARLDGGEMLACGLATHFVQSNSLLSLEESLKKVDTSNAFAVCGIIDQFAQQPSLKESSSLNRLEIINKCFSKRTVEEIISALIREGRTQTVGECLQREYRMVCHVMRGDFSRDFFEGCRAILLDKDRNPKWMPPRLEQVHDEAVEQYFSRIDDPQWEDLNLPARRSHGRNIESKL

SEQ ID NO: 190570 - protein, 309 aa, Zea Mays
MEGRRLSRRQLRSLPDAASFSPEVAASPGLVGSGQLGLGLSAAFETLPPILVEVNGFTRTLILNRPKQLNALSSTMIMGLLRCFTAYEKDDGVKLLIMKGKGRAFCAGGDVAAVVRSIHKDSWKYGADFFRNEFLLNYIIATYTKPQVSLLSGIVMGGGAGVSLHGRFRVATDNTVFAMPETALGLFPDIGASYFLSRLPGFYGEYVGLAGARLDGGEMLACGLATHFVQSNSLLSLEESLKKVDTSNAFAVCGIIDQFAQQPSLKESSSLNRLEIINKCFSKRTVEEIISALRPQIRQMNGLLQQSSP

SEQ ID NO: 190571 - protein, 245 aa, Zea Mays
MEGRRLSRRQLRSLPDAASFSPEVAASPGLVGSGQLGLGLSAAFETLPPILVEVNGFTRTLILNRPKQLNALSSTMIMGLLRCFTAYEKDDGVKLLIMKGKGRAFCAGGDVAAVVRSIHKDSWKYGADFFRNEFLLNYIIATYTKPQVSLLSGIVMGGGAGVSLHGRFRVATDNTVFAMPETALGLFPDIGASYFLSRLPGFYGEYVGLAGARLDGGEMLACGLATHFVQSNCVVSSINLLNNHH

SEQ ID NO: 190572 - protein, 375 aa, Zea Mays
MEGRRLSRRQLRSLPDAASFSPEVAASPGLVGSGQLGLGLSAAFETLPPILVEVNGFTRTLILNRPKQLNALSSTMIMGLLRCFTAYEKDDGVKLLIMKGKGRAFCAGGDVAAVVRSIHKDSWKYGADFFRNEFLLNYIIATYTKPQVSLLSGIVMGGGAGVSLHGRFRVATDNTVFAMPETALGLFPDIGASYFLSRLPGFYGEYVGLAGARLDGGEMLACGLATHFVQSNVDTSNAFAVCGIIDQFAQQPSLKESSSLNRLEIINKCFSKRTVEEIISALIREGRTQTVGECLQREYRMVCHVMRGDFSRDFFEGCRAILLDKDRNPKWMPPRLEQVHDEAVEQYFSRIDDPQWEDLNLPARRSHGRNIESKL

SEQ ID NO: 190573 - protein, 263 aa, Zea Mays
MEGRRLSRRQLRSLPDAASFSPEVAASPGLVGSGQLGLGLSAAFETLPPILVEVNGFTRTLILNRPKQLNALSSTMIMGLLRCFTAYEKDDGVKLLIMKGKGRAFCAGGDVAAVVRSIHKDSWKYGADFFRNEFLLNYIIATYTKPQVSLLSGIVMGGGAGVSLHGRFRVATDNTVFAMPETALGLFPDIGASYFLSRLPGFYGEYVGLAGARLDGGEMLACGLATHFVQSNSLLSLEESLKKVGNHQQMLFQKDSRRNYIRS

SEQ ID NO: 190574 - protein, 369 aa, Zea Mays
MEGRRLSRRQLRSLPDAASFSPEVAASPGLVGSGQLGLGLSAAFETLPPGKGRAFCAGGDVAAVVRSIHKDSWKYGADFFRNEFLLNYIIATYTKPQVSLLSGIVMGGGAGVSLHGRFRVATDNTVFAMPETALGLFPDIGASYFLSRLPGFYGEYVGLAGARLDGGEMLACGLATHFVQSNSLLSLEESLKKVDTSNAFAVCGIIDQFAQQPSLKESSSLNRLEIINKCFSKRTVEEIISALEVEASNSADEWVATTIQSLKKASPTSLKISLRSIREGRTQTVGECLQREYRMVCHVMRGDFSRDFFEGCRAILLDKDRNPKWMPPRLEQVHDEAVEQYFSRIDDPQWEDLNLPARRSHGRNIESKL

SEQ ID NO: 190575 - protein, 110 aa, Zea Mays
MSRGRDPLALSQVIGDVLDPFIKSATMRINYGDKEITNGTGLRASAVLNAPHVEIEGHDQTKLYTLVMVDPDAPSPSKPEYREYLHWIGCSPLKKEGVFFSIHQHLKNSC

SEQ ID NO: 190576 - protein, 106 aa, Zea Mays
MSRGRDPLALSQVIGDVLDPFIKSATMRINYGDKEITNGTGLRASAVLNAPHVEIEGHDQTKLYTLVMVDPDAPSPSKPEYREYLHWLVTDIPEARDIRFVASGAM

SEQ ID NO: 190577 - protein, 101 aa, Zea Mays
MSRGRDPLALSQVIGDVLDPFIKSATMRINYGDKEITNGTGLRASAVLNAPHVEIEGHDQTKLYTLVMVDPDAPSPSKPEYREYLHWLVTDIPEARDIRFG

SEQ ID NO: 190578 - protein, 184 aa, Zea Mays
MYPPCDADGDGTNQGCDQVRLKFFPFHSYCLPLVEIRLALGFVCACDDPCGVSVCSHMYHPFDASGDGTDQGCDQVRLKFSPFHGYSLPLVEILRPVLGFVYACDDPCGASVCSHMYHPCDASGDGTDQGCDQVLLKFSAFHSYRLPLLEEILRPDLGFVCACDDLCHVPWTSSDCCTCCPPWY

SEQ ID NO: 190579 - protein, 445 aa, Zea Mays
MGGCHSAIAATKLKILRRGGRGAAAVLPVTNHDGPCCSSDHGSKEKKKKKKGARKGRKRASILGDAGTFDPDFSRRYRLGAELGRGEFGVTRRCEDAATGEALACKTIRRKRLLLRLAGPDATDVQREVEITRRMSEVSGGRVACLREACEDDDGVHLVMELCEGGELFDRIFERKHYSERAAAKLARTIVEVVQLCHENGVMHRDLKPENFLFVNKSEESPLKAIDFGLSVFFKPGDRFTEVVGSGCYMAPEVLKRSYGPEIDVWSAGVILHILLCGFPPFWGGSDEKIAQSILRGVINLQKDPWPKVSQSAKDLVTRMLDPDPCTRLTAKQVLEHPWLKNADKASNVSLGEVVRSRLKQLSSMNKLKKKALGVVAMNLPMEEIGKFKEMFHTMDKNKDGSLSLEELKEGFRINDHPVPEEEIKMLLQAVSARTTIWYSYIIQM

SEQ ID NO: 190580 - protein, 113 aa, Zea Mays
MELGRERERGRGVKKTRFKQAEKPPQDQPSSHKQQRERGYRGAILPSAERGEGKWTPGVPRRQIQMGGHARKRIDGGWAPGYSRWRRTWTTCGEWRRGPRQGLEFVGGLGLGE

SEQ ID NO: 190581 - protein, 206 aa, Zea Mays
MACDTGASYGSTLRYKSVERIKAVGKHSIIGASGEFSDFQEILRYLDELTLSDHMWDDGNSLGPKEIHSYLTRVMYNRRNKFDPLWNSLVLGGVKKGPKGDEKYLGMVNMIGTHFEENHVATGFGNHMAIPILRAEWRDDMTFEEAVKLVEKCLVVLLYRDRSSINKFQIAKITSEGSTIYPPYSLKTYWGFTHFENPAQGAVGSW

SEQ ID NO: 190582 - protein, 214 aa, Zea Mays
MSQEEQSHKHSISHIEEPNTNNSEGSLAGAAVWDVFRRQDLPKLNEYLAVHREECAARCQAVSSVKYPIYDQTVYLNDYHKKMLKDQYEGLKTIEQITMDSASVETNMFKLCKVRFVQFGQKGIPYLNTYDGRAIRYLDPLIKANDTIKIDLETNKIMDFIKFDVDNMVMVTGGRNTERVGVIKNREKHKGSFCCLELFAMSSFLLFVVQENLE

SEQ ID NO: 190583 - protein, 634 aa, Zea Mays
MSPALAAGVEPMAVDDSASKKAKRKQLKAAAAAAEAEAEAASVKKKEKKEKKRKVKEPSPPLPSAASSDEEEKSSTSSEETAPAAKKAKEKTKKNVDVSSSASDDDGEITASSDEDPADPNALTNFRISESLRQSLRSKGIKSLFPIQATTFDLVLDGSDLVGRARTGQGKTLAFVLPILESLVNGANKASRRTEHGRTPSVLVLLPTRELANQVHADFEFYGATFGLSACCVYGGSPYRPQEMALRRGVDIVVGTPGRVKDFIVKGTLNLKCLKFRVLDEADEMLNMGFVDDVELILGKVEDATKVQTLLFSATLPEWVNKLSMRFLKVDRKTVDLVGNEKLKASASVKHLALPCNKAARAQVIPDIIRCYSHGGRTIIFTETKDSASELSGLIHGSRALHGDVAQAQREVILAGFRSGKFQVLVATNVAARGLDINDVQLIIQCEPPRDVEAYIHRSGRTGRAGNTGVAVMLYEPRYKHSVSRLERESGVKFEHISAPQPTDVAQSAGSEAADAIASVSDSVIPIFRQQAEQLLSSSSLSAADLLAKALAKAVGYTDIKKRSLLSSLEDYSTLHLQTGRPMWSPGFAFTILKRFMPEDKLADVKGATLTADGTGVVFDVPAADVEDYIQGDN

SEQ ID NO: 190584 - protein, 595 aa, Zea Mays
MSPALAAGVEPMAVDDSASKKAKRKQLKAAAAAAEAEAEAASVKKKEKKEKKRKVKEPSPPLPSAASSDEEEKSSTSSEETAPAAKKAKEKTKKNVDVSSSASDDDGEITASSDEDPADPNALTNFRISESLRQSLRSKGIKSLFPIQATTFDLVLDGSDLVGRARTGQGKTLAFVLPILESLVNGANKASRRTEHGRTPSVLVLLPTRELANQVHADFEFYGATFGLSACCVYGGSPYRPQEMALRRGVDIVVGTPGRVKDFIVKGTLNLKCLKFRVLDEADEMLNMGFVDDVELILGKVEDATKVQTLLFSATLPEWVNKLSMRFLKVDRKTVDLVGNEKLKASASVKHLALPCNKAARAQVIPDIIRCYSHGGRTIIFTETKDSASELSGLIHGSRALHGDVAQAQREVILAGFRSGKFQVLVATNVAARGLDINDVQLIIQCEPPRDVEAYIHRSGRTGRAGNTGVAVMLYEPRYKHSVSRLERESGVKFEHISAPQPTDVAQSAGSEAADAIASVSDSVIPIFRQQAEQLLSSSSLSAADLLAKALAKAVGYTDIKKRSLLSSLEDYSTLHLQTGRPMWSPGCKGCHPHR

SEQ ID NO: 190585 - protein, 688 aa, Zea Mays
MSPALAAGVEPMAVDDSASKKAKRKQLKAAAAAAEAEAEAASVKKKEKKEKKRKVKEPSPPLPSAASSDEEEKSSTSSEETAPAAKKAKEKTKKNVDVSSSASDDDGEITASSDEDPADPNALTNFRISESLRQSLRSKGIKSLFPIQATTFDLVLDGSDLVGRARTGQGKTLAFVLPILESLVNGANKASRRTEHGRTPSVLVLLPTRELANQVHADFEFYGATFGLSACCVYGGSPYRPQEMALRRGVDIVVGTPGRVKDFIVKGTLNLKCLKFRVLDEADEMLNMGFVDDVELILGKVEDATKVQTLLFSATLPEWVNKLSMRFLKVDRKTVDLVGNEKLKASASVKHLALPCNKAARAQVIPDIIRCYSHGGRTIIFTETKDSASELSGLIHGSRALHGDVAQAQREVILAGFRSGKFQVLVATNVAARGLDINDVQLIIQCEPPRDVEAYIHRSGRTGRAGNTGVAVMLYEPRYKHSVSRLERESGVKFEHISAPQPTDVAQSAGSEAADAIASVSDSVIPIFRQQAEQLLSSSSLSAADLLAKALAKAVGYTDIKKRSLLSSLEDYSTLHLQTGRPMWSPGFAFTILKRFMPEDKLADVKGATLTADGTGVVFDVPAADVEDYIQASESAAQVTIDEVKQLPPLQEKDQSRGNSGGGRFGHGGGGRGFSGRGGGGSRFNRRN

SEQ ID NO: 190586 - protein, 667 aa, Zea Mays
MSPALAAGVEPMAVDDSASKKAKRKQLKAAAAAAEAEAEAASVKKKEKKEKKRKVKEPSPPLPSAASSDEEEKSSTSSEETAPAAKKAKEKTKKNVDVSSSASDDDGEITASSDEDPADPNALTNFRISESLRQSLRSKGIKSLFPIQATTFDLVLDGSDLVGRARTGQGKTLAFVLPILESLVNGANKASRRTEHGRTPSVLVLLPTRELANQVHADFEFYGATFGLSACCVYGGSPYRPQEMALRRGVDIVVGTPGRVKDFIVKGTLNLKCLKFRVLDEADEMLNMGFVDDVELILGKVEDATKVQTLLFSATLPEWVNKLSMRFLKVDRKTVDLVGNEKLKASASVKHLALPCNKAARAQVIPDIIRCYSHGGRTIIFTETKDSASELSGLIHGSRALHGDVAQAQREVILAGFRSGKFQVLVATNVAARGLDINDVQLIIQCEPPRDVEAYIHRSGRTGRAGNTGVAVMLYEPRYKHSVSRLERESGVKFEHISAPQPTDVAQSAGSEAADAIASVSDSVIPIFRQQAEQLLSSSSLSAADLLAKALAKAVGYTDIKKRSLLSSLEDYSTLHLQTGRPMWSPGFAFTILKRFMPEDKLADVKGATLTADGTGVVFDVPAADVEDYIQASESAAQVTIDEVKQLPPLQEKDQSRGGGSRFNRRN

SEQ ID NO: 190587 - protein, 423 aa, Zea Mays
MLNMGFVDDVELILGKVEDATKVQTLLFSATLPEWVNKLSMRFLKVDRKTVDLVGNEKLKASASVKHLALPCNKAARAQVIPDIIRCYSHGGRTIIFTETKDSASELSGLIHGSRALHGDVAQAQREVILAGFRSGKFQVLVATNVAARGLDINDVQLIIQCEPPRDVEAYIHRSGRTGRAGNTGVAVMLYEPRYKHSVSRLERESGVKFEHISAPQPTDVAQSAGSEAADAIASVSDSVIPIFRQQAEQLLSSSSLSAADLLAKALAKAVGYTDIKKRSLLSSLEDYSTLHLQTGRPMWSPGFAFTILKRFMPEDKLADVKGATLTADGTGVVFDVPAADVEDYIQASESAAQVTIDEVKQLPPLQEKDQSRGNSGGGRFGHGGGRRFSGGGGGGRGFSGRGGGGRGFSGRGGGGSRFNRRN

SEQ ID NO: 190588 - protein, 312 aa, Zea Mays
MASPRVNTNIAGHTYKYYASTTRFTAASTSTQTQLNPETKEPTSTPTSKLKQAATTSSDQRQPWTWAGTSSSSSTRPPRPPPRRRPRPSRTSRSAALVPRSAPRGAPSSGRRGTRCSAACGGGAPRGGGCARCASPGGAARGCGSAPTSAPRRRRARTTPRCSPWAAARPASTSPTPRGCSPCRPRPRSRAAWTAPAGPRSRPSRSSRDAASGRQPPTKRPRARLLPPPPPRRRSRRRRLSACLWRPVRRWRWTAPCSSPTGSGTWTWTCTMPASRKGCSWSRRHRHRPPPGIMVTAATPELTSRSGATSKL

SEQ ID NO: 190589 - protein, 133 aa, Zea Mays
MQQGEARCREARTWCGGCAQDVREWRFEEDEQCAAAAGRTAPTRLGLGARTCGGNGVGRSWAWSMGKLGLFHFFPILSLSFVLFYSFHHFKSNSLLNGCSTKSPIQQNKSMLRHDTKLEHLLRFYFTMLTHLH

SEQ ID NO: 190590 - protein, 334 aa, Zea Mays
MEKGAMARGKKENLMLPGSSIKKVPWWGGGGDGQTISEAGREVKEIEELEEKASFFRSWHVSWRGNSTFACLAYMSYMRVAIRFAYGCWPTRMVVWPVTDWKAATDSSFSQRTYSAIKLLFLQLSSMARDMCTLVRMEAFTALGKIQRVSEGVLLQSLEKKVRRTACKSLGALAKFSTQYTEKALDLLMDMMNDDTEAIWLQALEALFRMATYGCLSVQEKHMHMVLTTNILRSQMHDWSFQIDNYHGSGMVPLADLFLMMFYSTDVLEDDRILCDWQDLPFKNYAPLENDVNVHPVTFCFVSCHLKIKDPKKQFLVYGSSRARSCCNYPVSYN

SEQ ID NO: 190591 - protein, 68 aa, Zea Mays
MEQKLGCLKHPAVLSLVPPPLQELKPRLRSSASHPCWFLESITSLSDYYSSICLESKSSMHPAHVHVP

SEQ ID NO: 190592 - protein, 93 aa, Zea Mays
MSYEQLQALGEAVGIQSRGLSDELISYLEPFRNKCTFFSRKKNSEECVICKTTYRSRQKLIRLPCSHCYHADCITRWLKINKACPVCNEEVFG

SEQ ID NO: 190593 - protein, 231 aa, Zea Mays
MARPPKEAIDTFISITGADEAVAVRKLEEHGGDLNRAINSHFNDGDSILNGISQNAMPASRDDMMDLDGPLDNTFQRSLLPESFRAPFALMDPNFQDQFFDRVGSTDGVIREPLVSHPREVREIPIEVKDGDPQTGSSGQDVTGNESSNGPEVPETIIIDDVDGGLLSAPSVPHPIIPSNTSTVPTAPPLVHVNDYDEDIEEEMIRAAIEASKKDSEGLANSSKEASIKRK

SEQ ID NO: 190594 - protein, 259 aa, Zea Mays
MARPPKEAIDTFISITGADEAVAVRKLEEHGGDLNRAINSHFNDGDSILNGISQNAMPASRDDMMDLDGPLDNTFQRSLLPESFRAPFALMDPNFQDQFFDRVGSTDGVIREPLVSHPREVREIPIEVKDGDPQTGSSGQDVTGNESSNGPEVPETIIIDDVDGGLLSAPSVPHPIIPSNTSTVPTAPPLVHVNDYDEDIEEEMIRAAIEASKKDSEGLANIVEQGGQHQEEVNLRDHSSDKAGMETANGIVERKGWNI

SEQ ID NO: 190595 - protein, 261 aa, Zea Mays
MARPPKEAIDTFISITGADEAVAVRKLEEHGGDLNRAINSHFNDGDSILNGISQNAMPASRDDMMDLDGPLDNTFQRSLLPESFRAPFALMDPNFQDQFFDRVGSTDGVIREPLVSHPREVREIPIEVKDGDPQTGSSGQDVTGNESSNGPEVPETIIIDDVDGGLLSAPSVPHPIIPSNTSTVPTAPPLVHVNDYDEDIEEEMIRAAIEASKKDSEGLANIVEQGGQHQEEVNLRDHSSDKAGMETANGIVESFRKGWNI

SEQ ID NO: 190596 - protein, 522 aa, Zea Mays
MARPPKEAIDTFISITGADEAVAVRKLEEHGGDLNRAINSHFNDGDSILNGISQNAMPASRDDMMDLDGPLDNTFQRSLLPESFRAPFALMDPNFQDQFFDRVGSTDGVIREPLVSHPREVREIPIEVKDGDPQTGSSGQDVTGNESSNGPEVPETIIIDDVDGGLLSAPSVPHPIIPSNTSTVPTAPPLVHVNDYDEDIEEEMIRAAIEASKKDSEGLANIVEQGGQHQEEVNLRDHSSDKAGMETANGIVERQGLASEKAGTSRQPIDDESFQEEAEDVEEQPLVRRRSRRAPSEDNELPKIVHPGASPVLNNHQYNGDDFPSEWGGISSEEHDEAVMLEAAMFGGVPEGPTYPFSMPSHRTSTYYPPISHSPSPALTEQRLLREQQDDEYLASLQADQEKELKALQEAELRRLEETAAREAVLEKQKQEEEERRKKQLEEEELESSLTSKQASLPPEPSPDAEGAVTVVVRMPDGSRQGRRFLKTDKLQFLFDFLDIGRTCKPGTYRLLMTGDQAAILV

SEQ ID NO: 190597 - protein, 542 aa, Zea Mays
MLFVLIMDVLSSMFLLAEDRGLLHNLLEGNVRNIISIYADDVVLFVKPIVEDLNCVKVILDCFGSASGLVCNMNKSCAIPIKCSDQAVQQGCNLLLCSSASFPCNYLGLPISDRKLRKADLMDWVEKIADRLPNWKARLLNLAGRTTLVRFVLSAIPIYLLIAMSIPKWVIKSIDKIRRGFLWRGRKDVNGGNCLVSWDVVTRPLLFGGLGVPNLYYQSWALQAKWLWLEKTDSNRPWHGLMLPVPLQVRKFFHASVITAVGNGNNTLFWTDRWINGGCINDFAPDVVSKVDKIIVSTRTVAQALGGQQWISDILTPLSWMGIQQFLLIWDAVSTIVLTQEADIHTWLHTSSGQFSSRSCYRALFMGAITFEPWKRLWKSWAPPKCKFFLWLAIRNKCWTSDRLEKRGLDHPVSCLLCDQEQETIQHILCTCVFARQFWHSILFGLNVGNLSPSGDEISFADWWRKTSKKIHKSKRKGMNNIIILGAWCLWIHRNKAVFDGETPSLSSIRCVFLDEIGCWITAGAKHLQSFGLELARNLHSV

SEQ ID NO: 190598 - protein, 585 aa, Zea Mays
MAASIGRNNDVRPPLRELSNNTLEDECPDMSISDGSIIDCTIPCDTTPGGRDDARQRKRERERVRYATMSAEKKNELKKRRESRKKGNVMHHEYSEVCNIPANKDNNNHQNNEIEDVDDDSYQLHKNNSFEVHRRLGSEKLSTHLSDECPQVFVSDRSIKNLTIHCDNTLVALGQTSHQHDSNQSSEVLDPRERKRIRERTRFATQTKEQRALRNRESCNKMARKNYKRRQREIKLQDLIGIEDPKFTPELVWSSTDAEAPHGSLCSSEGMAIPELSPTPFVPNPSQTEDVEKDSMTESPRRQRHKRHVSSGQRQTLVSRQNQKFHLAIGTNFATATRDRVMENDVDNEIDHQTVSEIDNNESTGLCPFPHTESNNMTEGADIGMQHRAAPTVTTNDDVEDVLFTEDDDEVVLFEDDEDEGYLFAGQVQGELPQPPNAFGGQAIVLDVLLGLIFGSGLLPRNIRFDGLQITKDMKQPIFVYYQRDDFYQNYRRYVKSRNDAQLGDKIEKKDISCKSDRDHKFGSDVFPTNFQIGPLKGGKTLDPSIPLSKKEDLIVWMRTTALPTFRKLYGRIYVDLKENDTITV

SEQ ID NO: 190599 - protein, 448 aa, Zea Mays
MAASIGRNNDVRPPLRELSNNTLEDECPDMSISDGSIIDCTIPCDTTPGGRDDARQRKRERERVRYATMSAEKKNELKKRRESRKKGNVMHHEYSEVCNIPANKDNNNHQNNEIEDVDDDSYQLHKNNSFEVHRRLGSEKLSTHLSDECPQVFVSDRSIKNLTIHCDNTLVALGQTSHQHDSNQSSEVLDPRERKRIRERTRFATQTKEQRALRNRESCNKMARKNYKRRQREIKLQDLIGIEDPKFTPELVWSSTDAEAPHGSLCSSEGMAIPELSPTPFVPNPSQTEDVEKDSMTESPRRQRHKRHVSSGQRQTLVSRQNQKFHLAIGTNFATATRDRVMENDVDNEIDHQTVSEIDNNESTGLCPFPHTESNNMTEGADIGMQHRAAPTVTTNDDVEDVLFTEDDDEVVLFEDDEDEGYLFAGQGSPFNQCSWKWSKLPFWTFVA

SEQ ID NO: 190600 - protein, 105 aa, Zea Mays
MVARGQGGDRAEEEAAARWESEKEAEIDYVFKVVVVGDAAVGKTQLLARFARDEFALDSKPTIGVEFQTRTLTLHRKRVKTQIWDTAGQERISLPRLQGRRGLRA

SEQ ID NO: 190601 - protein, 142 aa, Zea Mays
MVVYDVTRRATFEHVARWVEELRAHADGSTVVALIGNKADMPAARREVPADEAARLAEDQGLFFSEASALTGDNVERAFLTLLEEVFAAVSRRALELDEARRMRGDQGDGGGEVLSLKGTAVDVGSIMETSAMKRSSQCACS

SEQ ID NO: 190602 - protein, 276 aa, Zea Mays
MTECSIPSSDGATHLPPLSSAAAAVEAHFQAHWSALDAAARQDPARVIAVGDWRSPLELPFLWLGDVPWCRLRQAASPPIRPHLRQPRRSQQVRAQLQAYQKIYIFFNDVIHYGSTSRRYRAVTSAYYRGALGAMVVYDVTRRATFEHVARWVEELRAHADGSTVVALIGNKADMPAARREVPADEAARLAEDQGLFFSEASALTGDNVERAFLTLLEEVFAAVSRRALELDEARRMRGDQGDGGGEVLSLKGTAVDVGSIMETSAMKRSSQCACS

SEQ ID NO: 190603 - protein, 155 aa, Zea Mays
MAPPTSPRSPPPPRLSRLTSRRTGPRSTLPHARTRRGSSPWGTGGPRSSSPSCGLGMSPGVVSVRLQVHQFGLICDNLDAVNKFEPNYRLIRRYISSSTMLFTTGPLLEGAFTIEVLIWADWTSCPENKSSSHILSVLYFLSFSPFHLRTDMHSA

SEQ ID NO: 190604 - protein, 135 aa, Zea Mays
MTECSIPSSDGATHLPPLSSAAAAVEAHFQAHWSALDAAARQDPARVIAVGDWRSPLELPFLWLGDVPWCRLRQAASPPIRPHLRQPRRSQQVRAQLQAYQKVHYYCSYPFFPPFGQQRNVMSSMFNPYYPSLCN

SEQ ID NO: 190605 - protein, 79 aa, Zea Mays
MLTFSILPFLSILFPFAPVRLASSNLSQSVKIRVGGICTKCVSTLLLRGLVANPNEDNVINVNRQDQSGAAKACVGPNP

SEQ ID NO: 190606 - protein, 73 aa, Zea Mays
MSWPLSRSPRRIAQEDLRCSRRCRAAQVVRAFPSVLVVEEWKIGEEAAHFVRAQEKESHVLACAVTAERNKSM

SEQ ID NO: 190607 - protein, 70 aa, Zea Mays
MERRESFSASQTPAQHLFPRSREGDHNTRATSIKHTPISMLPNGPRTQNDQRVETLRQRLAHHLSTLLPP

SEQ ID NO: 190608 - protein, 301 aa, Zea Mays
MRQSSCLRTSYEACKKVSAGSSMYQSRTLPQDLINELPEACIAEIFRHVGNPEDRQSCACVCWRRANILVPQRPDFWGPFSVHQGVHPCLHMSDVDDVKLAAAVVNICARGVITDLGLCCAPCGTVVAGVPRLTDSAIHFVSSACGNLKSVCLVDCLSLTDKAARIIASNCPALENFVMLQSSISDDGLPQVAKQCRNLKFLHIEGCLSITEASLRALMQYAKRLESLTLGSCPQIGQDAILSLLMNQPYLDKLELKGMMAGESHMNVARQSSVLHHLCLFRQLSTLILVKCSGLWDLGNA

SEQ ID NO: 190609 - protein, 510 aa, Zea Mays
MEQKDTVQSQLDNFRRVTSDGNFNDHATRQWDQSNRSSESLPCSASEDTLSFDTYSDVYEEQDDLGSKGFDVSHVYNDYHHDVYHQKVDEHPMSSLHQPRNHISNRTQMYQPNRETSPEVPKEHCKEVQCIKINEFRRSRSDEEKHGENITYTSEGAIKLYTCDSEPSSDTEKTNNDESLVLKRCVISSRDSVLTRSRSCRASFMVIPNSWFDDSADMRMTPPGDILKYPHRRLEKVRRSMYSENGHCQNDLTLDCPVVSGKVASDMVIDKNTCNEEDGYANNKFSCITKVKEKQEDYCTSQLEGNQDNVTAEILDMKHAKNIDKDIFVANIDSPSRWPINFEKKQKEIIELWHECNVSIVHRTYFFLLFKGVKADNIYLEVEHRRLSFIHSSFIAGCEPNVTVTSSLRNLRHERDMLYKQMLRRLHLLERESLYSKWGIDLNSKQRRLQLSRRIWTQTDMEHVRESAALVIKLVEHLEKGQAIKEMFGLSFTLNQRAIQRPFSWVSANS

SEQ ID NO: 190610 - protein, 799 aa, Zea Mays
MVGITERSMADIYDYIDKHPEREFVLKFSAMEIYNEAVRDLLRPDATQLRLLDDPEKGTVVEKLTEETLRDKGHLLELLAVCEAQRQIGETAMNETSSRSHQILRLTIESSAKQFMGRGKSSTLLACVNFVDLAGSERASQTQSAGVRLKEGSHINRSLLTLGKVIRQLSKGRNGHIPYRDSKLTRILQSSLGGNARTAIICTMSPAHSHIEQSRNTLLFANCAKNVVTDAKVNVVMSDKVLLKHLQREIARLENELKFPRPTSCSNYAEALREKDELIKQLEGQLKELMEQKDTVQSQLDNFRRVTSDGNFNDHATRQWDQSNRSSESLPCSASEDTLSFDTYSDVYEEQDDLGSKGFDVSHVYNDYHHDVYHQKVDEHPMSSLHQPRNHISNRTQMYQPNRETSPEVPKEHCKEVQCIKINEFRRSRSDEEKHGENITYTSEGAIKLYTCDSEPSSDTEKTNNDESLVLKRCVISSRDSVLTRSRSCRASFMVIPNSWFDDSADMRMTPPGDILKYPHRRLEKVRRSMYSENGHCQNDLTLDCPVVSGKVASDMVIDKNTCNEEDGYANNKFSCITKVKEKQEDYCTSQLEGNQDNVTAEILDMKHAKNIDKDIFVANIDSPSRWPINFEKKQKEIIELWHECNVSIVHRTYFFLLFKGVKADNIYLEVEHRRLSFIHSSFIAGCEPNVTVTSSLRNLRHERDMLYKQMLRRLHLLERESLYSKWGIDLNSKQRRLQLSRRIWTQTDMEHVRESAALVIKLVEHLEKGQAIKEMFGLSFTLNQRAIQRPFSWVSANS

SEQ ID NO: 190611 - protein, 130 aa, Zea Mays
MESSPNLLSGRIPAECDGSTRMKSQLLVVCRSRTRFRTTRTTPGEPFDATVQIEPERTGERQGFRQHHTHMEAEGLSMQKRRRVKRELTGEPRRLAVRQHGGEPGEAVPVAVKDGVLGRLLAAEFDTATR

SEQ ID NO: 190612 - protein, 158 aa, Zea Mays
MASATPCDGGTGKPDAAPAPTPAPTPLPPEKPLPGDCCGSGCVRCVWDIYFDELDAYDKALAARAASSGSGGKDDSADTKPKEGLQLGCIDLRRATTPEMWGQDIEVPESILNFTDPMADDMAAAGVHAAKMLTPGAAMSGCRRRCRVFSASQLELEV

SEQ ID NO: 190613 - protein, 651 aa, Zea Mays
METVSVEHWCSKETNLVTLGIAGIIIPWRSDRKGKNGNQEAAAMKNLKSILPKEVFDAITASQQESGTLSVDFFRNHASPSWKTDDLVTEKSMDVNDNAKAENSLLEHSVPTNRSPKDPDEHQVDKAAKVARRKLREKRREKRAMDLVHKDDEARIKLENAAIERSKAVDSAVLGKYSIWRKENENENSDSTVRLMRDQIIMARVYSTLAKSKNKNDLYQKLQTRIRESQRAVGEANADADLHHSAPEKIRAMGQVLSKAREELYDCTAITQRIRAMLQSADEQVRSLKKQSTFLSQLAAKTIPNSIHCLSMRLTIDYYILPLEERKFPRSENLENPNLYHYALFSDNVLAASVVVNSTIMNAKEPEKHVFHLVTDKLNFGAMNMWFLLNPPGKATIHVENVDEFKWLNSSYCPVLRQLESAAMKEYYFKADRPTTLSAGSSNLKYRNPKYLSMLNHLRFYLPEVYPKLDKILFLDDDIVVQKDLTGLWDVDLNGKVNGAVETCGESFHRFDKYLNFSNPHIARNFDPNACGWAYGMNIFDLREWKKKDITGIYHKWQNMNEDRVLWKLGTLPPGLLTFYKLTHPLDKSWHVLGLGYNPSIDRSEIDNAAVVHYNGNMKPWLELAMTKYRPYWTKYIKYDHPYIRGCNLSE

SEQ ID NO: 190614 - protein, 273 aa, Zea Mays
MAAATAAASTMSLLPISQLRQQHGAGAMRRRPWVARRRRYVVPTARLFGPAIFEASKLKVLFLGVDDEAGSKQHGPLPRTYTLTHSDVTARLTLAVSHTINRAQLQGWYNRLQRDEVVAEWKKVRGRMSLHVHCHISGGHFLLDLIAGLRYVIFRKELPVAFVHGDGDLFSRHPELEEATVWVYFHSNLARFNRVECWGPLRDAAAPAEDDSAAPADSSNSKDGQMMAMCEWPHRCPQQCDCCFPPHSLIPWPNEHDMATAAAADASGSAQQQ

SEQ ID NO: 190615 - protein, 529 aa, Zea Mays
MSGFLLLSTIMEHDASKNIPVIMMSSHDSVSMVFKCMLKGAADFLVKPIRKNELRNLWQHVWRKQLANGGPNVQHIQREENLAERIQQKTGVTKSDNLDRDVPCKNRECSEQESDAQSSCTRSELEAESKQTDNILEYKQSTQRHLSIPSHKNVELNGQTKIQRAEGNNLIPAREDDLSPKKRTCLNENNSERASRDMELVHIMENQQKYNTQWEVDTMRTTSRGNDEKGSIPAHQLELSLRRTDYGKLENHEKNDRRTLNHSTSSAFSLYNCRAVPTLGNAGDGQLCSTSETLVDVENKNGDSADPSQDMTETNRPPIRVVPVPVQGLTFDGQPFWNGTPVASLFYSQSTPPIWNSKTSMWQESTPQATSLPQKSPQNEPNEMGAKPVINAGEQFAMGPPSASGKQLHVEILNDDPRHISPMTGESGISTVLDSTRNTLSSSGCDSISNQITAPTESSNVYKDVPETPSAEGSRHLSQREAALNKFRLKRKDRCFEKKVRYQSRKLLAEQRPRVKGQFVRQDHSIQGS

SEQ ID NO: 190616 - protein, 585 aa, Zea Mays
MRWMRFARVYIHTIRSAQGGRFFLIAAASDGVKAWDLLKEKSFNVDLVLTEVELPLMSGFLLLSTIMEHDASKNIPVIMMSSHDSVSMVFKCMLKGAADFLVKPIRKNELRNLWQHVWRKQLANGGPNVQHIQREENLAERIQQKTGVTKSDNLDRDVPCKNRECSEQESDAQSSCTRSELEAESKQTDNILEYKQSTQRHLSIPSHKNVELNGQTKIQRAEGNNLIPAREDDLSPKKRTCLNENNSERASRDMELVHIMENQQKYNTQWEVDTMRTTSRGNDEKGSIPAHQLELSLRRTDYGKLENHEKNDRRTLNHSTSSAFSLYNCRAVPTLGNAGDGQLCSTSETLVDVENKNGDSADPSQDMTETNRPPIRVVPVPVQGLTFDGQPFWNGTPVASLFYSQSTPPIWNSKTSMWQESTPQATSLPQKSPQNEPNEMGAKPVINAGEQFAMGPPSASGKQLHVEILNDDPRHISPMTGESGISTVLDSTRNTLSSSGCDSISNQITAPTESSNVYKDVPETPSAEGSRHLSQREAALNKFRLKRKDRCFEKKVRYQSRKLLAEQRPRVKGQFVRQDHSIQGS

SEQ ID NO: 190617 - protein, 599 aa, Zea Mays
MGGGLDEAVKVVDLEDGEGEEEAEAAAAEGSSMEMGMLPRMPVRVLLAEGDDSTRHVISALLRKCGYRASDGVKAWDLLKEKSFNVDLVLTEVELPLMSGFLLLSTIMEHDASKNIPVIMMSSHDSVSMVFKCMLKGAADFLVKPIRKNELRNLWQHVWRKQLANGGPNVQHIQREENLAERIQQKTGVTKSDNLDRDVPCKNRECSEQESDAQSSCTRSELEAESKQTDNILEYKQSTQRHLSIPSHKNVELNGQTKIQRAEGNNLIPAREDDLSPKKRTCLNENNSERASRDMELVHIMENQQKYNTQWEVDTMRTTSRGNDEKGSIPAHQLELSLRRTDYGKLENHEKNDRRTLNHSTSSAFSLYNCRAVPTLGNAGDGQLCSTSETLVDVENKNGDSADPSQDMTETNRPPIRVVPVPVQGLTFDGQPFWNGTPVASLFYSQSTPPIWNSKTSMWQESTPQATSLPQKSPQNEPNEMGAKPVINAGEQFAMGPPSASGKQLHVEILNDDPRHISPMTGESGISTVLDSTRNTLSSSGCDSISNQITAPTESSNVYKDVPETPSAEGSRHLSQREAALNKFRLKRKDRCFEKKVSN

SEQ ID NO: 190618 - protein, 67 aa, Zea Mays
MLAFFLLGEGGQSDSCSFMTVWHRERMEAPAISRLAWKWNWNCTTDVMQTQDDETKPCSSVDKCVPY

SEQ ID NO: 190619 - protein, 864 aa, Zea Mays
MRSLNLGFSVGCLLLSVKLVEQELWQKEEKGLIGVLPVRDSEATAVGSLLSPGVGSDSGEGGSKVGGSAVESSKQDTKNGKEPIHWHSKGVAARALHLSRGVEKPSGRVTYIVVLEGLCRFSVQELSARGPYHVARVSRLDMTKTELEQAEQDPDLIALSRQFKATAMELISVLEQKQKTVGRTKVLLDTVPVYRLADIFVASFEISFEEQLSMLDSVHLKVRLSKATELVDRHLQSILVAEKITQKVEGQLSKSQKEFLLRQQMRAIKEELGDNDDDEDDVAALERKMQNAGMPANIWKHAQREMRRLRKMQPQQPGYSSSRAYLELLADLPWQKVSEERELDLRVAKESLDQDHYGLTKVKQRIIEYLAVRKLKPDARGPVLCFVGPPGVGKTSLASSIAKALNRKFIRISLGGVKDEADIRGHRRTYIGSMPGRLIDGLKRVSVSNPVMLLDEIDKTGSDVRGDPASALLEVLDPEQNKAFNDHYLNVPFDLSKVIFVATANRMQPIPPPLLDRMEIIELPGYTPEEKLKIAMKHLIPRVLEQHGLSTTNLQIPEAMVKLVIERYTREAGVRNLERNLAALARAAAVKVAEQVKTLRLGKEIQPITTTLLDSRLADGGEVEMEVIPMEHDISNTYENPSPMIVDEAMLEKVLGPPRFDDREAADRVASPGVSVGLVWTSVGGEVQFVEATAMVGKGDLHLTGQLGDVIKESAQLALTWVRARAADLNLSPTSDINLLESRDIHIHFPAGAVPKDGPSAGVTLVTALVSLFSNRKVRADTAMTGEMTLRGLVLPVGGVKDKVLAAHRYGIKRVILPERNLKDLSEVPLPILSDMEILLVKRIEEVLDHAFEGRCPLRSRSKL

SEQ ID NO: 190620 - protein, 381 aa, Zea Mays
MITSYLNVPFDLSKVIFVATANRMQPIPPPLLDRMEIIELPGYTPEEKLKIAMKHLIPRVLEQHGLSTTNLQIPEAMVKLVIERYTREAGVRNLERNLAALARAAAVKVAEQVKTLRLGKEIQPITTTLLDSRLADGGEVEMEVIPMEHDISNTYENPSPMIVDEAMLEKVLGPPRFDDREAADRVASPGVSVGLVWTSVGGEVQFVEATAMVGKGDLHLTGQLGDVIKESAQLALTWVRARAADLNLSPTSDINLLESRDIHIHFPAGAVPKDGPSAGVTLVTALVSLFSNRKVRADTAMTGEMTLRGLVLPVGGVKDKVLAAHRYGIKRVILPERNLKDLSEVPLPILSDMEILLVKRIEEVLDHAFEGRCPLRSRSKL

SEQ ID NO: 190621 - protein, 591 aa, Zea Mays
MSDSPVELPSRLAVLPFRNKVLLPGAIVRIRCTNPSSVKLVEQELWQKEEKGLIGVLPVRDSEATAVGSLLSPGVGSDSGEGGSKVGGSAVESSKQDTKNGKEPIHWHSKGVAARALHLSRGVEKPSGRVTYIVVLEGLCRFSVQELSARGPYHVARVSRLDMTKTELEQAEQDPDLIALSRQFKATAMELISVLEQKQKTVGRTKVLLDTVPVYRLADIFVASFEISFEEQLSMLDSVHLKVRLSKATELVDRHLQSILVAEKITQKVEGQLSKSQKEFLLRQQMRAIKEELGDNDDDEDDVAALERKMQNAGMPANIWKHAQREMRRLRKMQPQQPGYSSSRAYLELLADLPWQKVSEERELDLRVAKESLDQDHYGLTKVKQRIIEYLAVRKLKPDARGPVLCFVGPPGVGKTSLASSIAKALNRKFIRISLGGVKDEADIRGHRRTYIGSMPGRLIDGLKRVSVSNPVMLLDEIDKTGSDVRGDPASALLEVLDPEQNKAFNDHYLNVPFDLSKVIFVATANRMQPIPPPLLDRMEIIELPGYTPEEKLKIAMKHLIPRVLEQHGLSTTNLQIPEVLHSWSFCCYLS

SEQ ID NO: 190622 - protein, 614 aa, Zea Mays
MSDSPVELPSRLAVLPFRNKVLLPGAIVRIRCTNPSSVKLVEQELWQKEEKGLIGVLPVRDSEATAVGSLLSPGVGSDSGEGGSKVGGSAVESSKQDTKNGKEPIHWHSKGVAARALHLSRGVEKPSGRVTYIVVLEGLCRFSVQELSARGPYHVARVSRLDMTKTELEQAEQDPDLIALSRQFKATAMELISVLEQKQKTVGRTKVLLDTVPVYRLADIFVASFEISFEEQLSMLDSVHLKVRLSKATELVDRHLQSILVAEKITQKVEGQLSKSQKEFLLRQQMRAIKEELGDNDDDEDDVAALERKMQNAGMPANIWKHAQREMRRLRKMQPQQPGYSSSRAYLELLADLPWQKVSEERELDLRVAKESLDQDHYGLTKVKQRIIEYLAVRKLKPDARGPVLCFVGPPGVGKTSLASSIAKALNRKFIRISLGGVKDEADIRGHRRTYIGSMPGRLIDGLKRVSVSNPVMLLDEIDKTGSDVRGDPASALLEVLDPEQNKAFNDHYLNVPFDLSKVIFVATANRMQPIPPPLLDRMEIIELPGYTPEEKLKIAMKHLIPRVLEQHGLSTTNLQIPEAMVKLVIERYTREAGVRNLERNLAALARAAAVKAC

SEQ ID NO: 190623 - protein, 124 aa, Zea Mays
MSRCGFTVVGATQSKYTTEGRRSPRMRKQAAKGSSISTHPARTQTWLRAPWWVGRSRTTPSWTPVTTPCRRSPAPTTVAPWSVSSPASSPLPPWYSRSPRGLLLCSGLERCVYEYDCSFFAWRG

SEQ ID NO: 190624 - protein, 344 aa, Zea Mays
MTEKRPLTQINKKTPGSDVAAEAAAAMAAASMVFKSRDTTYSDVLLQHAQKLFTFADTYRGLSSESYPKLQDFYNSTSYVDELLWAASWLYHATGDQTYLSYVTVQNGKSYADWGRPTWFSWDDKNPGTQVLLSRLNFFGSKQISNAENEGLKMYRDTAEAVICGLIPDSPQATASRTGGGLVWISGWNSLQHATNAAFLSVVYSDYMLSTRTAAVQCSGKYYSPTDIRNFAASQANYILGDNPMKLSYLVGYGSSYPKQVHHRGASIPADAKTGCKGFEYLHSPSPNPNVATGALVGGPFQNDTFVDSRDNAVQTESSTYNSGTLVGLLSGLVTTSSVVQSFT

SEQ ID NO: 190625 - protein, 169 aa, Zea Mays
MDADDPSAATASSSDETFFDALDSLPSPSPSPSPSPSPSPSPSHISSSTLHRRPRRAKSVKQPDSILSSPPSASAATSTVTAVEDEHLKPDSSEATSATSRTDPAPKEEEEQEEEEEEDIKATDVDAVVEVEAPAPTATPSPAPSILEYLAVLVVKAVVFQSFSPPMAK

SEQ ID NO: 190626 - protein, 109 aa, Zea Mays
MKAFADSISNWADVVIAYEPVWAIGTGKVATPEQAQEVHAAVRDWLTTNISPDVASSTRIIYGGSVNAANCAELAKKEDIDGFLVGGASLKAPDFATIINSVTAKKVAA

SEQ ID NO: 190627 - protein, 254 aa, Zea Mays
MAAAPSSLVSSHLSRLADLRRAAAPATPTVPQQLRVGFSRRRAQRVVAMAGSGKFFVGGNWKCNVWIGKGGAYTGEISAEQLVDIGCQWVILGHSERRHIIGENDEFIGKKAAYALSQNVKVIACIGELLEEREAGKTFEVCFEQMKAFADSISNWADVVIAYEPVWAIGTGKVATPEQAQEVHAAVRDWLTTNISPDVASSTRIIYGGSVNAANCAELAKKEDIDGFLVGGASLKAPDFATIINSVTAKKVAA

SEQ ID NO: 190628 - protein, 321 aa, Zea Mays
MNHFKRGNSENLSKWKGGRSSKLEGSDHIPVYILLKEIPELPVHNIPPSAARYLPEIRGRQQSIVSFLDKGKIYELQNAANLIQSEDTVLDSYCSDGLENTILAKKGLATGITEFAKGGNLPSLMCKGTDLNQWINEGLMGISHVSQKKSLSSTKFVPQKKIKRNLSSQPTIKSFFQRPGSKTVNASTSTLVTPAETLDLTNQACVSNGDTLPENMQCTTSAAKVQDNTDASSCSLSTDKSNAAALEWQRIQKKMKMTLPRCKGHSEPCIPRSVKKGPNIGRLFYVCARAQGPASNPEANCGHFQWAPGKSKEKSSKEKRL

SEQ ID NO: 190629 - protein, 613 aa, Zea Mays
MVKIVTYNVNGLRPRVAQHGSLRCLLDALDADIICFQETKLSRQDLSADVIMADGYEAFVSCNRSSKGRGAYSGVATFCRVTSSFSSQEVALPVAAEEGFTGLQDYAKNSQTVGDFSIAMPVEEEGLGELTREDLLRVDNEGRCIITDHGHFAVDGDDKERVRFKLLFYKILQKRWERLLALGKRVFVVGDLNIAPASIDRCDAAPGFEKQMFREWLRSMLREHGGPFFDAFRSKHPERTGAYTCFNQKIGAEEYNYGSRIDHILISGSCLHRCDSVEDHSIFCCHVEECEIMNHFKRGNSENLSKWKGGRSSKLEGSDHIPVYILLKEIPELPVHNIPPSAARYLPEIRGRQQSIVSFLDKGKIYELQNAANLIQSEDTVLDSYCSDGLENTILAKKGLATGITEFAKGGNLPSLMCKGTDLNQWINEGLMGISHVSQKKSLSSTKFVPQKKIKRNLSSQPTIKSFFQRPGSKTVNASTSTLVTPAETLDLTNQACVSNGDTLPENMQCTTSAAKVQDNTDASSCSLSTDKSNAAALEWQRIQKKMKMTLPRCKGHSEPCIPRSVKKGPNIGRLFYVCARAQGPASNPEANCGHFQWAPGKSKEKSSKEKRL

SEQ ID NO: 190630 - protein, 413 aa, Zea Mays
MRGGASSLIMDILFFSTYTAQLLTEMIKSVFVLSYYFTRYCRWERLLALGKRVFVVGDLNIAPASIDRCDAAPGFEKQMFREWLRSMLREHGGPFFDAFRSKHPERWKGGRSSKLEGSDHIPVYILLKEIPELPVHNIPPSAARYLPEIRGRQQSIVSFLDKGKIYELQNAANLIQSEDTVLDSYCSDGLENTILAKKGLATGITEFAKGGNLPSLMCKGTDLNQWINEGLMGISHVSQKKSLSSTKFVPQKKIKRNLSSQPTIKSFFQRPGSKTVNASTSTLVTPAETLDLTNQACVSNGDTLPENMQCTTSAAKVQDNTDASSCSLSTDKSNAAALEWQRIQKKMKMTLPRCKGHSEPCIPRSVKKGPNIGRLFYVCARAQGPASNPEANCGHFQWAPGKSKEKSSKEKRL

SEQ ID NO: 190631 - protein, 480 aa, Zea Mays
MRGGASSLIMDILFFSTYTAQLLTEMIKSVFVLSYYFTRYCRWERLLALGKRVFVVGDLNIAPASIDRCDAAPGFEKQMFREWLRSMLREHGGPFFDAFRSKHPERTGAYTCFNQKIGAEEYNYGSRIDHILISGSCLHRCDSVEDHSIFCCHVEECEIMNHFKRGNSENLSKWKGGRSSKLEGSDHIPVYILLKEIPELPVHNIPPSAARYLPEIRGRQQSIVSFLDKGKIYELQNAANLIQSEDTVLDSYCSDGLENTILAKKGLATGITEFAKGGNLPSLMCKGTDLNQWINEGLMGISHVSQKKSLSSTKFVPQKKIKRNLSSQPTIKSFFQRPGSKTVNASTSTLVTPAETLDLTNQACVSNGDTLPENMQCTTSAAKVQDNTDASSCSLSTDKSNAAALEWQRIQKKMKMTLPRCKGHSEPCIPRSVKKGPNIGRLFYVCARAQGPASNPEANCGHFQWAPGKSKEKSSKEKRL

SEQ ID NO: 190632 - protein, 66 aa, Zea Mays
MFKPFNGEILVGRITGYDDKGLQVSLEFFSDICIPGHLMQFGTVRLCTTCFANLLSQLINYHYCSK

SEQ ID NO: 190633 - protein, 172 aa, Zea Mays
MLGGLEQSTGPFLAYRAPQVVKPYLHLVPPPSPARLPIDAQAALRLLPVGRERGAPALPPAINSPHPITAPPSSIGSSVVGCYRQAGRMFSLSQIEHDLPMPPHLLSRPLPDAIKAELERLFLDKVITKLGLCVSVYDIRSIEGGSIHPGEGCSTYKVTRAFSFSYVMFLVQ

SEQ ID NO: 190634 - protein, 350 aa, Zea Mays
MIQLIEPFTHNKKTVDIRGRSEGTPKKRKTRKKDGLVNSSETLTASDKECSDTGGSTEAPMKNSALTDALGGRQIGKVYVSNKEIGRGSNGTIVFEGSYDGRQVAVKRLLRSHNDIAEKETRNLIISDHDPNIVRLYGCDHDSDFVYISLERCHCSLADLIQKQSYLSSGESISNNEVSMSINSKISNVKGIDVELWTQDGLPSAQLLKLMRDVVAGLVHLHNLGIIHRDLKPQNVLISAEGPIRAKLSDMGISKHLQDDMTSVSHHGIGSSGWQAPEQLRHGRQTRAMDLFSLGCLIFYCITKGKHPFGEYYERDTNIVNNRFDLFVVDYIPEAVHLISQLLQPNPETR

SEQ ID NO: 190635 - protein, 662 aa, Zea Mays
MSRFLSPSSPSNPLPLSEKKVILSGVQAPTRSGPPPPPPNKLGHAQQLMRSLRGVLIPLVLLAGLAFRVDDGGAALLPLPPPALPASPSRLALPGGTPKDDGAAASRSTEVVTAGVRSTEIVAPVGPKKQSLRELLVRPQPARHEPSSLVSGEAKAETRSVLQFYDNGTIQLVDKLSQSPLWEIATGPPLSDHITTTESGPNYLIYPFNGNENMNGNSTELWEVYNGNSVRLPWKLEEFVARSPYIRDSVVTIGSKVSTVFVVDADSGEIIYRHSIPSALKELEGPGVEGAPSKLNVRTSDDSDNIIVLVRTDYSLSASDLGNHLFNWTRTSFTANYYVKYKHPDMLDQSSCLQGDIPCIRTEGLPLALPDLNSANVIVLKDGTPFVSMHGSDALEPVQTPRKLPNTAGKSNILLDDSQNQTHDVARSHAISADPEATLNPTRNTSGWLFPLFPIFLVTGYLLSLISASKSCRQFMIQLIEPFTHNKKTVDIRGRSEGTPKKRKTRKKDGLVNSSETLTASDKECSDTGGSTEAPMKNSALTDALGGRQIGKVYVSNKEIGRGSNGTIVFEGSYDGRQVAVKRLLRSHNDIAEKETRNLIISDHDPNIVRLYGCDHDSDFVYISLERCHCSLADLIQKQSYLSSGESISNNERCGCWPCAFA

SEQ ID NO: 190636 - protein, 921 aa, Zea Mays
MSRFLSPSSPSNPLPLSEKKVILSGVQAPTRSGPPPPPPNKLGHAQQLMRSLRGVLIPLVLLAGLAFRVDDGGAALLPLPPPALPASPSRLALPGGTPKDDGAAASRSTEVVTAGVRSTEIVAPVGPKKQSLRELLVRPQPARHEPSSLVSGEAKAETRSVLQFYDNGTIQLVDKLSQSPLWEIATGPPLSDHITTTESGPNYLIYPFNGNENMNGNSTELWEVYNGNSVRLPWKLEEFVARSPYIRDSVVTIGSKVSTVFVVDADSGEIIYRHSIPSALKELEGPGVEGAPSKLNVRTSDDSDNIIVLVRTDYSLSASDLGNHLFNWTRTSFTANYYVKYKHPDMLDQSSCLQGDIPCIRTEGLPLALPDLNSANVIVLKDGTPFVSMHGSDALEPVQTPRKLPNTAGKSNILLDDSQNQTHDVARSHAISADPEATLNPTRNTSGWLFPLFPIFLVTGYLLSLISASKSCRQFMIQLIEPFTHNKKTVDIRGRSEGTPKKRKTRKKDGLVNSSETLTASDKECSDTGGSTEAPMKNSALTDALGGRQIGKVYVSNKEIGRGSNGTIVFEGSYDGRQVAVKRLLRSHNDIAEKETRNLIISDHDPNIVRLYGCDHDSDFVYISLERCHCSLADLIQKQSYLSSGESISNNEVSMSINSKISNVKGIDVELWTQDGLPSAQLLKLMRDVVAGLVHLHNLGIIHRDLKPQNVLISAEGPIRAKLSDMGISKHLQDDMTSVSHHGTGIGSSGWQAPEQLRHGRQTRAMDLFSLGCLIFYCITKEAVHLISQLLQPNPETRDTSDRIEKTSETDLINALESIGPVAFGGKWGEKLDAALVTDMGRYRKYNFESTRDLLRYIRNKSGHYRELSNDLKGILGSLPEGFDHYFASRFPKLLIEVYKVLWVHCKDEEAFSKHFNGSSL

SEQ ID NO: 190637 - protein, 942 aa, Zea Mays
MSRFLSPSSPSNPLPLSEKKVILSGVQAPTRSGPPPPPPNKLGHAQQLMRSLRGVLIPLVLLAGLAFRVDDGGAALLPLPPPALPASPSRLALPGGTPKDDGAAASRSTEVVTAGVRSTEIVAPVGPKKQSLRELLVRPQPARHEPSSLVSGEAKAETRSVLQFYDNGTIQLVDKLSQSPLWEIATGPPLSDHITTTESGPNYLIYPFNGNENMNGNSTELWEVYNGNSVRLPWKLEEFVARSPYIRDSVVTIGSKVSTVFVVDADSGEIIYRHSIPSALKELEGPGVEGAPSKLNVRTSDDSDNIIVLVRTDYSLSASDLGNHLFNWTRTSFTANYYVKYKHPDMLDQSSCLQGDIPCIRTEGLPLALPDLNSANVIVLKDGTPFVSMHGSDALEPVQTPRKLPNTAGKSNILLDDSQNQTHDVARSHAISADPEATLNPTRNTSGWLFPLFPIFLVTGYLLSLISASKSCRQFMIQLIEPFTHNKKTVDIRGRSEGTPKKRKTRKKDGLVNSSETLTASDKECSDTGGSTEAPMKNSALTDALGGRQIGKVYVSNKEIGRGSNGTIVFEGSYDGRQVAVKRLLRSHNDIAEKETRNLIISDHDPNIVRLYGCDHDSDFVYISLERCHCSLADLIQKQSYLSSGESISNNEVSMSINSKISNVKGIDVELWTQDGLPSAQLLKLMRDVVAGLVHLHNLGIIHRDLKPQNVLISAEGPIRAKLSDMGISKHLQDDMTSVSHHGTGIGSSGWQAPEQLRHGRQTRAMDLFSLGCLIFYCITKVHLISQLLQPNPETRPTAVYVMHHPLFWSPELRLSFLRDTSDRIEKTSETDLINALESIGPVAFGGKWGEKLDAALVTDMGRYRKYNFESTRDLLRYIRNKSGHYRELSNDLKGILGSLPEGFDHYFASRFPKLLIEVYKVLWVHCKDEEAFSKHFNGSSL

SEQ ID NO: 190638 - protein, 83 aa, Zea Mays
MESAYFSVLTEQHLPSSFCHLKFHTQCHLDFLEMKLMVGLTQRTCPTLGTYEFQGETREPLLSYRRVQTQDKSYCQLYLQEQE

SEQ ID NO: 190639 - protein, 274 aa, Zea Mays
MAAAPAAAGGLMQLQPPLCVSPRASASCAPSIWGALPQLRRRRALARAASSVAAGEAEAYTEPELVLLEALLGIQGRGRAVAPRQLQEVESAVQALETQGGIPDPTSSSLIEGSWRLIFTTRPGTASPIQRTFVGVDSFRIFQEVYLRTDDPRVVNVVKFSESVGDLKVEAEATIKDGKRILFRFDRAAFAFKFLPFKVPYPVPFRLLGDEANGWLDTTYLSHTGNIRISRGNKGTTFVLQKSADPRQILLSAISARTGVEEVCDYSSHHTSSH

SEQ ID NO: 190640 - protein, 252 aa, Zea Mays
MAAAPAAAGGLMQLQPPLCVSPRASASCAPSIWGALPQLRRRRALARAASSVAAGEAEAYTEPELVLLEALLGIQGRGRAVAPRQLQEVESAVQALETQGGIPDPTSSSLIEGSWRLIFTTRPGTASPIQEVYLRTDDPRVVNVVKFSESVGDLKVEKQLLRMESAYFSVLTEQHLPSSFCHLKFHTQCHLDFLEMKLMVGLTQRTCPTLGTYEFQGETSAGNHFCPTEECRPKTNLIVSYICKNRSRRGHQ

SEQ ID NO: 190641 - protein, 261 aa, Zea Mays
MAAAPAAAGGLMQLQPPLCVSPRASASCAPSIWGALPQLRRRRALARAASSVAAGEAEAYTEPELVLLEALLGIQGRGRAVAPRQLQEVESAVQALETQGGIPDPTSSSLIEGSWRLIFTTRPGTASPIQRTFVGVDSFRIFQEVYLRTDDPRVVNVVKFSESVGDLKVEAEATIKDGKRILFRFDRAAFAFKFLPFKVPYPVPFRLLGDEANGWLDTTYLSHTGNIRISRGNKCREPLLSYRRVQTQDKSYCQLYLQEQE

SEQ ID NO: 190642 - protein, 123 aa, Zea Mays
MHLTLEFGGGLELLLENSTKVHKVEVTTPKDGQGKVTMKFLLSWVKENLIKERPEMFLKADSVQRTRSCGTWGRHLQKGSPKHVQRPGVLVLINDCDWELCGGLDAELEEKDVVVFISTLHGG

SEQ ID NO: 190643 - protein, 91 aa, Zea Mays
MHLTLEFGGGLELLLENSTKVHKVEVTTPKDGQGKVTMKFLLSWVKENLIKERPEMFLKADSVQLFNWEPRLNPKQSKQYACVHSDFWPLT

SEQ ID NO: 190644 - protein, 293 aa, Zea Mays
MLGNKVAYIQNPSIDKTCTWILKVPRDMKHPIYVYYQLDKFYQNHRRYVKSRSDKQLRDPKEANSTQQYCKPEATTEHGSAVVPCGLVAWSLFNDTYSFARGNNRALRVHKRGISWRSEREHIFGKQVFPRNFQKGALIGGGTLDPRIPVSVLQYLWNFITGEKKQGCDEVEIPQLSEQEDLIVWMRTAALPTFRKLYGRIEADLRAGELVTVTTQNNYNTYSFGGKKALVLSTAGVLGGRNGFLGRGYAVVGLACLLLALLLTMLCLVFPLKEEHLALQYPLLRPATVTMHA

SEQ ID NO: 190645 - protein, 347 aa, Zea Mays
MVTIATNPGRRNQVIPVLLFVGVVFIVIGLGCIAASNRVVEVVYEYETSCIPRHMLGNKVAYIQNPSIDKTCTWILKVPRDMKHPIYVYYQLDKFYQNHRRYVKSRSDKQLRDPKEANSTQQYCKPEATTEHGSAVVPCGLVAWSLFNDTYSFARGNNRALRVHKRGISWRSEREHIFGKQVFPRNFQKGALIGGGTLDPRIPVSVLQYLWNFITGEKKQGCDEVEIPQLSEQEDLIVWMRTAALPTFRKLYGRIEADLRAGELVTVTTQNNYNTYSFGGKKALVLSTAGVLGGRNGFLGRGYAVVGLACLLLALLLTMLCLVFPLKEEHLALQYPLLRPATVTMHA

SEQ ID NO: 190646 - protein, 347 aa, Zea Mays
MLLSLWFKFETRSGCYVYDDCIVLTLKIIRLLSNSFQLASLYLRLRRMVTIATNPGRRNQVIPVLLFVGVVFIVIGLGCIAASNRVVEVVYEYETSCIPRHMLGNKVAYIQNPSIDKTCTWILKVPRDMKHPIYVYYQLDKFYQNHRRYVKSRSDKQLRDPKEANSTQQYCKPEATTEHGSAVVPCGLVAWSLFNDTYSFARGNNRALRVHKRGISWRSEREHIFGKQVFPRNFQKGALIGGGTLDPRIPLYGRIEADLRAGELVTVTTQNNYNTYSFGGKKALVLSTAGVLGGRNGFLGRGYAVVGLACLLLALLLTMLCLVFPLKEEHLALQYPLLRPATVTMHA

SEQ ID NO: 190647 - protein, 175 aa, Zea Mays
MFRRLLPHRRYISTSPASNSTPTLYSDGTIPFSILSWGRGASGQLGGGKEERRLYPSPVAHLLLPESDPRLAPTPGRLPSAEDTSGVEVGISCGLFHSSLLVEGGAWVWGKGDGGRLGLGDESSAFVPHSNPNLRDLRLLALGGIHSAALTTSGDVFTCLQGLWWIWSSGSPCIP

SEQ ID NO: 190648 - protein, 87 aa, Zea Mays
MLLTLNPALWLGTGFHKKKAKARCPHFMLVGGSFSIPSYQSFCTTVEMGLAGLGDAGVASGGSRRRRAHRHGHRPSPPQPSIRSDRG

SEQ ID NO: 190649 - protein, 68 aa, Zea Mays
MGMQMRKTPNMAMAVLRRQWTGRQYGPPVMLHTFWRKSPPACPPPWSPPIAAAAFDSIRSGVRFDAGG

SEQ ID NO: 190650 - protein, 225 aa, Zea Mays
MNSVLELFRVLGISKKMVVPVITSSPQLLLRKPDQFMQNVLFFREMGVDKKTTGKILCRSPEIFASNVDNTLKKKIDFLINFGVSKHHLPRIIRKYPELLLLDLNCTLLPRINYLLEMGLSKKDLCSMISRFSPLLGYSIELVMKPKLEFLLRTMKKPLKAVVEYPRYFSYSLEGKIKPRFWLLQSRNIDCTLTEMLAKNDELFAEEYLELGGLLEKPVQSSIGG

SEQ ID NO: 190651 - protein, 344 aa, Zea Mays
MAAAATFGFLHPLIRKPLVPPLYILPLPTQPHAKTHPRSLPLLFLLPRRRRGGPIAALPNTTSSSTNASASPTYDVREAEAAVADLLREGGASADDAAAIAARAPAYAAMLADGVRELDELGLWASWSSGASARLGLSGVVEMEMGRLGFRRKVYLMGRSRPDHDVVPLLESLGVRLSSAKLIAPYVASAGLTVLIDRVKFLKEMLFSSSDYAILIGRNAKRMMTYLSIPADDALQSTLSFFEKMEARYGGVSMLGHGDMSFPYLIESFPMLLLCSEDNHLEPLVDFLEHIGIPKPKIASVLLLFPPIILSDVENDIKPRIREWEKDVVEVSMDSFNECDRELQ

SEQ ID NO: 190652 - protein, 617 aa, Zea Mays
MAAAATFGFLHPLIRKPLVPPLYILPLPTQPHAKTHPRSLPLLFLLPRRRRGGPIAALPNTTSSSTNASASPTYDVREAEAAVADLLREGGASADDAAAIAARAPAYAAMLADGVRELDELGLWASWSSGASARLGLSGVVEMEMGRLGFRRKVYLMGRSRPDHDVVPLLESLGVRLSSAKLIAPYVASAGLTVLIDRVKFLKEMLFSSSDYAILIGRNAKRMMTYLSIPADDALQSTLSFFEKMEARYGGVSMLGHGDMSFPYLIESFPMLLLCSEDNHLEPLVDFLEHIGIPKPKIASVLLLFPPIILSDVENDIKPRIREWEKVFLFMAGIEHDYITRMLLKYPWILSTSVIENYSKMLLFFNQKGISSTVLAIAVKSWPHILGSSSKRMNSVLELFRVLGISKKMVVPVITSSPQLLLRKPDQFMQNVLFFREMGVDKKTTGKILCRSPEIFASNVDNTLKKKIDFLINFGVSKHHLPRIIRKYPELLLLDLNCTLLPRINYLLEMGLSKKDLCSMISRFSPLLGYSIELVMKPKLEFLLRTMKKPLKAVVEYPRYFSYSLEGKIKPRFWLLQSRNIDCTLTEMLAKNDELFAEEYLELGGLLEKPVQSSIGG

SEQ ID NO: 190653 - protein, 430 aa, Zea Mays
MAAAATFGFLHPLIRKPLVPPLYILPLPTQPHAKTHPRSLPLLFLLPRRRRGGPIAALPNTTSSSTNASASPTYDVREAEAAVADLLREGGASADDAAAIAARAPAYAAMLADGVRELDELGLWASWSSGASARLGLSGVVEMEMGRLGFRRKVYLMGRSRPDHDVVPLLESLGVRLSSAKLIAPYVASAGLTVLIDRVKFLKEMLFSSSDYAILIGRNAKRMMTYLSIPADDALQSTLSFFEKMEARYGGVSMLGHGDMSFPYLIESFPMLLLCSEDNHLEPLVDFLEHIGIPKPKIASVLLLFPPIILSDVENDIKPRIREWEKAGIEHDYITRMLLKYPWILSTSVIENYSKMLLFFNQKGISSTVLAIAVKSWPHILGSSSKRMNSVLELFRVLGISKKMVVPVITSSPQLLLRKPDQFMQVCNDY

SEQ ID NO: 190654 - protein, 331 aa, Zea Mays
MALRRVTPQRRPVLPLPRAFFSSCPPFTPPPSPANDPDDDHSPSSSPPPNPGAPRNPSSSLFQDIKDRLRLSPTSSPPRRNPSNLLRPNPARGPPSKPSLEEVRRMLDDFRPTVGAPSPSAPGVAPSFLDIIKRSSVAQGANAGQGVTGFDSVRESLKRSPLRTPHPPSTPFLTLSQSNIFSPELQRKFKAVDARKDGKESNVALSRLYSYEELGKKLGELRPAVGAKDGKEWFSLKELQGRIAKLAELEKQENQLSGSLWEIKNCIGNLNHKPENATQRVNIHALLNLRGQPTPDYMSQPPQEELLEKYFHPDHMSSEETMKLELQRLHN

SEQ ID NO: 190655 - protein, 463 aa, Zea Mays
MDPAAAALGAVPAAGAPPPGAAAGDQQAAPRVERLSAGVQQQLNLEGMRARAVGLYKAISRILEDFDVIIRTNPSASPKWQDVLGQFSMVSMELFNIVEDIKNVSKVFVVYPRNVNAENATILPVMLSSKLLPEMEVEETTKREQLLSGITNLPVPTQIEKLKVRIDMIGSACETAEKVIAECRKSYGLGSRQGTNLGPTLDKAQAAKIQEQEGLLRAAVNYGEGLRVPGDQRHPQSLPIHLIEVLPLGDGAQNFGDSSGSYPKNMSTFAPNSVNSQGNQIQASGGQLLGRPAPSPGTTGTPNFENVSTPPMPYANSPRSGTNMMNTPSPQQHLTPQQQRQKLMQHSQPLHQPVRPSAAGMLAQSALPQLQDLQGQAQQKLQVPGQQQMQYNQALSQQFHNRQMQPGRMQPGMAQSQLNQGTQLRSHLGQFTGAANNAMFNAAQASSNSQMVLPEIILCVHMV

SEQ ID NO: 190656 - protein, 370 aa, Zea Mays
MIGSACETAEKVIAECRKSYGLGSRQGTNLGPTLDKAQAAKIQEQEGLLRAAVNYGEGLRVPGDQRHPQSLPIHLIEVLPLGDGAQNFGDSSGSYPKNMSTFAPNSVNSQGNQIQASGGQLLGRPAPSPGTTGTPNFENVSTPPMPYANSPRSGTNMMNTPSPQQHLTPQQQRQKLMQHSQPLHQPVRPSAAGMLAQSALPQLQDLQGQAQQKLQQMQYNQALSQQFHNRQMQPGRMQPGMAQSQLNQGTQLRSHLGQFTGAANNAMFNAAQASSNSQMMANMHGSQSLMPQMQYGMAGGHPHRSHPQMLTDQMFGMGATNSSMMGMQQQQQGLYGNMQAGAQNVPQGMAGLQNQTQNPNFTQQRQQNQQ

SEQ ID NO: 190657 - protein, 279 aa, Zea Mays
MDPAAAALGAVPAAGAPPPGAAAGDQQAAPRVERLSAGVQQQLNLEGMRARAVGLYKAISRILEDFDVIIRTNPSASPKWQDVLGQFSMVSMELFNIVEDIKNVSKVFVVYPRNVNAENATILPVMLSSKLLPEMEVEETTKREQLLSGITNLPVPTQIEKLKVRIDMIGSACETAEKVIAECRKSYGLGSRQGTNLGPTLDKAQAAKIQEQEGLLRAAVNYGEGLRVPGDQRHPQSLPIHLIEVLPLGDGAQNFGDSSGIRRTVTWKACAITWNHRNP

SEQ ID NO: 190658 - protein, 372 aa, Zea Mays
MDPAAAALGAVPAAGAPPPGAAAGDQQAAPRVERLSAGVQQQLNLEGMRARAVGLYKAISRILEDFDVIIRTNPSASPKWQDVLGQFSMVSMELFNIVEDIKNVSKVFVVYPRNVNAENATILPVMLSSKLLPEMEVEETTKREQLLSGITNLPVPTQIEKLKVRIDMIGSACETAEKVIAECRKSYGLGSRQGTNLGPTLDKAQAAKIQEQEGLLRAAVNYGEGLRVPGDQRHPQSLPIHLIEVLPLGDGAQNFGDSSGSYPKNMSTFAPNSVNSQGNQIQASGGQLLGRPAPSPGTTGTPNFENVSTPPMPYANSPRAHFLNYKIYRGRLNKNYRSLVNSKCNTTKHCHNSFITDRCNLDVCNQAWLRVN

SEQ ID NO: 190659 - protein, 527 aa, Zea Mays
MDPAAAALGAVPAAGAPPPGAAAGDQQAAPRVERLSAGVQQQLNLEGMRARAVGLYKAISRILEDFDVIIRTNPSASPKWQDVLGQFSMVSMELFNIVEDIKNVSKVFVVYPRNVNAENATILPVMLSSKLLPEMEVEETTKREQLLSGITNLPVPTQIEKLKVRIDMIGSACETAEKVIAECRKSYGLGSRQGTNLGPTLDKAQAAKIQEQEGLLRAAVNYGEGLRVPGDQRHPQSLPIHLIEVLPLGDGAQNFGDSSGSYPKNMSTFAPNSVNSQGNQIQASGGQLLGRPAPSPGTTGTPNFENVSTPPMPYANSPRSGTNMMNTPSPQQHLTPQQQRQKLMQHSQPLHQPVRPSAAGMLAQSALPQLQDLQGQAQQKLQVPGQQQMQYNQALSQQFHNRQMQPGRMQPGMAQSQLNQGTQLRSHLGQFTGAANNAMFNAAQASSNSQMYGMAGGHPHRSHPQMLTDQMFGMGATNSSMMGMQQQQQGLYGNMQAGAQNVPQGMAGLQNQTQNPNFTQQRQQNQQ

SEQ ID NO: 190660 - protein, 457 aa, Zea Mays
MDPAAAALGAVPAAGAPPPGAAAGDQQAAPRVERLSAGVQQQLNLEGMRARAVGLYKAISRILEDFDVIIRTNPSASPKWQDVLGQFSMVSMELFNIVEDIKNVSKVFVVYPRNVNAENATILPVMLSSKLLPEMEVEETTKREQLLSGITNLPVPTQIEKLKVRIDMIGSACETAEKVIAECRKSYGLGSRQGTNLGPTLDKAQAAKIQEQEGLLRAAVNYGEGLRVPGDQRHPQSLPIHLIEVLPLGDGAQNFGDSSGSYPKNMSTFAPNSVNSQGNQIQASGGQLLGRPAPSPGTTGTPNFENVSTPPMPYANSPRSGTNMMNTPSPQQHLTPQQQRQKLMQHSQPLHQPVRPSAAGMLAQSALPQLQDLQGQAQQKLQVPGQQQMQYNQALSQQFHNRQMQPGRMQPGMAQSQLNQGTQLRSHLGQFTGAANNAMFNAAQASSNSQMVRYTYS

SEQ ID NO: 190661 - protein, 322 aa, Zea Mays
MDPAAAALGAVPAAGAPPPGAAAGDQQAAPRVERLSAGVQQQLNLEGMRARAVGLYKAISRILEDFDVIIRTNPSASPKWQDVLGQFSMVSMELFNIVEDIKNVSKVFVVYPRNVNAENATILPVMLSSKLLPEMEVEETTKREQLLSGITNLPVPTQIEKLKVRIDMIGSACETAEKVIAECRKSYGLGSRQGTNLGPTLDKAQAAKIQEQEGLLRAAVNYGEGLRVPGDQRHPQSLPIHLIEVLPLGDGAQNFGDSSGSYPKNMSTFAPNSVNSQGNQIQASGGQLLGRPAPSPGTTGTPNFENVSTPPMPYANSPRGKN

SEQ ID NO: 190662 - protein, 715 aa, Zea Mays
MFGSRVQDEVEMQRRPNNRIFPDERQNQSKSLYQTTRADRFGANRIDLKNPEKLKVLNESNKPWHQRILDPGSNIVLRWNRVYLVACLFALFIDPFFYYLPLIRQNGNGSSCVAKDQGLSIRITVLRSLADLFYMLNIAIKFHTAYVDPKSRVLGKGELVVDIKKIQRRYIRTDFFVDILAAVPLPQVTVWLIMPAIKSSDYNIRNTTFALVIVIQYVIRMYLIIPLSNQIIKAVGVVAKSAWGGAAYNLLLYMLASHITGAIYYLLSIERQITCWDQQCVAEYNDTHCNFSFISCENNGSNDYSVWANKTKVFANCDATNSSISFNYGMFSSALSKGAVSSPFLEKYFFCLWWGLLQLSSSGNPLVTSAFITENAFAIAIGAISLILFAQLIGKMQTYLQSISKRLEEWRLRQRDMDEWMRHHQLPSHLQERVRRFVQVKWLATRGVEEESILQALPADIRRDVQRHLCLDLVRRVPFFSEMDNQLLDAICERLVSFLCPENTYISREGDPVNEMLFIIRGKLESSTTNGGRSNFFNSIILRPGDFAGEELLTWALLPKTNVHFPLSTRTVRSHTEVEAFALRAEDLKFVANQFRRLHSKKLQHTFRFYSHHWRTWAACFIQAAWRQHQRRKLAESLSRWESYSWWSAEDHPTGDKPRQEGTSSGGGGTRTIAEGAIAHMHKLASASRRFRTEDVAIRRLQKPDEPDFSADHFD

SEQ ID NO: 190663 - protein, 99 aa, Zea Mays
MFPSVSTPGPCLVRQPPANKPCSLLSTHMISTSSLARIGISSACPAATCRRVLLQRPRTPTHGSKEGATATKESSKVVAKHCHRCNSARINRSPCSWSC

SEQ ID NO: 190664 - protein, 84 aa, Zea Mays
MILFPGADCSCTCACSPAIRIDREHLCRLFAADAALELEALFNDTFGLQGPAPLPAHLSVSAYMLCSLVRIIWYTDDICWLIQP

SEQ ID NO: 190665 - protein, 137 aa, Zea Mays
MATATAVGGPDRVETAASSAAAVLAVAVASQRLLGLLALADGSDDDDDDDDDEDNDDEGGDDDDDAEEEFSGEEDGGDDDDEDDDPEANGEEGSDNDNDDDEDGDDDDDEDDEGDEDDKDEDDDEDDEDQPPSKKKK

SEQ ID NO: 190666 - protein, 100 aa, Zea Mays
MILRRARMVSYREDSLPPFCHMPPVLENIVMERAQSGHIPKVINAVMRDTFRANGVCGPGDRDLADKFLACLFESKVLDPSRIPAGNPVSTLAPFCGLLD

SEQ ID NO: 190667 - protein, 592 aa, Zea Mays
MQEPSAISAWSFGYEQDVPCSIAWQQREMIMMICSAACLGVRVPARRSTERCHLCSPSPSPSPSPSNVTRLGARGMNSRRQEQQARRTIRALLAKNGALCTGVWRCRSGGADIASRAPTMATTAVSVDEKLDKLRAEVAKLDQISENEKSGFISLVSRYLSGEAEQIEWSKIQTPTDEVVVPYDTVASPPEDLEETKKLLDKLVVLKLNGGLGTTMGCTGPKSVIEVRNGFTFLDLIVIQIESLNKKYGCNVPLLLMNSFNTHDDTQKIVEKYSNSNIEIHTFNQSQYPRIVTEDFLPLPSKGKSGKDGWYPPGHGDVFPSLNNSGKLDILLAQGKEYVFVANSDNLGAIVDIKILNHLINNQNEYCMEVTPKTLADVKGGTLISYEGRVQLLEIAQVPDEHVNEFKSIEKFKIFNTNNLWVNLKAIKRLVEAEALKMEIIPNPKEVDGVKVLQLETAAGAAIRFFDKAIGINVPRSRFLPVKATSDLLLVQSDLYTLVDGFVIRNPSRANPANPSIELGPEFKKVANFLARFKSIPSIVELDSLKVSGDVWFGSGITLKGKVTIIAKPGVKLEIPDGDVLENKDVNGPEDL

SEQ ID NO: 190668 - protein, 425 aa, Zea Mays
MATTAVSVDEKLDKLRAEVAKLDQISENEKSGFISLVSRYLSGEAEQIEWSKIQTPTDEVVVPYDTVASPPEDLEETKKLLDKLVVLKLNGGLGTTMGCTGPKSVIEVRNGFTFLDLIVIQIESLNKKYGCNVPLLLMNSFNTHDDTQKIVEKYSNSNIEIHTFNQSQYPRIVTEDFLPLPSKGKSGKDGWYPPGHGDVFPSLNNSGKLDILLAQGKEYVFVANSDNLGAIVDIKILNHLINNQNEYCMEVTPKTLADVKGGTLISYEGRVQLLEIAQVPDEHVNEFKSIEKFKIFNTNNLWVNLKAIKRLVEAEALKMEIIPNPKEVDGVKVLQLETAAGAAIRFFDKAIGINVPRSRFLPVKATSDLLLVQSDLYTLVDGFVIRNPSRANPANPSIELGPEFKKVKQFVSKILKIPFIIEFHQ

SEQ ID NO: 190669 - protein, 426 aa, Zea Mays
MAGYMSRGPQNGSVYVCNLPPGTDENMLAEYFGTIGLLKKDKRTGRPKIWIYRDKVTNEPKGDATVTYEDPHAASAAVEWFDNKDFHGSTIQVHIAESKSKDAFDNPTSLNIIGGVGEQDELDNGAGRGRGRGDGPGKAWQQDGDWMCPNTSCGNVNFAFRGVCNRCGAARPAGAGGTAAGGGGRGRGRGSSDARGSSHAGAAVGGPPGLFGPNDWPCPMCGNINWAKRTKCNICNTSKPGTNEGGVRGGRGGGYKELDEEELEEVKKRRKEAEEDDGEIYDEFGNLKKKFRSKALHTEGAQALPGSGRAGWEVEHRGPSEREGRERSRDRVRDDYYEKETRGRDRGDLGRDQRRSRSRSRDRERERRERRREHDYERRERDRDRDRRHSFELVDVMELTLSHYMASGGRSSSSSNSRASCGLAWS

SEQ ID NO: 190670 - protein, 271 aa, Zea Mays
MNWIMEQAEAEGVVMVQARLGSKMGIGCVQIQGCGNVNFAFRGVCNRCGAARPAGAGGTAAGGGGRGRGRGSSDARGSSHAGAAVGGPPGLFGPNDWPCPMCGNINWAKRTKCNICNTSKPGTNEGGVRGGRGGGYKELDEEELEEVKKRRKEAEEDDGEIYDEFGNLKKKFRSKALHTEGAQALPGSGRAGWEVEHRGPSEREGRERSRDRVRDDYYEKETRGRDRGDLGRDQRRSRSRSRDRERERRERRREHDYERRERDRDRDRRHR

SEQ ID NO: 190671 - protein, 244 aa, Zea Mays
MCPNTSCGNVNFAFRGVCNRCGAARPAGAGGTAAGGGGRGRGRGSSDARGSSHAGAAVGGPPGLFGPNDWPCPMCGNINWAKRTKCNICNTSKPGTNEGGVRGGRGGGYKELDEEELEEVKKRRKEAEEDDGEIYDEFGNLKKKFRSKALHTEGAQALPGSGRAGWEVEHRGPSEREGRERSRDRVRDDYYEKETRGRDRGDLGRDQRRSRSRSRDRERERRERRREHDYERRERDRDRDRRHR

SEQ ID NO: 190672 - protein, 126 aa, Zea Mays
MSGRGKGGKGLGKGGAKRHRKVLRDNIQGITKPAIRRLARRGGVKRISGLIYEETRGVLKIFLENVIRDAVTYTEHARRKTVTAMDVVVMDRWCTKVKRMHPEASFAEMDDGISEAFLHRATEQEI

SEQ ID NO: 190673 - protein, 89 aa, Zea Mays
MIDFVEHLRHILWCHPSHLSCCLTTVNARAPASTSSNCSLAWELRLLRLPSQGIGFYLPGPLVMISLSFTRPYPGFRFSDLSMMKKLLD

SEQ ID NO: 190674 - protein, 137 aa, Zea Mays
MPAIPTSALVSSSHERNTIHPPVRSGGDRQPAAEMSGRGKGGKGLGKGGAKRHRKVLRDNIQGITKPAIRRLARRGGVKRISGLIYEETRGVLKIFLENVIRDAVTYTEHARRKTVTAMDVVYALKRQGRTLYGFGG

SEQ ID NO: 190675 - protein, 521 aa, Zea Mays
MRGFHEACSEHHLLRGEGVAGKAFTTNQPCFLPDIGSSTKLEYSLSHHAKIFKLKGAVAIRLRCTRTGTADFVLEFFLPTDCEALEEQKSVLDSLSGTMRSVCQTLRVVTDREMEDETVLEMNELNSFTPHGKDKVELSFGCNSADRRGEASWTSLAGTSQQESELAALRMHGMFSPGGQGPSLSGVQATAEGSKAKRRTKAEKTVSLQILRQYFAGSLKDAARSLGVCPTTLKRICRQHGITRWPSRKIKKVDHSLRKLQQIIDSVHGAETAFQLNTLYKDITNTSISSDNNLSGSVTVPPTNQSNLTDVNKHQPHKSSSNVPSTSHSHSSCSHSSESSPSCSGGATKHAQQGIIDQMKSENPVKDSSIQTLQTENTSLFEHFSVNETPIDLLQDVTEKANGGHHSSRSPSSPNPKQNTDANMRVKATFGSEKVRFRLNPECNFQELKHEIAKRLSIVDTNPLVLKYLDDDSEWVLMTCDADLQECLHVYKLAGIQTIKISVHLAVSPATRVTTGHTGLS

SEQ ID NO: 190676 - protein, 211 aa, Zea Mays
MFLLLWSLSKRAVLLPPKMKDLEFVGYIKSGGMLLGRTLSVLITMTLGTAMAARQGTVAMAAHQICLQVWLAVSLLSDALAVSAQALIASSFAKLDYEKVEEVTFYVLKAGVFVGIALALLLFVSFGRLAEIFSKDPMVIQIVRSGVLFVSASQPINALAFIFDGLHFGVSDFSYSASSMIGMESRALVVFAQKRTQIQAAMNKMWIYGAE

SEQ ID NO: 190677 - protein, 297 aa, Zea Mays
MGVSHASAMHNPARLFLSVRALGAPAVVVSLAIQGVFRGLKDTKTPLLYSGLGNISAVVLLPFFVYSLNLGLTGAALATIASQYIGMFLLLWSLSKRAVLLPPKMKDLEFVGYIKSGGMLLGRTLSVLITMTLGTAMAARQGTVAMAAHQICLQVWLAVSLLSDALAVSAQALIASSFAKLDYEKVEEVTFYVLKAGVFVGIALALLLFVSFGRLAEIFSKDPMVIQIVRSGVLFVSASQPINALAFIFDGLHFGVSDFSYSASSMIGMESRALVVFAQKRTQIQAAMNKMWIYGAE

SEQ ID NO: 190678 - protein, 316 aa, Zea Mays
MGVSHASAMHNPARLFLSVRALGAPAVVVSLAIQGVFRGLKDTKTPLLYSGLGNISAVVLLPFFVYSLNLGLTGAALATIASHKRAVLLPPKMKDLEFVGYIKSGGMLLGRTLSVLITMTLGTAMAARQGTVAMAAHQICLQVWLAVSLLSDALAVSAQALIASSFAKLDYEKVEEVTFYVLKAGVFVGIALALLLFVSFGRLAEIFSKDPMVIQIVRSGVLFVSASQPINALAFIFDGLHFGVSDFSYSASSMMVVGAISSLFLLCAPRFFGLLGVWAGLALFMSLRMTAGFMRLGWRAGPWWFLHRKEPKYRLQ

SEQ ID NO: 190679 - protein, 257 aa, Zea Mays
MGVSHASAMHNPARLFLSVRALGAPAVVVSLAIQGVFRGLKDTKTPLLYSGLGNISAVVLLPFFVYSLNLGLTGAALATIASQYIGMFLLLWSLSKRAVLLPPKMKDLEFVGYIKSGGMLLGRTLSVLITMTLGTAMAARQGTVAMAAHQICLQVWLAVSLLSDALAVSAQALIASSFAKLDYEKVEEVTFYVLKMVVGAISSLFLLCAPRFFGLLGVWAGLALFMSLRMTAGFMRLGWRAGPWWFLHRKEPKYRLQ

SEQ ID NO: 190680 - protein, 265 aa, Zea Mays
MGVSHASAMHNPARLFLSVRALGAPAVVVSLAIQGVFRGLKDTKTPLLYSGLGNISAVVLLPFFVYSLNLGLTGAALATIASQYIGMFLLLWSLSKRAVLLPPKMKDLEFVGYIKSGGMLLGRTLSVLITMTLGTAMAARQGTVAMAAHQICLQVWLAVSLLSDALAVSAQALIASSFAKLDYEKVEEVTFYVLKAGVFVGIALALLLFVSFGRLAEIFSKDPMVIQIVRSGVFSLVLASLSMPSLLSLTDSILVSQTSRTQLPP

SEQ ID NO: 190681 - protein, 242 aa, Zea Mays
MFLLLWSLSKRAVLLPPKMKDLEFVGYIKSGGMLLGRTLSVLITMTLGTAMAARQGTVAMAAHQICLQVWLAVSLLSDALAVSAQALIASSFAKLDYEKVEEVTFYVLKAGVFVGIALALLLFVSFGRLAEIFSKDPMVIQIVRSGVLFVSASQPINALAFIFDGLHFGVSDFSYSASSMMVVGAISSLFLLCAPRFFGLLGVWAGLALFMSLRMTAGFMRLGWRAGPWWFLHRKEPKYRLQ

SEQ ID NO: 190682 - protein, 536 aa, Zea Mays
MEFAAGAAVAPRPMPAGPGRNRRVGGGAIGIGWARRATAPGLSLAPAVARRAASASGGGHGRVVVRSTGGGCLWFRGEGADGDRSSLARASPSDGAAPARSSVREQTIGIKKELFNLAVPAIVGQAIDPVAQLLETAYVGRLGPVELASAAVDVSKHDSSQYASGNISGKVGERKRLPSISSALLLAAAIGVIEALALILGSGILLNIMGVSHASAMHNPARLFLSVRALGAPAVVVSLAIQGVFRGLKDTKTPLLYSGLGNISAVVLLPFFVYSLNLGLTGAALATIASQYIGMFLLLWSLSKRAVLLPPKMKDLEFVGYIKSGGMLLGRTLSVLITMTLGTAMAARQGTVAMAAHQICLQVWLAVSLLSDALAVSAQALIASSFAKLDYEKVEEVTFYVLKAGVFVGIALALLLFVSFGRLAEIFSKDPMVIQIVRSGVLFVSASQPINALAFIFDGLHFGVSDFSYSASSMMVVGAISSLFLLCAPRFFGLLGVWAGLALFMSLRMTAGFMRLGWRAGPWWFLHRKEPKYRLQ

SEQ ID NO: 190683 - protein, 378 aa, Zea Mays
MCQNMTLHSMLRVGERKRLPSISSALLLAAAIGVIEALALILGSGILLNIMGVSHASAMHNPARLFLSVRALGAPAVVVSLAIQGVFRGLKDTKTPLLYSGLGNISAVVLLPFFVYSLNLGLTGAALATIASQYIGMFLLLWSLSKRAVLLPPKMKDLEFVGYIKSGGMLLGRTLSVLITMTLGTAMAARQGTVAMAAHQICLQVWLAVSLLSDALAVSAQALIASSFAKLDYEKVEEVTFYVLKAGVFVGIALALLLFVSFGRLAEIFSKDPMVIQIVRSGVLFVSASQPINALAFIFDGLHFGVSDFSYSASSMMVVGAISSLFLLCAPRFFGLLGVWAGLALFMSLRMTAGFMRLGWRAGPWWFLHRKEPKYRLQ

SEQ ID NO: 190684 - protein, 246 aa, Zea Mays
MGQPRRRGYPHGRHHRCPRGIALPAAGAGLLFLSVSLLSVSLLSAPPLADPRPGLGTSSSSRRFLRRHPTNGSDGELEGSESGDAFSVPARGGWTGQDDLWGSKLASNFHGCSNSSSRFLDSGITTQPDRYLIVVTSGGLNQQRTGIVDAVVAARILNATLVVPKLDQTSFWKDSSNFSEIFDMDWFISFLAKDVRIIKEPPEKGGKAMKPYKMRVPRKCTPRCYLNRVLPALLKKHSQLSFFEIY

SEQ ID NO: 190685 - protein, 433 aa, Zea Mays
MLHLLFPNWIKHLSGKIQEIFDMDWFISFLAKDVRIIKEPPEKGGKAMKPYKMRVPRKCTPRCYLNRVLPALLKKHVIRMTKYDYRLSNKLDTDLQKLRCRVNYHSLRFTDPIQELAEKLIQRMREKNRYFIALHLRFEPDMLAFSGCYYGGGEKERRELAAIRRRWRTLHIRDPEKGRRQGRCPLTPEEVGLMLRALGYRSDVHIYVASGEIYGGEDTLASLKALFPNFHTKETLSSQEELAPFLKFSSRMAAIDFIVCEESDAFVANNIGNMAKILAGQRRYFGHKRTIRPNAKQLYPLFMKRGNMSWDAFASQVRTIQKGYMGEPMEITPGRGEFHANPAACICEKTSRNSAIVKSISGNNLEPVTDSGIRKTIGISRPPYPVYTDEEADGSDTEEDPDSSGRGEVIDTEPDDDSAVRQEDPELEEILSD

SEQ ID NO: 190686 - protein, 594 aa, Zea Mays
MGQPRRRGYPHGRHHRCPRGIALPAAGAGLLFLSVSLLSVSLLSAPPLADPRPGLGTSSSSRRFLRRHPTNGSDGELEGSESGDAFSVPARGGWTGQDDLWGSKLASNFHGCSNSSSRFLDSGITTQPDRYLIVVTSGGLNQQRTGIVDAVVAARILNATLVVPKLDQTSFWKDSSNFSEIFDMDWFISFLAKDVRIIKEPPEKGGKAMKPYKMRVPRKCTPRCYLNRVLPALLKKHVIRMTKYDYRLSNKLDTDLQKLRCRVNYHSLRFTDPIQELAEKLIQRMREKNRYFIALHLRFEPDMLAFSGCYYGGGEKERRELAAIRRRWRTLHIRDPEKGRRQGRCPLTPEEVGLMLRALGYRSDVHIYVASGEIYGGEDTLASLKALFPNFHTKETLSSQEELAPFLKFSSRMAAIDFIVCEESDAFVANNIGNMAKILAGQRRYFGHKRTIRPNAKQLYPLFMKRGNMSWDAFASQVRTIQKGYMGEPMEITPGRGEFHANPAACICEKTSRNSAIVKSISGNNLEPVTDSGIRKTIGISRPPYPVYTDEEADGSDTEEDPDSSGRGEVIDTEPDDDSAVRQEDPELEEILSD

SEQ ID NO: 190687 - protein, 322 aa, Zea Mays
MFPRGPGSGPSPKARLLLFIYLFIYLFIYTSAGQSIGHTAPRHTQRKQLLLSFRSAGRSAHQEREALSRAETMEGPAAAEAENGGAGKGSGSRFRRVCVFCGSSSGKRSSYRDAAVELGKELVSRKVDLVYGGGSLGLMGEVSEAVHRGGGHVIGIIPTSLMGKEITGETVGEVRAVAGMHQRKAEMARNSDAFIALPGGPAERGRVLRLPAGVHRQGGGRRVHQALPAPHLRQRPRRQGTRPEAGGVRGRAGRGPGDAQAAVGDRAGRLQRLAPGRDRPLIGRATIAAAAGALVAPVHASSAGQATGLHLLLSTLPLLPHR

SEQ ID NO: 190688 - protein, 274 aa, Zea Mays
MFPRGPGSGPSPKARLLLFIYLFIYLFIYTSAGQSIGHTAPRHTQRKQLLLSFRSAGRSAHQEREALSRAETMEGPAAAEAENGGAGKGSGSRFRRVCVFCGSSSGKRSSYRDAAVELGKELVSRKVDLVYGGGSLGLMGEVSEAVHRGGGHVIGIIPTSLMGKEITGETVGEVRAVAGMHQRKAEMARNSDAFIALPGGYGTLDELLEVIAWAQLGIHSKPVGLLNVDGYYDFLLAFIDKAVDDGFIKPSQRHIFVSAPDARELVQKLEVCIV

SEQ ID NO: 190689 - protein, 127 aa, Zea Mays
MYSKLCWSNLFLSLFNPNTIVYICVTCVKKSRMLPYPFTSLLICLLPYLHPAHQELCFFTSPPPQTFSLSPLDPWTLPGRCPLPWPRPPCSLSHLLPPQSLPPSLPTQKSPLPLPWPPWISMVELPL

SEQ ID NO: 190690 - protein, 96 aa, Zea Mays
MRQTLRDFGYNLRKVPLLCDNESAIRMAENPVEHSRTKHIDIRHHFLRDHQQKGDIEVFHVSTENQLADIFTKPLDEKTFCRLRSELNVLDSRNLD

SEQ ID NO: 190691 - protein, 593 aa, Zea Mays
MGCGQSKTEEEYAVQHCRARSELLALAIRQRYMLADAHHAYAESLRAVGALLHDFLRGVQSLPPPPPEPALRLPLQRKGDGLPAASPPPPAIASSSSAAKQVRIAPNDGHIQFSDDDSDSDDGHIKFHSDEEPDPARRRPDVVHSAGAPGPPPPQMGPPYSSGYAPPPYGPGYGYGYANGPGPGPGPDYGGIGMSSGGGGGYGQSYGGMGGGGSGGGAGYNDQSYGGMGSGGGAGGYDQGYGGMGGYGQSFFNINYARSQPPPPSISHEQRLQATNARVHYYSGNDELQPPPRGYGGGYSYPPQSSSSYNQYAYGGYYGGGSAPAPPADIPSSSREPAAAPPPPSPPRVSTWDFLNPFETYDSYYEQPTATAAPYSPSRSSKDVREEEGIPDLEDEDMEVVKEAYGDEKHPMKGYMGNGKATKEDGRSSTRDELPRKSKSSEASSSGSSLEHDVHVVEKSVVGEQVQHSEPQQHVAGLPPTGSDKIYIDDTEVVVEIRTQFERASQSASEVSKMLEVGKMPYYQKSSGFKVSAMMVCGIPTMEEEFLRFEEDKAMGSGNLSSTLQKLYMWEKKLLEEVKRRGCGYCMTENVRS

SEQ ID NO: 190692 - protein, 601 aa, Zea Mays
MGCGQSKTEEEYAVQHCRARSELLALAIRQRYMLADAHHAYAESLRAVGALLHDFLRGVQSLPPPPPEPALRLPLQRKGDGLPAASPPPPAIASSSSAAKQVRIAPNDGHIQFSDDDSDSDDGHIKFHSDEEPDPARRRPDVVHSAGAPGPPPPQMGPPYSSGYAPPPYGPGYGYGYANGPGPGPGPDYGGIGMSSGGGGGYGQSYGGMGGGGSGGGAGYNDQSYGGMGSGGGAGGYDQGYGGMGGYGQSFFNINYARSQPPPPSISHEQRLQATNARVHYYSGNDELQPPPRGYGGGYSYPPQSSSSYNQYAYGGYYGGGSAPAPPADIPSSSREPAAAPPPPSPPRVSTWDFLNPFETYDSYYEQPTATAAPYSPSRSSKDVREEEGIPDLEDEDMEVVKEAYGDEKHPMKGYMGNGKATKEDGRSSTRDELPRKSKSSEASSSGSSLEHDVHVVEKSVVGEQVQHSEPQQHVAGLPPTGSDKIYIDDTEVVVEIRTQFERASQSASEVSKMLEVGKMPYYQKSSGFKVSAMMVCGIPTMEEEFLRFEEDKAMGSGNLSSTLQKLYMWEKKLLEEVKVDEDVERYARMPSDTIACHIPS

SEQ ID NO: 190693 - protein, 1046 aa, Zea Mays
MIPSPFFPVKPPHQKGSSADAPRCLVLHNQRPQPVYTLEPPNTAHNTRSRRSASLVATARLSPRPTEEPHAPTAAGGGGARRSMRAGCHRGQRKRRRTCAARTATSRSPLAPTPKGEDSRPSPRPFHHPPLNKRRFLRAVAMGCGQSKTEEEYAVQHCRARSELLALAIRQRYMLADAHHAYAESLRAVGALLHDFLRGVQSLPPPPPEPALRLPLQRKGDGLPAASPPPPAIASSSSAAKQVRIAPNDGHIQFSDDDSDSDDGHIKFHSDEEPDPARRRPDVVHSAGAPGPPPPQMGPPYSSGYAPPPYGPGYGYGYANGPGPGPGPDYGGIGMSSGGGGGYGQSYGGMGGGGSGGGAGYNDQSYGGMGSGGGAGGYDQGYGGMGGYGQSFFNINYARSQPPPPSISHEQRLQATNARVHYYSGNDELQPPPRGYGGGYSYPPQSSSSYNQYAYGGYYGGGSAPAPPADIPSSSREPAAAPPPPSPPRVSTWDFLNPFETYDSYYEQPTATAAPYSPSRSSKDVREEEGIPDLEDEDMEVVKEAYGDEKHPMKGYMGNGKATKEDGRSSTRDELPRKSKSSEASSSGSSLEHDVHVVEKSVVGEQVQHSEPQQHVAGLPPTGSDKIYIDDTEVVVEIRTQFERASQSASEVSKMLEVGKMPYYQKSSGFKVSAMMVCGIPTMEEEFLRFEEDKAMGSGNLSSTLQKLYMWEKKLLEEVKTEERMRVLYDRKREELKMLDEKGAEAHKLEATELYIRKLSTKISIAIQVVNTISEKISKLRDEELWPQTCELIQGLMRMWSVMLECHQIQLHAISQARYIDSMIDTAKFGDDHMDLIKRLELQLLDWIACFAAWVSAQKNYVKTLNKWLTNGVIYVPEETEDGAPPFSPGRLGGPPIFVICNNWAASVDRVSEKEVVEAMQAFASNVLNLWERHRSEQRQGLMANKGMDRDLRVMERDEQSMRKALEAQNKKLVLISNQGSVSLSAQALHERGPGAEAGGSLQTGLRNIFEAMENFTSASANTYRELHLRAEEEKARVAQESGSVS

SEQ ID NO: 190694 - protein, 88 aa, Zea Mays
MNTEKLTGRIFGAAKPTLHFLFYLPFIDPLLGVSQIQDACTSALNLPCHPTTKTWLLRPWISAPPLQRCMQAKGPGLSRGMHAHEHHV

SEQ ID NO: 190695 - protein, 151 aa, Zea Mays
MEGLRIGAPIMQVYHEKSFILPDVSRVLACLYEKDVKFETHTASYRSLLGLQASSHAPVPFYEGPTFLEESREICRYIAEKYENQGYPFLLGKDALERASIEQWLHNEEHAFNPPSRALFFHLAFPLGEGEDDDIDVHTRKLEEEVVGCYF

SEQ ID NO: 190696 - protein, 372 aa, Zea Mays
MHLQQGICCNHYWTTYFWPMHEITFSTIDKPKLLSELTSLLGELGLNIQEAHAFSTNDGYSLDVFVVVGWHDEETEDLVEAVQKEIGRIEETQAWSSSHSWSTPVENMQIAEISAAGRVEIPTDGASEWEIDVKLLKFGNKVASGSYGDLYRGTYCSQDVAIKVLKPERINADMQREFAQEVYIMRKVRHKNVVQFIGASTKPPNLYIVTEFMSGGSVYDYLHKHKGVFKLPTLVGVAMDVSKGMSYLHQNNIIHRDLKTANLLMDENGTVKVADFGVARVKAQSGVMTAETGTYRWMAPEVIEHKPYDQKADVFSFGILMWELLTGKIPYEYLTPLQAAVGVVQKVGDEHEGKHKDRTLGGFFSALRGRSH

SEQ ID NO: 190697 - protein, 244 aa, Zea Mays
MQREFAQEVYIMRKVRHKNVVQFIGASTKPPNLYIVTEFMSGGSVYDYLHKHKGVFKLPTLVGVAMDVSKGMSYLHQNNIIHRDLKTANLLMDENGTVKVADFGVARVKAQSGVMTAETGTYRWMAPEVIEHKPYDQKADVFSFGILMWELLTGKIPYEYLTPLQAAVGVVQKGLRPTIPKHTYAMLSELLQKCWQQDPAQRPDFSEILETLQRIAEEVGDEHEGKHKDRTLGGFFSALRGRSH

SEQ ID NO: 190698 - protein, 291 aa, Zea Mays
MQIAEISAAGRVEIPTDGASEWEIDVKLLKFGNKVASGSYGDLYRGTYCSQDVAIKVLKPERINADMQREFAQEVYIMRKVRHKNVVQFIGASTKPPNLYIVTEFMSGGSVYDYLHKHKGVFKLPTLVGVAMDVSKGMSYLHQNNIIHRDLKTANLLMDENGTVKVADFGVARVKAQSGVMTAETGTYRWMAPEVIEHKPYDQKADVFSFGILMWELLTGKIPYEYLTPLQAAVGVVQKKCWQQDPAQRPDFSEILETLQRIAEEVGDEHEGKHKDRTLGGFFSALRGRSH

SEQ ID NO: 190699 - protein, 595 aa, Zea Mays
MAVEEAAESCGSHAAAAASGGGAAELATSSSSAAAAVQARKQQQQQRHKLEVYTEVLRRLHDAGLPDARAPGFDDELWNHFNRLPARYAMDVNVERAEDVLTHKRLLEQAKDPAQRPAFAVRAVQVSPILDGNQTDADSNTAGEEVASRLLNRQQSIHPPPAFGSSTNLEALALEASKSHQDHDSTSDNCRSLYRPMHEITFSTIDKPKLLSELTSLLGELGLNIQEAHAFSTNDGYSLDVFVVVGWHDEETEDLVEAVQKEIGRIEEQTQAWSSSHSWSTPVENMQIAEISAAGRVEIPTDGASEWEIDVKLLKFGNKVASGSYGDLYRGTYCSQDVAIKVLKPERINADMQREFAQEVYIMRKVRHKNVVQFIGASTKPPNLYIVTEFMSGGSVYDYLHKHKGVFKLPTLVGVAMDVSKGMSYLHQNNIIHRDLKTANLLMDENGTVKVADFGVARVKAQSGVMTAETGTYRWMAPEVIEHKPYDQKADVFSFGILMWELLTGKIPYEYLTPLQAAVGVVQKGLRPTIPKHTYAMLSELLQKCWQQDPAQRPDFSEILETLQRIAEEVGDEHEGKHKDRTLGGFFSALRGRSH

SEQ ID NO: 190700 - protein, 379 aa, Zea Mays
MHEITFSTIDKPKLLSELTSLLGELGLNIQEAHAFSTNDGYSLDVFVVVGWHDEETEDLVEAVQKEIGRIEETQAWSSSHSWSTPVENMQIAEISAAGRVEIPTDGASEWEIDVKLLKFGNKVASGSYGDLYRGTYCSQDVAIKVLKPERINADMQREFAQEVYIMRKVRHKNVVQFIGASTKPPNLYIVTEFMSGGSVYDYLHKHKGVFKLPTLVGVAMDVSKGMSYLHQNNIIHRDLKTANLLMDENGTVKVADFGVARVKAQSGVMTAETGTYRWMAPEVIEHKPYDQKADVFSFGILMWELLTGKIPYEYLTPLQAAVGVVQKKCWQQDPAQRPDFSEILETLQRIAEEVGDEHEGKHKDRTLGGFFSALRGRSH

SEQ ID NO: 190701 - protein, 296 aa, Zea Mays
MAVEEAAESCGSHAAAAASGGGAAELATSSSSAAAAVQARKQQQQQRHKLEVYTEVLRRLHDAGLPDARAPGFDDELWNHFNRLPARYAMDVNVERAEDVLTHKRLLEQAKDPAQRPAFAVRAVQVSPILDGNQTDADSNTAGEEVASRLLNRQQSIHPPPAFGSSTNLEALALEASKSHQDHDSTSDNCRSLYRPMHEITFSTIDKPKLLSELTSLLGELGLNIQEAHAFSTNDGYSLDVFVVVGWHDEETEDLVEAVQKEIGRIEELKTCRLLRFQQLAVLRYQQMVLVNGKLM

SEQ ID NO: 190702 - protein, 398 aa, Zea Mays
MHEITFSTIDKPKLLSELTSLLGELGLNIQEAHAFSTNDGYSLDVFVVVGWHDEETEDLVEAVQKEIGRIEETQAWSSSHSWSTPVENMQIAEISAAGRVEIPTDGASEWEIDVKLLKFGNKVASGSYGDLYRGTYCSQDVAIKVLKPERINADMQREFAQEVYIMRKVRHKNVVQFIGASTKPPNLYIVTEFMSGGSVYDYLHKHKGVFKLPTLVGVAMDVSKGMSYLHQNNIIHRDLKTANLLMDENGTVKVADFGVARVKAQSGVMTAETGTYRWMAPEVIEHKPYDQKADVFSFGILMWELLTGKIPYEYLTPLQAAVGVVQKGLRPTIPKHTYAMLSELLQKCWQQDPAQRPDFSEILETLQRIAEEVGDEHEGKHKDRTLGGFFSALRGRSH

SEQ ID NO: 190703 - protein, 65 aa, Zea Mays
MKTFIYLGGEAFLGGGDGEQTFFEGEPFLGGGEGDRLSVLQANWAYNIVFRSSDRLIEATGRSGD

SEQ ID NO: 190704 - protein, 95 aa, Zea Mays
MSMCTQTGGNSRWVNSMEWSGKEAFVSSSEKPFTVDGKEAGVLKSHGPLSFLKVHDAGHMVPMDQPKAALEMLKRWTSGNLSEPSSSSQRLDFTM

SEQ ID NO: 190705 - protein, 195 aa, Zea Mays
MQLAVYEKHLDTMRQQGAVVIMDLDIATNFTDLGNQEILLMAAEFKISINAYLSGLLYSPVRSLAQVIAFNEAHPVEERLKDFGQPDLIAAEKTNGIGTRERAAIRRLREISTNGLEKLMKERRLDAIVAPNSDASSVLAVGGYPGIAVPAGYDEQGVPFAICFGGLQGYEPRLIEIAYAFEQATKVRRPPTFKR

SEQ ID NO: 190706 - protein, 407 aa, Zea Mays
MEACPLWGASCDACETKWKATTGRNAMGTRAYVDERRHEFAGDTPTTNASTTGSRGRLAHREQRERRRARAVVGQPRLATFSSTTKQSTKQQGRRHSTAHSRQARSLALGRERVVPAEVVAVVVDHVALLRPAHGRVLPRREPGPRGGRRHGPARGRGAGGAAGDDEAVEARDEGLVAVVGAVAAVVGGPVGGVPDGAVDPHGAVREGELGAALVAADGHVVHEEGDGVGVPQDGVGVVGRRGVEPEVEPHLPPHDAPVAAAAHVHVRLQRVGLPRDGAQELHVDLVVETRVRLVVGEIEGGVGAGGVSGGELDASGEVAVPVRVLRLETTPCMQGLCQHQDHNQQCKVRNSASMVHMAHITGTGTGTTSRPHHSPQPQRFFFPFILLDISKNNRTTTYRRSCRARW

SEQ ID NO: 190707 - protein, 146 aa, Zea Mays
MVAAEGRHAQIQACKLHRWRPWLLYSPHKLCKTRTKTSNALLHQSHLFLLPLVLLHLILFKLQLRIHNTAMPMEVICRLPSLEAICSLLIMGDQQAILLKQATEVLSFHTSINTRTPSISTLLLSNSPKHQGYPSSICAAHTSCHQ

SEQ ID NO: 190708 - protein, 319 aa, Zea Mays
MQDSLLLLTAATVFGTCHRLEPLSPEKRSMWNREMDCLLSICEYIVEFSPTVQAMPDGSTHDVMATSPRSDILMNLPALEKLETMLLGILDSFHKPEFWYADQRNQSFKESKKSFQRSEDKWWLPEPCVPDSGLSDCMHRELQQKRDQASQIHKMAMEINSSILSEMQVPLSYLETLPKSGRVGVGDTIYRYMSSGDQFSPEHLLNFLSLSSEHDALEIADRVEAAMYVWRRKASATHVVSKWENVTELNADGDKNLVLASRARSLLLCLKQRFPGLSQTTLDTSKIQYNKVMANIKQERKNSDYSMFICIFLVTRKRS

SEQ ID NO: 190709 - protein, 102 aa, Zea Mays
MMEMILSEFTKHVISSLVNLASNEIAKVLCIRNEISKLARKLESMRAIITDAEQAVVQNETTRDWLKRSREIIYEAEDINDRYNIEKEKFQISQPQSAQRCG

SEQ ID NO: 190710 - protein, 1039 aa, Zea Mays
MSNLKLGVEVTSAHDLLPKEQGTANPFVEVEFDGQKSRTAIRDRDLNPVWNEQLYFNVSDPSRLPELHLEAYVYHANRADNSKSCLGKVRISGTSFVSQPDAEALHYPLEKRTILSRARGELGLRVFLTDDPSVSVSAATPGGHHHQEFDMLSTPTTAAQEQQAAAAASSVPNPFQETRANPVRQVQHLPREQQRPAQPYPYHAADGGSYYGDQQQRSFSAVANKAAAPAPQVQVSRMYAPGPQQQPIDFQLKETSPTLGGGRVIGGRVYPGEKAGAYDLVEKMQYLFVRVVKARDLPNMDITGSLDPYVEVRHGNYKMKTKYFEKNQRPEWDEVFAFPKEVMQSATLEVVVKDKDVIRDDYVGRVSVDLSEVPLRVPPDSPLAPEWYRLVGKDGMRDRGELMLAVWYGTQADECFPSAIHAGSTPVESHLHSHIRGKVYPAPRMWYVRVNVLEAHDVYPMAENRVPDVLVKVRLGHQLLNTRQVRSPTRNFMWNDELMFVAAEPFEDDLVVSVEDRVAQNKDEVIGEAVIPLARLPRRADHKPVPPQWVDLRRPGLIDDVDQLLKKKEDKFYAKVSLRVCLEGGYHVLDESTQYCSDLRPTMKQLWKPPIGMLEVGILSANGLNPTKPRNDRGSCDAYCVAKYGSKWVRTRTIVDSLSPRFNEQYTWEVFDHGTVLTIGLFDNCHISGDNGSSAGHMDKPIGKVRIRLSTLETGRVYTHSYPLLVLGPSGVKKMGELHLAIRFTAASLINVLFTYSRPLLPKMHYAQPLSIVQQEMLRHQAVQLVAQRLGRMEPPVRKEVVEFMSDARSHLWSMRRSKANFFRLMQVFSGVIAAGKWFGDVCQWKNPVTTVLVHVLFVMLVFYPDLILPTVFLYMFLIGLWNYRFRPRFPPHMNTRISYADVANPDELDEEFDTFPTSKSPDLIRMRYDRLRHVAGRIQTVVGDIATQGERLQSLLSWRDPRATAMFLIFCLITAIILYVTPFQAIALCLGFFSMRHPRFRHKVPSAPANFFRRLPVSVTHISLYNSLILSFPQSWCT

SEQ ID NO: 190711 - protein, 98 aa, Zea Mays
MRYDRLRHVAGRIQTVVGDIATQGERLQSLLSWRDPRATAMFLIFCLITAIILYVTPFQAIALCLGFFSMRHPRFRHKVPSAPANFFRRLPAKTDSLL

SEQ ID NO: 190712 - protein, 440 aa, Zea Mays
MFQSLARERLEQLNASPSATPSKYFRVYSALLLVLSADLLWMWLSVGFCRSCNSKLFWLLFFEPLSIAFDTLQSIMVHGFQLFDIWQRHLMESGADFLDFQKSYKQAAGSFSEWRGKLTRDFGFAIDLISMLMSFGHYSMIFWLRGMAFHLVDAVLLWNLRALIVSFLKRIKTYIKLRKALSSLDGALPDATYDEICAYDDECAICRGPMGRAKKLSCNHLFHLACLRSWLDQGLMEGYSCPTCRRPLVLSSEGQTRSPIVEAANVQRIAEQLTMGMNQQRVSGNEHPVEQQNPSDAVWRGAGLDASWIPPWSSPVIDNPSSSSAVRSVGLSGVQMMMRQLASVTDSYGHADGTWNLWPEPMAGSSLVPSTSSMVPGSASASGLRLRGSAGTGNGSLSEVLTMVDRVREVLPHIPDELIIEDLMRTNNINATVNNLLLMQ

SEQ ID NO: 190713 - protein, 428 aa, Zea Mays
MATVNCLYVAAASTAVSTAALQWWASSLLDGDAGAGGDGDWLGAVLRSRVTVALLANLAAHVFVVVILALKTIFFVQLTSVETRKVLEHIINYVLHKGTFLPLAVPPTSQQIILWSTWLVILCSLKMFQSLARERLEQLNASPSATPSKYFRVYSALLLVLSADLLWMWLSVGFCRSCNSKLFWLLFFEPLSIAFDTLQLFDIWQRHLMESGADFLDFQKSYKQAAGSFSEWRGKLTRDFGFAIDLISMLMSFGHYSMIFWLRGMAFHLVDAVLLWNLRALIVSFLKRIKTYIKLRKALSSLDGALPDATYDEICAYDDECAICRGPMGRAKKLSCNHLFHLACLRSWLDQGLMEGYSCPTCRRPLVLSSEGQTRSPIVEAANVQRIAEQLTMGMNQQRVSGNEHPVEQQNPSDAVWRCGYTLHTGTE

SEQ ID NO: 190714 - protein, 267 aa, Zea Mays
MPFAFCTREKRWCEFAEPVDGESTQFLQELAQKYNMVIVSPILERDINHGETIWNTAVVIGNNGNIIGIHRKNHIPRVGDFNESTYYMEGNTGHPVFETAYGKIGVNICYGRHHPLNWLAFGLNGAEIVFNPSATVGELSEPMWPIEARNAAIANSYFVGSINRVGTEVFPNPFTSGDGKPQHADFGHFYGSSHFSAPDASCTPSLSRYRDGLIISDMDLNLCRQIKDKWAFRMTARYEMYASLLSEYLKPDFKPQVIVDPLINKKA

SEQ ID NO: 190715 - protein, 682 aa, Zea Mays
MILLLMLLLAVDLWYQISRLIMGWEILEIISCILMPQAIFSPPTNVVSEAYANPGLSQVSESYFGSLKDQANHAPSLLTSDLDSQSKQHTNSLMKTPVSDNMPNDVPARQNSLGLWKYLDDDISLDDNPSSGILPTEQVTGEIPFQITEISSEWAYCTEDTKVLVVGCFHENYRHLAGTNLFCVIGDQCVDANIVQTGVYRFIARPHAPGRVNLYLTLDGKTPISEVLSFHYRMVPDSQNLAEDEPQKSKLQMQMRLARLLFTTNKKKIAPKLLVEGSKVSNLLSASTEKEWMDLSKFVTDSKGTYVPATEGLLELVLRNRLQEWLVEKLIEGHKSTGRDDLGQGPIHLCSCLGYTWAIHLFSLSGFSLDFRDSSGWTALHWAAYCGREKMVAALLSAGANPSLVTDPTHDVPGGQTAGDLAAGQGYHGLAAYLSEKGLTAHFEAMSLSKGKRSTSRTESLKRNTKEFENLSEQELCLRESLAAYRNAADAASNIQAALRERTLKLQTKAIQLANPENDASAIVAAMRIQHAYRNYNRKKMMRAAARIQSHFRTWQIRRNFMNMRRQAIKIQAAYRGHQVRRQYRKVLWSVGVVEKAILRWRKKRKGLRGIATGMPVAMATDAEAASTAEEDYYQVGRQQAEDRFNRSVVRVQALFRSHRAQQEYRRMKVAHEEAKVEFGRK

SEQ ID NO: 190716 - protein, 665 aa, Zea Mays
MAGGAGGRDPLVASEIHGFLTCADLNFDKLMMEAGTRWFRPNEIYAVLANYARFKVHAQPIDKPISGTVVLYDRKVVRNFRKDGHNWKKKKDGKTVQEAHEKLKIGNEEKVHVYYARGEDDPNFFRRCYWLLDKELERIVLVHYRQTSEESALPPSHVEAEVAEVPRINMIHYTSSTDSASAHTELSSSAAAAPEDINSNGGGAVSSETDNQGSSLESFWVDLLESSMKNDTPVDASACGGSLVSNQQTNNGMGDSGNNILYINATSNAIFSPPTNVVSEAYANPGLSQVSESYFGSLKDQANHAPSLLTSDLDSQSKQHTNSLMKTPVSDNMPNDVPARQNSLGLWKYLDDDISLDDNPSSGILPTEQVTGEIPFQITEISSEWAYCTEDTKVLVVGCFHENYRHLAGTNLFCVIGDQCVDANIVQTGVYRFIARPHAPGRVNLYLTLDGKTPISEVLSFHYRMVPDSQNLAEDEPQKSKLQMQMRLARLLFTTNKKKIAPKLLVEGSKVSNLLSASTEKEWMDLSKFVTDSKGTYVPATEGLLELVLRNRLQEWLVEKLIEGHKSTGRDDLGQGPIHLCSCLGYTWAIHLFSLSGFSLDFRDSSGWTALHWAAYCGSFLLLGKKWLLLFCLLEQIQAWLQILLMMSLVDKLLVIWLLDKVIMA

SEQ ID NO: 190717 - protein, 872 aa, Zea Mays
MAGGAGGRDPLVASEIHGFLTCADLNFDKLMMEAGTRWFRPNEIYAVLANYARFKVHAQPIDKPISGTVVLYDRKVVRNFRKDGHNWKKKKDGKTVQEAHEKLKIGNEEKVHVYYARGEDDPNFFRRCYWLLDKELERIVLVHYRQTSEESALPPSHVEAEVAEVPRINMIHYTSSTDSASAHTELSSSAAAAPEDINSNGGGAVSSETDNQGSSLESFWVDLLESSMKNDTPVDASACGGSLVSNQQTNNGMGDSGNNILYINATSNAIFSPPTNVVSEAYANPGLSQVSESYFGSLKDQANHAPSLLTSDLDSQSKQHTNSLMKTPVSDNMPNDVPARQNSLGLWKYLDDDISLDDNPSSGILPTEQVTGEIPFQITEISSEWAYCTEDTKVLVVGCFHENYRHLAGTNLFCVIGDQCVDANIVQTGVYRFIARPHAPGRVNLYLTLDGKTPISEVLSFHYRMVPDSQNLAEDEPQKSKLQMQMRLARLLFTTNKKKIAPKLLVEGSKVSNLLSASTEKEWMDLSKFVTDSKGTYVPATEGLLELVLRNRLQEWLVEKLIEGHKSTGRDDLGQGPIHLCSCLGYTWAIHLFSLSGFSLDFRDSSGWTALHWAAYCGREKMVAALLSAGANPSLVTDPTHDVPGGQTAGDLAAGQGYHGLAAYLSEKGLTAHFEAMSLSKGKRSTSRTESLKRNTKEFENLSEQELCLRESLAAYRNAADAASNIQAALRERTLKLQTKAIQLANPENDASAIVAAMRIQHAYRNYNRKKMMRAAARIQSHFRTWQIRRNFMNMRRQAIKIQAAYRGHQVRRQYRKVLWSVGVVEKAILRWRKKRKGLRGIATGMPVAMATDAEAASTAEEDYYQVEFGRK

SEQ ID NO: 190718 - protein, 686 aa, Zea Mays
MKNDTPVDASACGGSLVSNQQTNNGMGDSGNNILYINATSNAIFSPPTNVVSEAYANPGLSQVSESYFGSLKDQANHAPSLLTSDLDSQSKQHTNSLMKTPVSDNMPNDVPARQNSLGLWKYLDDDISLDDNPSSGILPTEQVTGEIPFQITEISSEWAYCTEDTKVLVVGCFHENYRHLAGTNLFCVIGDQCVDANIVQTGVYRFIARPHAPGRVNLYLTLDGKTPISEVLSFHYRMVPDSQNLAEDEPQKSKLQMQMRLARLLFTTNKKKIAPKLLVEGSKVSNLLSASTEKEWMDLSKFVTDSKGTYVPATEGLLELVLRNRLQEWLVEKLIEGHKSTGRDDLGQGPIHLCSCLGYTWAIHLFSLSGFSLDFRDSSGWTALHWAAYCGREKMVAALLSAGANPSLVTDPTHDVPGGQTAGDLAAGQGYHGLAAYLSEKGLTAHFEAMSLSKGKRSTSRTESLKRNTKEFENLSEQELCLRESLAAYRNAADAASNIQAALRERTLKLQTKAIQLANPENDASAIVAAMRIQHAYRNYNRKKMMRAAARIQSHFRTWQIRRNFMNMRRQAIKIQAAYRGHQVRRQYRKVLWSVGVVEKAILRWRKKRKGLRGIATGMPVAMATDAEAASTAEEDYYQVGRQQAEDRFNRSVVRVQALFRSHRAQQEYRRMKVAHEEAKVEFGRK

SEQ ID NO: 190719 - protein, 152 aa, Zea Mays
MSRWRAAASSISAAAASRNSAAEARVLSRALAKAPSPPPLPPQTLSRTFAKSAAATATATSPGPGATSPPAGTWSEIRLNSMFLSKPCSLALPPDSPHRAVDPQFKGIRRFLLTLLLFYSKQSKSIRGANVVYDRITSQVDTPAIYDVGENI

SEQ ID NO: 190720 - protein, 213 aa, Zea Mays
MMSGPPASGYDRSPLFYGGGGGAPPPIPLGTGSYGAPYPHLGMRYGYGPPVGPPGSYGLFSSYGPPGPMSGMGYGPGPELGRYSYGFRGSPMPVSSPWSGGALAENNDNIASRKRRGAVLKKLGPDGLSEGDWTCPKCDNINFSFRSTCNMKKCGAPRPTPGGNTSSSRKDNSNKEAPEGSWTCPECNNLNYPFRTVCNRKGCSYSKPAPANN

SEQ ID NO: 190721 - protein, 267 aa, Zea Mays
MASAKVENRGALSKRSRNDVSVREGDWNCPQCGNVNFSFRNVCNRGACGAPRPSPSPSPRMMSGPPASGYDRSPLFYGGGGGAPPPIPLGTGSYGAPYPHLGMRYGYGPPVGPPGSYGLFSSYGPPGPMSGMGYGPGPELGRYSYGFRGSPMPVSSPWSGGALAENNDNIASRKRRGGPDGLSEGDWTCPKCDNINFSFRSTCNMKKCGAPRPTPGGNTSSSRKDNSNKEAPEGSWTCPECNNLNYPFRTVCNRKGCSYSKPAPANN

SEQ ID NO: 190722 - protein, 239 aa, Zea Mays
MAMDAERRQAELIAQFSSQAVALSSAQQLAALVLEATSHPALFAFSELLALPALSMLAGTQYSSSLDLLRLFAYGTLKDYKTLLPDQVRKLKQLSVLTLAESTKILPYDQLMQELDVSNVRELEDFLINECMYSGIVRGKLDQLRRCFEVQFAAGRDLTPDQLNNMIEILSDWLGTSDSLLHQIQEKIKWADTMSDVNKKHQKEFEDRVEEAKKSIKKLNNLSRQTSTYEGMTTTSLNL

SEQ ID NO: 190723 - protein, 289 aa, Zea Mays
MAMVTATISCSYPQLRYRPSPRCRRHGPAAATVAALATPRSEQDIVIVGAGVAGLATAVALRRLGVGAAVLEQGDALRAGGTSLTLFKNGWRVLDAIGVADELRPKYLRIQGWPPQDEDEVAGAGSARVLLRRGSSREVRAVERRALLETLASKLPPGAISFSSKLKSISEQGRAGTLLELEDGRQILAKIVVGCDGVNSPIARWMGFSEPRYVGHMAFRGLAEYADGQPFEPKVNYIYGRGVRAGFVPVSATKVYWFICFNRQDPGNRCGTDAQTTTSPPPHTKKQST

SEQ ID NO: 190724 - protein, 331 aa, Zea Mays
MRMRSPGRDLREFSFDEEAPGQEVRAVERRALLETLASKLPPGAISFSSKLKSISEQGRAGTLLELEDGRQILAKIVVGCDGVNSPIARWMGFSEPRYVGHMAFRGLAEYADGQPFEPKVNYIYGRGVRAGFVPVSATKVYWFICFNRQDPGPKITDPTALKTEALELVRGWPSDLLAVMRSTPEGAVVRTPLVDRWLWPGLAPAASRGGRVVLAGDAWHPMTPNLGQGACCALEDAIVLARRLADAGADGAQAAAAMRAYEAERWARVFPLTARAGLVGALVQWENAAVCAARDGVVIPRLVRLGPFLEHTNFECDLLEPAPGVAMTPAH

SEQ ID NO: 190725 - protein, 426 aa, Zea Mays
MPAPRPRSGHRGRLGDAAVGAGHRHRRRGRRGAGHGGGAAAARRGRRRAGAGRRPARGRHVPDAVQERVARAGRHRRRRRAPPQVPPHPGDEDEVAGAGSARVLLRRGSSRCYCYRQEVRAVERRALLETLASKLPPGAISFSSKLKSISEQGRAGTLLELEDGRQILAKIVVGCDGVNSPIARWMGFSEPRYVGHMAFRGLAEYADGQPFEPKVNYIYGRGVRAGFVPVSATKVYWFICFNRQDPGPKITDPTALKTEALELVRGWPSDLLAVMRSTPEGAVVRTPLVDRWLWPGLAPAASRGGRVVLAGDAWHPMTPNLGQGACCALEDAIVLARRLADAGADGAQAAAAMRAYEAERWARVFPLTARAGLVGALVQWENAAVCAARDGVVIPRLVRLGPFLEHTNFECDLLEPAPGVAMTPAH

SEQ ID NO: 190726 - protein, 117 aa, Zea Mays
MVWNHVCHWSADIAATNTNKLTEVFDEDKFTADDSMGVAEINITDIYDAAKLDLKHASDGTRIKTIYPVGVNYLGGESHVQWKDGKVVQDLILKLRKVESGLIVVQLEWVHVPGVKL

SEQ ID NO: 190727 - protein, 467 aa, Zea Mays
MLRLRLLRQRGTVEDEPWSLLKPVRPHQQKHVGKLRYDSRDTDLQKANNSCQQNNSKCMPDEQLYNDRVPAEEKSNDISAEGLVDGSGNLQCDEQMKAKGDTCQKDCENFCVHSQHYSEASSFARYGEHSTIDENQFVEDISPSTTSTLHELETPSSRGDNLREEDNQSINGSWEERGLWISSLGWPAPIDTMSPDSWHQETMGDIENHNNPIQFNDRPWIESPNSWRSLCVVTQSDCHALSHNADICNLLERKKVSKSLESDFSNKMNQLLLTALQKQRQQRMMDDFGGYYDERMYWRQNDEIRDADKEASAPCSLAPVAHLGAHQQESWQHSSFGSQHQHHDNQNLLEMEVRVRGEMSQIHQEIYQLRKLVESCIASQVKMQHSIKEEVCSALREAGLMRSQPDTAAAKRGNCCICHRMQVDSLLYRCGHVCTCFDCADQLKSSGMSCPICQSPIDDVVLARLNF

SEQ ID NO: 190728 - protein, 387 aa, Zea Mays
MEELVAAIAHRRRREVAALAERHAVSRFAHKGRIQSMLRLRLLRQRGTVEDEPWSLLKPVRPHQQKHVGKLRYDSRDTDLQKANNSCQQNNSKCMPDEQLYNDRVPAEEKSNDISAEGLVDGSGNLQCDEQMKAKGDTCQKDCENFCVHSQHYSEASSFARYGEHSTIDENQFVEDISPSTTSTLHELETPSSRGDNLREEDNQSINGSWEERGLWISSLGWPAPIDTMSPDSWHQETMGDIENHNNPIQFNDRPWIESPNSWRSLCVVTQSDCHALSHNADICNLLERKKVSKSLESDFSNKMNQLLLTALQKQRQQRMMDDFGGYYDERMYWRQNDEIRDADKEASAPCSLAPVAHLGAHQQESWQHSSFGSQHQHHDNQNLLSG

SEQ ID NO: 190729 - protein, 440 aa, Zea Mays
MEELVAAIAHRRRREVAALAERHAVSRFAHKGRIQSMLRLRLLRQRGTVEDEPWSLLKPVRPHQQKHVGKLRYDSRDTDLQKANNSCQQNNSKCMPDEQLYNDRVPAEEKSNDISAEGLVDGSGNLQCDEQMKAKGDTCQKDCENFCVHSQHYSEASSFARYGEHSTIDENQFVEDISPSTTSTLHELETPSSRGDNLREEDNQSINGSWEERGLWISSLGWPAPIDTMSPDSWHQETMGDIENHNNPIQFNDRPWIESPNSWRSLCVVTQSDCHALSHNADICNLLERKKVSKSLESDFSNKMNQLLLTALQKQRQQRMMDDFGGYYDERMYWRQNDEIRDADKEASAPCSLAPVAHLGAHQQESWQHSSFGSQHQHHDNQNLLEMEVRVRGEMSQIHQEIYQLRKLVESCIASQVKMQHSIKEEVCSALREAGELCFF

SEQ ID NO: 190730 - protein, 162 aa, Zea Mays
MAPPARSPTAGPRRRALVVLALALLLLLPLLLLLHLISSPSPRHLPAPRTPSQSQACDYSAGEWVRDPFAGSSLRYDHTCKEIFKGWNCIANGKGFVGDSLNRNMFASLVCMLRGVNGEVRKWRPAGADRGFTFLRYNLTVAYHRTNLLVRYGGQGIQMEAL

SEQ ID NO: 190731 - protein, 199 aa, Zea Mays
MAPPARSPTAGPRRRALVVLALALLLLLPLLLLLHLISSPSPRHLPAPRTPSQSQACDYSAGEWVRDPFAGSSLRYDHTCKEIFKGWNCIANGKGNARDLLSWRWTPAGPGCELPRLDPRRFLERHRDTSIGFVGDSLNRNMFASLVCMLRGVNGEVRKWRPAGADRGFTFLRYNLTVAYHRTNLLVRYGGQGIQMEAL

SEQ ID NO: 190732 - protein, 250 aa, Zea Mays
MVRFANGVLLGQTVASPSYAITSLWHTTEQISWWSRNPNGGPLESLGYKQGYRVDVDIPDQTWVEACSFHDVLIFNTGHWWWAPSKFDPIRSPMLFFEKGRPIVPPLLPPAGLDLALQNMISFANKATRPNTVKFFRTQSPRHFEGGDWNEGGSCQCNQPLSSKEVEEIFSLDNNSTNVEARLVNQHLVKALQQTSFRVLDITRMSEFRADAHPSTTGGKKHDDCMHWCLPGPTDTWNDLLALSLEALES

SEQ ID NO: 190733 - protein, 498 aa, Zea Mays
MYYKVLIDNIEEYAPIVYTPTVGLVCQNYSGLFRRPRGMYFSAEDRGEMMSMVYNWPADQVDMIVVTDGSRILGLGDLGVHGIGIAIGKLDLYVAAAGINPQRVLPVMIDVGTNNEKLLKDPLYLGLQEHRLEGDEYVSVIDEFMEAVFTRWPNVIVQFEDFQSKWAFRLLQRYRKTYRMFNDDVQGTAGVAIAGLLGAVRAQGRPMIDFPKQRIVVAGAGSAGIGVVNAASRTMARMLGNNDVAFESARSQFWIVDAHGLITEDREDIDPDARPFARRKSELGHQGLSEGASLVEVVKKVKPDVILGLSAVGGLFSKEVLEALKDSSSSRPAIFAMSNPTKNAECTPGEAFSILGEKVIFASGSPFHDVDLGDGKIGHSNQGNNMYLFPGIGLGTLLSGARVISDGMLQAAAERLASYMKEEEVLEGIIYPPISRIRDITKEVAAAVVREAVAEDLAEGYRDMDARELARLSEEETNEYVKTNMWSPVYPTIIYKKD

SEQ ID NO: 190734 - protein, 133 aa, Zea Mays
MFTEEQNELVESAAEMLYGLIHARYILTSKGLAAMLEKYKNYDFGRCPRVYCCGQPCLPVGQSDIHRSSTVKIYCPKCEDIYYPRSKYQGNIDGAYFGTTFPHLFLMTYEHLKPQKLSQRYVPRVFGFKLHKP

SEQ ID NO: 190735 - protein, 140 aa, Zea Mays
MTRIHRLRPLFLFVLLASLQCGAATAAAGYGGGAEGFCSAEPSSKCSGDQPLYWKVTHPTLAPAHLQDLPGFTRSVFKRDHALITPESHVFSPLPDWINTVGAYLISPAIGAHFIMYLANMQGGFLWISSCKHKAFYDLR

SEQ ID NO: 190736 - protein, 387 aa, Zea Mays
MRWRSPAVLRLQLWLLAVSASLAALGVLAADLSKEPFTIRISCGSFDDVRTEPTNTLWYRDFGYTGGRFANATRPSFIVPPLKTLRYFPLSDGPENCYNINNVPNGHYQVRLFFALLDNPNLDSEPIFDVSVEGTLFSSLLLGWSSDDEKTFAEALVFVQDSSLSVCFHSTGHGDPSILSIEVLQIDDDAYNFGPPREKGTVLRAVKRLKCGSGKPAFDEDLNGIHWGGDRFWLGLQTLSSSSDDQSISSENVIAETLLAPNFYPQGIYQSAIVGTDRQPSLSFEMDVTPNKNYSVWLHFAEIDNGVTAEEQRVFDVLINGDTAFKDIDIIRMTGERFTALVLNKTVAVSGITLKIILQPVKGTRAIINAIEVFEIIPAEKKTLPQE

SEQ ID NO: 190737 - protein, 389 aa, Zea Mays
MGPAVRSSVVIRATVVGLVLVGIALALPLAAALRPLREHVASIGAAASAGSWGDEHAFYKRDENDIGPYSWNITGTYKGSWTFAGATNGSSRFLEFVESKGDSVLELLSTPTKISGVHYVQGSVTFHDVIDNAHNGGVAQIRLEGVYIWPFRQLRMVANSGADGEPLQEEDYFLSNPYHLLRIFSSQVFQESSEEKNRRKNSLTYDMEKHCNTEIAAKVVRVSSNPNDGEHEKYRLEGLMESPAVDDDGECFSPILLNATSLNVEVYYNKAVNYTLMVTFISFLQVLLLIRQMEHSNTQSGAAKVSILMIGQQAIMDAYLCLLHLTAGILVESLFNAFATAAFFKFVVFSIFEMRYLLAIWKASRPLNSGEGWEIMRRELSVLYSRFCK

SEQ ID NO: 190738 - protein, 351 aa, Zea Mays
MLGLYLQSSLIMSAAASALVSALWWFTEPVLLLLRQEPEASRAAAAFVRAQAPGLFAFSFVQCLLRYLQTQSVVLPLVACSVAPFALHVALAHLMVNVLGLGLTGAAAAVSATFWVSCLMLLAYVLRSDAFSDTWRGFSADAFKYVLPTVKLATPSAVMVCLEYWAFELLVLIAGLLPNSTVSTSLIAMCTRVSNEIGAGNVERAKNAVSVTMKLSVLLAVTFVLLLAFGHGLWARLFSGSATIASEFAAITPLMVISIVLDSVQGVLSGVARGCGWQHLAAVTNLVAFYIVGMPLAILFAFKLDLRTRGLWAGLICGLTCQACSLLVITVRTKWSKLADAMKEEKANYVA

SEQ ID NO: 190739 - protein, 466 aa, Zea Mays
MSSAAPLLGDEAGGGEPAPRTPPPPSSWVGRVVDAAEARAQLGFAVPMVLTSMAYYGIPLVSVMFSGQLGDVHLAGATLGNSWATVTGYAFVTGLSGALETLCGQAYGAGLHRMLGLYLQSSLIMSAAASALVSALWWFTEPVLLLLRQEPEASRAAAAFVRAQAPGLFAFSFVQCLLRYLQTQSVVLPLVACSVAPFALHVALAHLMVNVLGLGLTGAAAAVSATFWVSCLMLLAYVLRSDAFSDTWRGFSADAFNLEYWAFELLVLIAGLLPNSTVSTSLIAMCSSTEAIAYMITFGFSAAVSTRVSNEIGAGNVERAKNAVSVTMKLSVLLAVTFVLLLAFGHGLWARLFSGSATIASEFAAITPLMVISIVLDSVQGVLSGVARGCGWQHLAAVTNLVAFYIVGMPLAILFAFKLDLRTRGLWAGLICGLTCQACSLLVITVRTKWSKLADAMKEEKANYVA

SEQ ID NO: 190740 - protein, 300 aa, Zea Mays
MLGQWDIDQAICVSHTSKENTVLRSGISPEKVFMVPNAVDTAMFTPSPKRLNCDEIVIVVVSRLVYRKGADLLVEVIPEVCRLFPKVHFIVGGDGPKRVRLEEMREKFSLQDRVEMLGAVPHAQVRSVLISGHIFLNSSLTEAFCIAILEAASCGLLTVSTRVGGVPEVLPDDMIVLAEPAPGDMVRAVKKAIDMLPGIDPQIMHLRMKELYSWDDVAKRTEIVYDRAMESPTTNLLDRLPRYLTCGSWAGKLFCLVMIINYLLWRLLEFLQPAVGIEEVPDIGPLHAHLGSRNDEAQEK

SEQ ID NO: 190741 - protein, 289 aa, Zea Mays
MDGQGTKHRILMVSDFFFPNFGGVESHIYYLSQCLLKLGHKVVVMTHAYGNRSGVRYVTNGLKVYYVPWRPFLMQNTLPTLSLTFPIVRTIIIREKISVVHGHQAFSTLCHEALMHARTMGYKVVFTDHSLYGFADAGSIHMNKVLQFTLADIDQAICVSHTSKENTVLRSGISPEKVFMVPNAVDTAMFTPSPKRLNCDEIVIVVVSRLVYRKGADLLVEVIPEVCRLFPKVHFIVGGDGPKRVRLEEMREKFSLQDRVEMLGAVPHAQVRSVLISGHIFLNRFFQMT

SEQ ID NO: 190742 - protein, 314 aa, Zea Mays
MEAIPDAEYTSYTILDVSNYIDQAICVSHTSKENTVLRSGISPEKVFMVPNAVDTAMFTPSPKRLNCDEIVIVVVSRLVYRKGADLLVEVIPEVCRLFPKVHFIVGGDGPKRVRLEEMREKFSLQDRVEMLGAVPHAQVRSVLISGHIFLNSSLTEAFCIAILEAASCGLLTVSTRVGGVPEVLPDDMIVLAEPAPGDMVRAVKKAIDMLPGIDPQIMHLRMKELYSWDDVAKRTEIVYDRAMESPTTNLLDRLPRYLTCGSWAGKLFCLVMIINYLLWRLLEFLQPAVGIEEVPDIGPLHAHLGSRNDEAQEK

SEQ ID NO: 190743 - protein, 214 aa, Zea Mays
MPDSSSSAGTGGMAPSSSAAASIAALAAAAASGDGSDDSGAANNNGALPLPLPPPHGVEDNNSPAELAGAGGAVQRRHGRGEAVQPEAQGVRRAPQGVRRPPRRPPPALLPAMQPVPRAVALRRHQAQLPPAPGGAQRAAPEEPRGGAGPARRAGRPGEPPPPDQIKTYYVSMLSLFCHAGRTHLASSPIHSPICVSSVVCARSRRLPLSCSVA

SEQ ID NO: 190744 - protein, 172 aa, Zea Mays
MPDSSSSAGTGGMAPSSSAAASIAALAAAAASGDGSDDSGAANNNGALPLPLPPPHGVEDNNSPAELAGAGGTSRAVARRVAAAGASPAAAARRGAAVNAQAAGGAGPSCQVERCSADMGVEKRYNRRHKVCDAHRKASVVLLAGLRQRFCQQCSRFFSWVMDSTVSCWIGS

SEQ ID NO: 190745 - protein, 165 aa, Zea Mays
MPRNVRLEHKTLKLLKYWTWQFVIVRPVCSILIIALQLLGLYPSWVSWTFSIILNFSVSMALYALVLFYHLFAKELAPHKPLAKFLCIKGIVFFSFWQGFALDVLTQAGVIKSHHFWLDVEHIQEAIQNVLVILEMVVFSVIQQYAYHVAPYSGADRAKFEKKNE

SEQ ID NO: 190746 - protein, 211 aa, Zea Mays
MSFMSPFPGMDLSKMDPGTLTLLGAAGCVMLTMHFTVQLVSQHLFYWKNPKEQKAILIIVLMAPLYAISSFVGLLDIQGSKTFFTFLDAVKECYEALVIAKFMALMYSYLNISISKNIVPDEIKGRVLHHSFPVSLFLPRNVRLEHKTLKLLKYWTWQFVIVRPSPWPYMHWFSSTTCLLKSWHLTSLLQSSCASKGLSSSLSGRVLRSMF

SEQ ID NO: 190747 - protein, 194 aa, Zea Mays
MSFMSPFPGMDLSKMDPGTLTLLGAAGCVMLTMHFTVQLVSQHLFYWKNPKEQKAILIIVLMAPLYAISSFVGLLDIQGSKTFFTFLDAVKECYEALVIAKFMALMYSYLNISISKNIVPDEIKGRVLHHSFPVSLFLPRNVRLEHKTLKLLKYWTWQFVIVRPSWHLTSLLQSSCASKGLSSSLSGRVLRSMF

SEQ ID NO: 190748 - protein, 141 aa, Zea Mays
MENCNYPNQHMICLKKHRYLVVIDDLWDTIKCAFPENNLRSIFIVTTRIESVARICCTHQECLYRMKPLNDHDSRRLLFSRTFSPNRDCPSKLKEVSAEILKKCGGLPLAIITVASLLTNLPTSEKEDWEKIKDSLDSSMG

SEQ ID NO: 190749 - protein, 456 aa, Zea Mays
MPRTTELESPGCPPLRALTTDILGLVKVVEAHARPAGAAKVVETWGAPDASCAIVAASLADRATDPVLAVARMNGVVELLNPLNGDTLAAVKAVGPAPNDGGAEGTFLACTEQGKASIRSITKENAASGSHIEPSATWDVCGGANVQFCSVDHGENYVMFGGKGIEVSLWDITSCSKTWSAKSPRTNSLGIFTRPWFTAGTFLCKDDHRKIVACTNSHQVRLYDTALQRRPAISVEFKESPIKAVAADPNGHDVYIGTGTGDLASFDMRTGKLLGCYFGKCSGSIRSIVRHPDLPLIASCGLDSYLRIWDTNTRQLLSAVFLKQHLTTVVLDSHFSVEEPGEMKSKQLESSVETETEVRKEKKKKSKAITEDETEAQIRKEKKSRTIEEEEQAGLVDHSDINDEVYARKEKKKKKSRGIEGGKERDSDGEICSPKRRKSGERSKCLKKRSKKQLVA

SEQ ID NO: 190750 - protein, 192 aa, Zea Mays
MPRTTELESPGCPPLRALTTDILGLVKVVEAHARPAGAAKVVETWGAPDASCAIVAASLADRATDPVLAVARMNGVVELLNPLNGDTLAAVKAVGPAPNDGGAEGDPLTALHLFTRQASDSILGTFLACTEQGKASIRSITKENAASGSHIEPSATWDVCGGANVQFCSVDHGENYVMFGGYRSEFVGYYIL

SEQ ID NO: 190751 - protein, 268 aa, Zea Mays
MFGGKGIEVSLWDITSCSKTWSAKSPRTNSLGIFTRPWFTAGTFLCKDDHRKIVACTNSHQVRLYDTALQRRPAISVEFKESPIKAVAADPNGHDVYIGTGTGDLASFDMRTGLDSYLRIWDTNTRQLLSAVFLKQHLTTVVLDSHFSVEEPGEMKSKQLESSVETETEVRKEKKKKSKAITEDETEAQIRKEKKSRTIEEEEQAGLVDHSDINDEVYARKEKKKKKSRGIEGGKERDSDGEICSPKRRKSGERSKCLKKRSKKQLVA

SEQ ID NO: 190752 - protein, 113 aa, Zea Mays
MAGKEILHKVKDAFSSSGPETGKGKTKLSGKRVKHGYHLVKGKSNHPMEDYLVAEYRQVGEHDLGLFAIFDGHLGHTVPDFLSSHLFNNILSEVMCHVLMGSWQLQGHLETGA

SEQ ID NO: 190753 - protein, 286 aa, Zea Mays
MAGKEILHKVKDAFSSSGPETGKGKTKLSGKRVKHGYHLVKGKSNHPMEDYLVAEYRQVGEHDLGLFAIFDGHLGHTVPDFLSSHLFNNILSEPEFLSDPETAIRNAYQLTDQKILENAAELGRGGSTAVTAILIGSDKFVKLVVANVGDSRAVISKNGVAKQLSVDHEPNMERQTIEQKGGFVSNLPGDVPRVDGQLAVARAFGDRSLKKHLSSDPYVVEQTIDENTEFLILASDGLWKVMSNQEAVDEIKDCKDAQAAAKHLTEQAVNRKSKDDISVIVVKFMC

SEQ ID NO: 190754 - protein, 281 aa, Zea Mays
MWFMTFVGTPFWMAPEVIQNSEGYNEKADIWSLGITAIEMAKGEPPLADIHPMRVLFIIPRENPPQLDEHFSKPMKEFVSLCLKKNPAERPSAKELLKHRFIKNARKTPKLLERIRERPKFAAKSMDATQNGQTHDEEEDFGTGTIKVNRTKDTAPSLSQGTVRKSAVRDFSDRSEGTGTVRVVSRPPQIASTKDGRSDMPQSPKAPIRTADRENQWRSSGTGSEESLSLRDTQSGRGRVESSTDDNDHSVSGSGTVVLRSPRASQLYSTASNHSAKILLL

SEQ ID NO: 190755 - protein, 578 aa, Zea Mays
MSIACILRDLLHAIEYLHSEGKIHRDIKAANILLTESGDVKVADFGVSAQLTKTMSRRKTFVGTPFWMAPEVIQNSEGYNEKADIWSLGITAIEMAKGEPPLADIHPMRVLFIIPRENPPQLDEHFSKPMKEFVSLCLKKNPAERPSAKELLKHRFIKNARKTPKLLERIRERPKFAAKSMDATQNGQTHDEEEDFGTGTIKVNRTKDTAPSLSQGTVRKSAVRDFSDRSEGTGTVRVVSRPPQIASTKDGRSDMPQSPKAPIRTADRENQWRSSGTGSEESLSLRDTQSGRGRVESSTDDNDHSVSGSGTVVLRSPRASQLYSTASNHSAKPPSRFSSYEDMSNSGTVVRTQNEDPETPRSSRSRLGIQEKTSNAPLEDSAINLAEAKAALQAGLRKGNARERPFINRHEKGSHEHRSSGVNSQEVQSEDVDTQKGHKLRQLPDGQSASRASSVASPAVSSLLLPSLKEATGDKFDRPAVHAFLDSLMDLERDIPGSCEVLVGRLLHRLGSSKDSSLQGLQETAMSIFTKEPEPPSEKAGDKKLANMPPLAAPTVSPLARFLLTRWQNQVSQDLNSV

SEQ ID NO: 190756 - protein, 669 aa, Zea Mays
MSDSASMAAAIEARFSSRDLIGCGSFGDVYKGEDDIEDIQKEISVLSQCRCPYITDYYGSYLHQTKLWIVMEYMAGGSVADLLQAGPPLDEMSIACILRDLLHAIEYLHSEGKIHRDIKAANILLTESGDVKVADFGVSAQLTKTMSRRKTFVGTPFWMAPEVIQNSEGYNEKADIWSLGITAIEMAKGEPPLADIHPMRVLFIIPRENPPQLDEHFSKPMKEFVSLCLKKNPAERPSAKELLKHRFIKNARKTPKLLERIRERPKFAAKSMDATQNGQTHDEEEDFGTGTIKVNRTKDTAPSLSQGTVRKSAVRDFSDRSEGTGTVRVVSRPPQIASTKDGRSDMPQSPKAPIRTADRENQWRSSGTGSEESLSLRDTQSGRGRVESSTDDNDHSVSGSGTVVLRSPRASQLYSTASNHSAKPPSRFSSYEDMSNSGTVVRTQNEDPETPRSSRSRLGIQEKTSNAPLEDSAINLAEAKAALQAGLRKGNARERPFINRHEKGSHEHRSSGVNSQEVQSEDVDTQKGHKLRQLPDGQSASRASSVASPAVSSLLLPSLKEATGDKFDRPAVHAFLDSLMDLERDIPGSCEVLVGRLLHRLGSSKDSSLQGLQETAMSIFTKEPEPPSEKAGDKKLANMPPLAAPTVSPLARFLLTRWQNQVSQDLNSV

SEQ ID NO: 190757 - protein, 547 aa, Zea Mays
MKAESGGVVRRSLQKTESAEMRWVVPGGANEDVEIESSDDGSVDTSATASGSRGGGCSDEDEGYENDEMLRQLLVRTGPRADSFDVEALDVPGVYRHQEFTLGSSIVLTLQTLGVVFGDVGTSPLYTFDVMFNKYSITAKEDVLGALSLVIYTLILIPFLKYTLIVLWGNDGGEGGTFALYSLICRNAKASLLPNQLPSDTRIANFNLKVPSVELERSLKIKERLETSSMLKKLLLMLVLFGTSMVIADGVVTSAMSVMSAVNGLKVGIASVNEGEVVMITVAFLIVLFSLQRFGTSKVGLAVGPALFVWFCCLAGIGMYNLRVYGPEVLQAFNPVYIYYYFERNPTEAWMSLGGCLLCATGSEAMFADLCYFSVKSVQLTFVFLVLPCLLLGYLGQAAFLMENLDKSQQVFFLSIPSQAFWPVVFIATLAALIASRAMTTAIFSTIKQATALGCFPRLKIIHTSRKFMGQIYIPVMNWFLLVSCLAFVAVFGSINEIGNAYGIAELGVMMMTTVLVTIIMLLIWQFWEVQQMEVGCFWYLQLYCIW

SEQ ID NO: 190758 - protein, 811 aa, Zea Mays
MKAESGGVVRRSLQKTESAEMRWVVPGGANEDVEIESSDDGSVDTSATASGSRGGGCSDEDEGYENDEMLRQLLVRTGPRADSFDVEALDVPGVYRHQEFTLGSSIVLTLQTLGVVFGDVGTSPLYTFDVMFNKYSITAKEDVLGALSLVIYTLILIPFLKYTLIVLWGNDGGEGGTFALYSLICRNAKASLLPNQLPSDTRIANFNLKVPSVELERSLKIKERLETSSMLKKLLLMLVLFGTSMVIADGVVTSAMSGSCLSDALFIVYLLFTYLGDLHIFFPSNKILQKLRLSINNPILFLILKSAVMSAVNGLKVGIASVNEGEVVMITVAFLIVLFSLQRFGTSKVGLAVGPALFVWFCCLAGIGMYNLRVYGPEVLQAFNPVYIYYYFERNPTEAWMSLGGCLLCATGSEAMFADLCYFSVKSVQLTFVFLVLPCLLLGYLGQAAFLMENLDKSQQVFFLSIPSQAFWPVVFIATLAALIASRAMTTAIFSTIKQATALGCFPRLKIIHTSRKFMGQIYIPVMNWFLLVSCLAFVAVFGSINEIGNAYGIAELGVMMMTTVLVTIIMLLIWQLGCNLGTVRAPGIGLLYNELVRGVPAIFGHFLTTLPAMHSMIIFVCIKWVPVPVVPQNERFLFRRVCPKNYHMFRCIARYGYKDVRKENHQAFEQLLIESLEKFIRREAQERSLERSLESDHNDDKDSEEEIASSSSRVIDESGGADNSALGSSMSLEEGSSMDNELSFIHKAKESGVVYLLGHGDIRARKESFFVKKLVINYFYAFLRRNCRRGIATLSIPHTRLMQVGMQYMV

SEQ ID NO: 190759 - protein, 515 aa, Zea Mays
MYNLRVYGPEVLQAFNPVYIYYYFERNPTEAWMSLGGCLLCATGSEAMFADLCYFSVKSVQLTFVFLVLPCLLLGYLGQAAFLMENLDKSQQVFFLSIPSQAFWPVVFIATLAALIASRAMTTAIFSTIKQATALGCFPRLKIIHTSRKFMGQIYIPVMNWFLLVSCLAFVAVFGSINEIGNAYGIAELGVMMMTTVLVTIIMLLIWQVNIVIVLCFLNLFLGLELFFFSSVLGSAADGSWVLLVFAAVLYLVMYIWNYGTKLKYETEVKQKLSMDLLIQLGCNLGTVRAPGIGLLYNELVRGVPAIFGHFLTTLPAMHSMIIFVCIKWVPVPVVPQNERFLFRRVCPKNYHMFRCIARYGYKDVRKENHQAFEQLLIESLEKFIRREAQERSLERSLESDHNDDKDSEEEIASSSSRVIDESGGADNSALGSSMSLEEGSSMDNELSFIHKAKESGVVYLLGHGDIRARKESFFVKKLVINYFYAFLRRNCRRGIATLSIPHTRLMQVGMQYMV

SEQ ID NO: 190760 - protein, 432 aa, Zea Mays
MENLDKSQQVFFLSIPSQAFWPVVFIATLAALIASRAMTTAIFSTIKQATALGCFPRLKIIHTSRKFMGQIYIPVMNWFLLVSCLAFVAVFGSINEIGNAYGIAELGVMMMTTVLVTIIMLLIWQVNIVIVLCFLNLFLGLELFFFSSVLGSAADGSWVLLVFAAVLYLVMYIWNYGTKLKYETEVKQKLSMDLLIQLGCNLGTVRAPGIGLLYNELVRGVPAIFGHFLTTLPAMHSMIIFVCIKWVPVPVVPQNERFLFRRVCPKNYHMFRCIARYGYKDVRKENHQAFEQLLIESLEKFIRREAQERSLERSLESDHNDDKDSEEEIASSSSRVIDESGGADNSALGSSMSLEEGSSMDNELSFIHKAKESGVVYLLGHGDIRARKESFFVKKLVINYFYAFLRRNCRRGIATLSIPHTRLMQVGMQYMV

SEQ ID NO: 190761 - protein, 575 aa, Zea Mays
MSAVNGLKVGIASVNEGEVVMITVAFLIVLFSLQRFGTSKVGLAVGPALFVWFCCLAGIGMYNLRVYGPEVLQAFNPVYIYYYFERNPTEAWMSLGGCLLCATGSEAMFADLCYFSVKSVQLTFVFLVLPCLLLGYLGQAAFLMENLDKSQQVFFLSIPSQAFWPVVFIATLAALIASRAMTTAIFSTIKQATALGCFPRLKIIHTSRKFMGQIYIPVMNWFLLVSCLAFVAVFGSINEIGNAYGIAELGVMMMTTVLVTIIMLLIWQVNIVIVLCFLNLFLGLELFFFSSVLGSAADGSWVLLVFAAVLYLVMYIWNYGTKLKYETEVKQKLSMDLLIQLGCNLGTVRAPGIGLLYNELVRGVPAIFGHFLTTLPAMHSMIIFVCIKWVPVPVVPQNERFLFRRVCPKNYHMFRCIARYGYKDVRKENHQAFEQLLIESLEKFIRREAQERSLERSLESDHNDDKDSEEEIASSSSRVIDESGGADNSALGSSMSLEEGSSMDNELSFIHKAKESGVVYLLGHGDIRARKESFFVKKLVINYFYAFLRRNCRRGIATLSIPHTRLMQVGMQYMV

SEQ ID NO: 190762 - protein, 583 aa, Zea Mays
MVLSHQQFMSAVNGLKVGIASVNEGEVVMITVAFLIVLFSLQRFGTSKVGLAVGPALFVWFCCLAGIGMYNLRVYGPEVLQAFNPVYIYYYFERNPTEAWMSLGGCLLCATGSEAMFADLCYFSVKSVQLTFVFLVLPCLLLGYLGQAAFLMENLDKSQQVFFLSIPSQAFWPVVFIATLAALIASRAMTTAIFSTIKQATALGCFPRLKIIHTSRKFMGQIYIPVMNWFLLVSCLAFVAVFGSINEIGNAYGIAELGVMMMTTVLVTIIMLLIWQVNIVIVLCFLNLFLGLELFFFSSVLGSAADGSWVLLVFAAVLYLVMYIWNYGTKLKYETEVKQKLSMDLLIQLGCNLGTVRAPGIGLLYNELVRGVPAIFGHFLTTLPAMHSMIIFVCIKWVPVPVVPQNERFLFRRVCPKNYHMFRCIARYGYKDVRKENHQAFEQLLIESLEKFIRREAQERSLERSLESDHNDDKDSEEEIASSSSRVIDESGGADNSALGSSMSLEEGSSMDNELSFIHKAKESGVVYLLGHGDIRARKESFFVKKLVINYFYAFLRRNCRRGIATLSIPHTRLMQVGMQYMV

SEQ ID NO: 190763 - protein, 323 aa, Zea Mays
MQKCKELERSLKIKERLETSSMLKKLLLMLVLFGTSMVIADGVVTSAMSVMSAVNGLKVGIASVNEGEVVMITVAFLIVLFSLQRFGTSKVGLAVGPALFVWFCCLAGIGMYNLRVYGPEVLQAFNPVYIYYYFERNPTEAWMSLGGCLLCATGSEAMFADLCYFSVKSVQLTFVFLVLPCLLLGYLGQAAFLMENLDKSQQVFFLSIPSQAFWPVVFIATLAALIASRAMTTAIFSTIKQATALGCFPRLKIIHTSRKFMGQIYIPVMNWFLLVSCLAFVAVFGSINEIGNAYGIAELGVMMMTTVLVTIIMLLIWQLYCIW

SEQ ID NO: 190764 - protein, 830 aa, Zea Mays
MKAESGGVVRRSLQKTESAEMRWVVPGGANEDVEIESSDDGSVDTSATASGSRGGGCSDEDEGYENDEMLRQLLVRTGPRADSFDVEALDVPGVYRHQEFTLGSSIVLTLQTLGVVFGDVGTSPLYTFDVMFNKYSITAKEDVLGALSLVIYTLILIPFLKYTLIVLWGNDGGEGGTFALYSLICRNAKASLLPNQLPSDTRIANFNLKVPSVELERSLKIKERLETSSMLKKLLLMLVLFGTSMVIADGVVTSAMSVMSAVNGLKVGIASVNEGEVVMITVAFLIVLFSLQRFGTSKVGLAVGPALFVWFCCLAGIGMYNLRVYGPEVLQAFNPVYIYYYFERNPTEAWMSLGGCLLCATGSEAMFADLCYFSVKSVQLTFVFLVLPCLLLGYLGQAAFLMENLDKSQQVFFLSIPSQAFWPVVFIATLAALIASRAMTTAIFSTIKQATALGCFPRLKIIHTSRKFMGQIYIPVMNWFLLVSCLAFVAVFGSINEIGNAYELGVMMMTTVLVTIIMLLIWQVNIVIVLCFLNLFLGLELFFFSSVLGSAADGSWVLLVFAAVLYLVMYIWNYGTKLKYETEVKQKLSMDLLIQLGCNLGTVRAPGIGLLYNELVRGVPAIFGHFLTTLPAMHSMIIFVCIKWVPVPVVPQNERFLFRRVCPKNYHMFRCIARYGYKDVRKENHQAFEQLLIESLEKFIRREAQERSLERSLESDHNDDKDSEEEIASSSSRVIDESGGADNSALGSSMSLEEGSSMDNELSFIHKAKESGVVYLLGHGDIRARKESFFVKKLVINYFYAFLRRNCRRGIATLSIPHTRLMQVGMQYMV

SEQ ID NO: 190765 - protein, 133 aa, Zea Mays
MERYKEHKDLHVVCIDLEKDYDKIPRNLMWWALDKHKVPTKYVTLIKNMYDKAVTSVRTTDSDTNVFPINIGLHQGSTLRSYLFALAIDEVMRYIQGDIPWCMLFVDVVVLIDVSQEGINRKLELWRHTLESK

SEQ ID NO: 190766 - protein, 65 aa, Zea Mays
MSVRGDGDWRIFIVAGTEWSLNKGLGMSKLSEIALVLSVVLNCAISGPSYPLMLPAPPLAISTAI

SEQ ID NO: 190767 - protein, 473 aa, Zea Mays
MASATTSISSHPAALRDVKAARIGGLRQQQASVAPSAAAARGQRARAVRSLRAAEPARQPVAASAAAAAPAAPVADEAAALAAVDYEALARELEGASPLEIMDRALAMFGSEIAIAFSGAEDVALIEYAKLTGRPFRVFSLDTGRLNPETYQLFDKVEKHYGIRIEYMFPDASEVQELVRTKGLFSFYEDGHQECCRVRKVRPLRRALKGLRAWITGQRKDQSPGTRASIPLVQVDPSFEGLDGGAGSLVKWNPVANVDGKDIWTFLRTMDVPVNTLHAQGYVSIGCEPCTRPVLPGQHEREGRWWWEDAKAKECGLHKGNIDKDAQAAAPRSANGNGSAGAPDIFESPAVVSLTRTGIENLLRLENRAEPWLVVLYAPWCPFCQAMEASYVELAEKLAGSGVKVAKFRADGEQKPFAQAELQLQSFPTVLLFPGRTARPIKYPSEKRDVDSLLAFVNSLRFVEKGGGGDWVW

SEQ ID NO: 190768 - protein, 324 aa, Zea Mays
MTLATTPPPSIVVQAPPRSPFGDITHKTDPPPTARHRHHPPPRRLAVPVPALPCGLVRLHALKETFSVDVSAAGTPAPCPARHAFTIASSCLAALSNVTDVAGVLLGHDFALVRDPQLLSSCFGKPETKDARVNAMRSAISETFLESNRRLLQRILKMMHTVASHTSENRMTASAVGACMASLLLRPLLAGECEMDEVFDMDGDDSAQLLAAANAANSAQGIVVTLLEEYEGIFHDEHLRCSLSPESQIEDSGTEASTDDGNLEAKGNGFHDAENDVDQELDDDNGVERILSGKLSESSGYAGSDLYDYKSREPDYCIGEQVLR

SEQ ID NO: 190769 - protein, 311 aa, Zea Mays
MTLATTPPPSIVVQAPPRSPFGDITHKTDPPPTARHRHHPPPRRLAVPVPALPCGLVRLHALKETFSVDVSAAGTPAPCPARHAFTIASSCLAALSNVTDVAGVLLGHDFALVRDPQLLSSCFGKPETKDARVNAMRSAISETFLESNRRLLQRILKMMHTVASHTSENRMTASAVGACMASLLLRPLLAGECEMDEVFDMDGDDSAQLLAAANAANSAQGIVVTLLEEYEGIFHDEHLRCSLSPESQIEDSGTEASTDDGNLEAKGNGFHDAENDVDQELDDDNGVERILSGKLSESSGYAGSDLYDYKL

SEQ ID NO: 190770 - protein, 808 aa, Zea Mays
MTYPGLTKLSLGCRLFNYIFYVDFEASMTDVRAQNALKGLEIVSLVLKSHVFSSSVGFQRKAGISCLRDGFPTGTDPQRLRPAAGLLAAPMEGLFLIDVSTEDDLLFNLVSPAPRRPDPLHAVGAEATSSGVSPSAVVRATDPDCVMEEREDPERTESPEQRKAKKGVNLRKSLAWDSEFFTSEGVLDTEELAIVNSTYRKAQGSRLPGIIEETRRSGESTTSTLESETWAMESLETELFDNVRASIQRSLGKPDKLSGRPVAASNPPKATANAPRVAARKGVDRMPQSKMRAPVSTSQGAVSRQRPQVTINEPVAARDNLTGAAEAKISSKPPRALPRVAMMRSSTNTTVTSRASDKRNSTGGAVNRQAVGKTASTSAVLRSGRGTNSSSILKSGFFTSAATSSHCMLMDTKPEAKTKSATLSIKNRPAQRVPVRPSSKSDISKTIPSRSSGNRIPAKGHADRASPSISPSSSMDSMSSVISGASTASTVGKMSHTSDNLNALSPSLRKSNDCHPNPKFRPPIVTEGHSSGTAASRDNLKATAEITNQGKGLKPSGLRRPTPKIGYFDAENYIDQNIGAQVQPQLSNIQCLPTQNMNLNAAPSTYGQQESKLTAAPHEESCVSKSKLMTPLSLMVEVEPFKVAELACTNLTDPVVVRPESVQPQSMEIQCLLPATPNPQPTFHQQVLKPIAAPLEAVQMEVEAFKVDKPEACIHLSSPVVVKPENKSIDQNAGALLQLQLVAEPESCTRKSKTVVAADYSKENIPALNQNIQANGDANSLVELLTQKLSSISLGEAAPNVAPRSCWE

SEQ ID NO: 190771 - protein, 811 aa, Zea Mays
MTYPGLTKLSLGCRLFNYIFYVDFEASMTDVRAQNALKGLEIVSLVLKSHVFSSSVGFQRKAGISCLRDGFPTGTDPQRLRPAAGLLAAPMEGLFLIDVSTEDDLLFNLVSPAPRRPDPLHAESLVGAEATSSGVSPSAVVRATDPDCVMEEREDPERTESPEQRKAKKGVNLRKSLAWDSEFFTSEGVLDTEELAIVNSTYRKAQGSRLPGIIEETRRSGESTTSTLESETWAMESLETELFDNVRASIQRSLGKPDKLSGRPVAASNPPKATANAPRVAARKGVDRMPQSKMRAPVSTSQGAVSRQRPQVTINEPVAARDNLTGAAEAKISSKPPRALPRVAMMRSSTNTTVTSRASDKRNSTGGAVNRQAVGKTASTSAVLRSGRGTNSSSILKSGFFTSAATSSHCMLMDTKPEAKTKSATLSIKNRPAQRVPVRPSSKSDISKTIPSRSSGNRIPAKGHADRASPSISPSSSMDSMSSVISGASTASTVGKMSHTSDNLNALSPSLRKSNDCHPNPKFRPPIVTEGHSSGTAASRDNLKATAEITNQGKGLKPSGLRRPTPKIGYFDAENYIDQNIGAQVQPQLSNIQCLPTQNMNLNAAPSTYGQQESKLTAAPHEESCVSKSKLMTPLSLMVEVEPFKVAELACTNLTDPVVVRPESVQPQSMEIQCLLPATPNPQPTFHQQVLKPIAAPLEAVQMEVEAFKVDKPEACIHLSSPVVVKPENKSIDQNAGALLQLQLVAEPESCTRKSKTVVAADYSKENIPALNQNIQANGDANSLVELLTQKLSSISLGEAAPNVAPRSCWE

SEQ ID NO: 190772 - protein, 85 aa, Zea Mays
MLSYEMMNGQVWTNSAFGFRTKWVGSKPTHFCGLGRTRSLLVPLGMGILVTTIKLGLDKEDNLQSLPSRWSWSTRPFEETTEYMV

SEQ ID NO: 190773 - protein, 886 aa, Zea Mays
MPGAATLRSRVAVAAAACLAVFAAVALLHRKRRWNRAPSSSRRLGVGGRPRRACEEEEKPQDRFKRVLADNSYSPFKHPRRKSAQLGSAEGEAPLPPPQELSQKGHPFEEEITSLLKNPPGFHSFMLCDQCPEMSATYNWVHTETQLEHLARLLGEERAFAVDTEQHSIRSFLGYTALMQISTQNEDYLIDTIALHDVMGILRPVFANSSICKIFHGADNDILWLQRDFHIYVVNMFDTAKACEILLKPQKSLAYLLEVYCEVTTDKTMQREDWRLRPLTPEMIEYARTDAHYLLYIANCLASELHAKAYTSSDKINFFFEASHRSNMVCMQLYSKEIESPPGASSATSILSRNLQTHGFDSKKSSEVKDLVWKFCAWRDLMARMHDESLRYVLPDQAIAALAVSLPKGPTEVFAVIAETDLSISSMYPSLSSPSPLVVAHVKELCYLLDDITTSMDSIFKSLLEKYKDPSGLCRLSVYNYNLITHLSLKQTSMFSVAPSGKKLTALPNKKVSRDLFIKKFSCKSPVYHNCRIYASDGRLLCYCDRKKLEWYIQRNLAKLIENSPPAIMLLFEPKGRPEDEDNEFYIQSKKNICVGCGEKSHYIRYRIIPSCYRMHFPEHLKSHRSHDIVLLCVDCHEIAHSAAEKYKRRIAEEFGIPLFVQKIMNSGDISLITNTSVSEDKLNGTGVSPLQLRTAAMALLRHGSTMPLKRCEELMQIVKSYYGGRDVTPEDLEMALLVGMSPHERRRLEKKKGYSFRAQAQTIIRKSSSNTISEDSGHGSENCHALSARFPEVGTGSNGQQEFDETGNQNQLENLTLSQGSSSLPVSMEDTTSDHDTVTLETDTEQQARAVCICCNTPQFNVWWCQEHLKDIKVQIHVDVIGKPY

SEQ ID NO: 190774 - protein, 307 aa, Zea Mays
MILPISPSLPLHHSARLEYPTVHTSPPKPNPSKPISLAPIPSRPLSLPLPPDPARRGPAAMSCSHLGERGLCGSFNNNVLKKAETRIDELKQLGLQYTVVSVGKKGNAYFQRRPYIPLERDLEVSSVPTVKDSQAICDLVYSLFVSEEVDKVELLYSKFVSLVRSDPIIQTLLPMSPKGEICDVNGVCVDATEDELFRLTTKEGKLTVEREKVKIETQPFSPVVQFEQDPVQILDALLPLYLNSQILRALQESLASELAARMSAMSSATDNAIELRKNLSIAYNRQRQAKITGEILEIVAGADALAG

SEQ ID NO: 190775 - protein, 725 aa, Zea Mays
MFDTAKACEILLKPQKSLAYLLEVYCEVTTDKTMQREDWRLRPLTPEMIEYARTDAHYLLYIANCLASELHAKAYTSSDKINFFFEASHRSNMVCMQLYSKEIESPPGASSATSILSRNLQTHGFDSKKSSEVKDLVWKFCAWRDLMARMHDESLRYVLPDQAIAALAVSLPKGPTEVFAVIAETDLSISSMYPSLSSPSPLVVAHVKELCYLLDDITTSMDSIFKSLLEKYKDPSGLCRLSVYNYNLITHLSLKQTSMFSVAPSGKKLTALPNKKVSRDLFIKKFSCKSPVYHNCRIYASDGRLLCYCDRKKLEWYIQRNLAKLIENSPPAIMLLFEPKGRPEDEDNEFYIQSKKNICVGCGEKSHYIRYRIIPSCYRMHFPEHLKSHRSHDIVLLCVDCHEIAHSAAEKYKRRIAEEFGIPLFVQKIMNSGDISLITNTSVSEDKLNGTGVSPLQLRTAAMALLRHGSTMPLKRCEELMQIVKSYYGGRDVTPEDLEMALLVGMSPHERRRLEKKKGYSFRAQAQTIIRKSSSNTISEDSGHGSENCHALSARFPEVGTGSNGQQEFDETGNQNQLENLTLSQGSSSLPVSMEDTTSDHDTVTLETDTEQQARGACTPGNSHDDKEQSICDNSSQVISKNAEKISLLGHGHHGKQVVELLFSNGGEEFVNQFCQRWRQIFVEAVHPRYLPSGWNINHSGRRDFGDFSVYKPPRKDPQSATARD

SEQ ID NO: 190776 - protein, 808 aa, Zea Mays
MLCDQCPEMSATYNWVHTETQLEHLARLLGEERAFAVDTEQHSIRSFLGYTALMQISTQNEDYLIDTIALHDVMGILRPVFANSSICKACEILLKPQKSLAYLLEVYCEVTTDKTMQREDWRLRPLTPEMIEYARTDAHYLLYIANCLASELHAKACDTSSDKINFFFEASHRSNMVCMQLYSKEIESPPGASSATSILSRNLQTHGFDSKKSSEVKDLVWKFCAWRDLMARMHDESLRYVLPDQAIAALAVSLPKGPTEVFAVIAETDLSISSMYPSLSSPSPLVVAHVKELCYLLDDITTSMDSIFKSLLEKYKDPSGLCRLSVYNYNLITHLSLKQTSMFSVAPSGKKLTALPNKKVSRDLFIKKFSCKSPVYHNCRIYASDGRLLCYCDRKKLEWYIQRNLAKLIENSPPAIMLLFEPKGRPEDEDNEFYIQSKKNICVGCGEKSHYIRYRIIPSCYRMHFPEHLKSHRSHDIVLLCVDCHEIAHSAAEKYKRRIAEEFGIPLFVQKIMNSGDISLITNTSVSEDKLNGTGVSPLQLRTAAMALLRHGSTMPLKRCEELMQIVKSYYGGRDVTPEDLEMALLVGMSPHERRRLEKKKGYSFRAQAQTIIRKSSSNTISEDSGHGSENCHALSARFPEVGTGSNGQQEFDETGNQNQLENLTLSQGSSSLPVSMEDTTSDHDTVTLETDTEQQARGACTPGNSHDDKEQSICDNSSQVISKNAEKISLLGHGHHGKQVVELLFSNGGEEFVNQFCQRWRQIFVEAVHPRYLPSGWNINHSGRRDFGDFSVYKPPRKDPQSATARD

SEQ ID NO: 190777 - protein, 576 aa, Zea Mays
MHDESLRYVLPDQAIAALAVSLPKGPTEVFAVIAETDLSISSMYPSLSSPSPLVVAHVKELCYLLDDITTSMDSIFKSLLEKYKDPSGLCRLSVYNYNLITHLSLKQTSMFSVAPSGKKLTALPNKKVSRDLFIKKFSCKSPVYHNCRIYASDGRLLCYCDRKKLEWYIQRNLAKLIENSPPAIMLLFEPKGRPEDEDNEFYIQSKKNICVGCGEKSHYIRYRIIPSCYRMHFPEHLKSHRSHDIVLLCVDCHEIAHSAAEKYKRRIAEEFGIPLFVQKIMNSGDISLITNTSVSEDKLNGTGVSPLQLRTAAMALLRHGSTMPLKRCEELMQIVKSYYGGRDVTPEDLEMALLVGMSPHERRRLEKKKGYSFRAQAQTIIRKSSSNTISEDSGHGSENCHALSARFPEVGTGSNGQQEFDETGNQNQLENLTLSQGSSSLPVSMEDTTSDHDTVTLETDTEQQARGACTPGNSHDDKEQSICDNSSQVISKNAEKISLLGHGHHGKQVVELLFSNGGEEFVNQFCQRWRQIFVEAVHPRYLPSGWNINHSGRRDFGDFSVYKPPRKDPQSATARD

SEQ ID NO: 190778 - protein, 763 aa, Zea Mays
MGILRPVFANSSICKIFHGADNDILWLQRDFHIYVVNMFDTAKACEILLKPQKSLAYLLEVYCEVTTDKTMQREDWRLRPLTPEMIEYARTDAHYLLYIANCLASELHAKACDTSSDKINFFFEASHRSNMVCMQLYSKEIESPPGASSATSILSRNLQTHGFDSKKSSEVKDLVWKFCAWRDLMARMHDESLRYVLPDQAIAALAVSLPKGPTEVFAVIAETDLSISSMYPSLSSPSPLVVAHVKELCYLLDDITTSMDSIFKSLLEKYKDPSGLCRLSVYNYNLITHLSLKQTSMFSVAPSGKKLTALPNKKVSRDLFIKKFSCKSPVYHNCRIYASDGRLLCYCDRKKLEWYIQRNLAKLIENSPPAIMLLFEPKGRPEDEDNEFYIQSKKNICVGCGEKSHYIRYRIIPSCYRMHFPEHLKSHRSHDIVLLCVDCHEIAHSAAEKYKRRIAEEFGIPLFVQKIMNSGDISLITNTSVSEDKLNGTGVSPLQLRTAAMALLRHGSTMPLKRCEELMQIVKSYYGGRDVTPEDLEMALLVGMSPHERRRLEKKKGYSFRAQAQTIIRKSSSNTISEDSGHGSENCHALSARFPEVGTGSNGQQEFDETGNQNQLENLTLSQGSSSLPVSMEDTTSDHDTVTLETDTEQQARGACTPGNSHDDKEQSICDNSSQVISKNAEKISLLGHGHHGKQVVELLFSNGGEEFVNQFCQRWRQIFVEAVHPRYLPSGWNINHSGRRDFGDFSVYKPPRKDPQSATARD

SEQ ID NO: 190779 - protein, 704 aa, Zea Mays
MIFKASPSPRMGHTVTAVDNTTYIIGGRGGPSEILDDVWILPSVGNTWSKLECCGDLFRPRHRHAAAAVASKIYVFGGLSNEGIYSCMNVLDTKNMQWSVLAASGEWPCARHSHSMVSYGTNLFMFGGHDGQRALKDFYSFDTTKLRWNKENTNGGTPSPRFSHCMFIYKNYLGILGGCPITENNQEVTLLNINHRVWFCVSVPLLSQSLCVRSSSVVIKDDLVILGGGASCYAFGTKFSQPIVLDLHSVESMFKYDRNKDGTVQRRDAISVVELSRDEQNGILDHDTKLQDACSGSLTDSSPLVLQLGKTYAKLAKDIMKKFGWLDLSRKVRISHDNGHVLFPINESFCALNAEEHINRNLDDSCTFGESLVFSEKKLVGDNLSLQDALIFFSSCNGSVMKDELAISRKPSKSPQTIMKELVSSLLESKGMPSQLLQQLPARWETLGDIVILPKTCFKNPLWESVSEELWPLVAKSLGAQRLARQGKIMPNGTRDSTLELLLGDNGWVTHYENGICYSLDATKCMFSSGNRSEKLRMGQLNCRDEVVVDLFAGIGYFVLPFLVKANAKLVYACEWNPHALEALRRNVSDNRVEDRCIILEGDNRVTAPKSVADRVCLGLLPSSECSWATAVEALRVGGGVLHIHGNVNDSDETRWLDSVVESISNVAKNHGLSWNVSVEHVERVKWYGPRIRHLVVDVTCRQI

SEQ ID NO: 190780 - protein, 547 aa, Zea Mays
MIFKASPSPRMGHTVTAVDNTTYIIGGRGGPSEILDDVWILPSVGNTWSKLECCGDLFRPRHRHAAAAVASKIYVFGGLSNEGIYSCMNVLDTKNMQWSVLAASGEWPCARHSHSMVSYGTNLFMFGGHDGQRALKDFYSFDTTKLRWNKENTNGGTPSPRFSHCMFIYKNYLGILGGCPITENNQEVTLLNINHRVWFCVSVPLLSQSLCVRSSSVVIKDDLVILGGGASCYAFGTKFSQPIVLDLHSVESMFKYDRNKDGTVQRRDAISVVELSRDEQNGILDHDTKLQDACSGSLTDSSPLVLQLGKTYAKLAKDIMKKFGWLDLSRKVRISHDNGHVLFPINESFCALNAEEHINRNLDDSCTFGESLVFSEKKLVGDNLSLQDALIFFSSCNGSVMKDELAISRKPSKSPQTIMKELVSSLLESKGMPSQLLQQLPARWETLGDIVILPKTCFKNPLWESVSEELWPLVAKSLGAQRLARQGKIMPNGTRDSTLELLLGDNGWVTHYENGICYSLDATKCMFSSGNRSEKLRMGQLNCRDEG

SEQ ID NO: 190781 - protein, 498 aa, Zea Mays
MIFKASPSPRMGHTVTAVDNTTYIIGGRGGPSEILDDVWILPSVGNTWSKLECCGDLFRPRHRHAAAAVASKIYVFGGLSNEGIYSCMNVLDTKNMQWSVLAASGEWPCARHSHSMVSYGTNLFMFGGHDGQRALKDFYSFDTTKLRWNKENTNGGTPSPRFSHCMFIYKNYLGILGGCPITENNQEVTLLNINHRVWFCVSVPLLSQSLCVRSSSVVIKDDLVILGGGASCYAFGTKFSQPIVLDLHSVESMFKYDRNKDGTVQRRDAISVVELSRDEQNGILDHDTKLQDACSGSLTDSSPLVLQLGKTYAKLAKDIMKKFGWLDLSRKVRISHDNGHVLFPINESFCALNAEEHINRNLDDSCTFGESLVFSEKKLVGDNLSLQDALIFFSSCNGSVMKDELAISRKPSKSPQTIMKELVSSLLESKGMPSQLLQQLPARWETLGDIVILPKTCFKNPLWESVSEELWPLVAKSLGAQRLARQGWRGRVAYSWEC

SEQ ID NO: 190782 - protein, 132 aa, Zea Mays
MAKARRPPFAAAERFLGFPRGGPSPGAVAPAPAALDDLPDLAEADVWYSAADPGSPYPAASRHAAAEGRSAGQRGPRRGVQGGLSRAFGDGSGSGSGRQARASVVEGAGRTLKGRDMSRVRDAVWSRTGFDG

SEQ ID NO: 190783 - protein, 124 aa, Zea Mays
MAQIIFRKSAIGWFRIVRFLTVDFLNLNYGKIVRFKQWGLSVPYVLWWWRLLQLLFLCWLLLLIVTTTRVSVVVLHAWVLCTGSTIAITFITRLLVSIIAVPIILVVGIMLRSLMENRLELINC

SEQ ID NO: 190784 - protein, 1353 aa, Zea Mays
MSRREPDTSPFCDLSNLRTPRPNPKTVPPSPQFFTASKSALQAPTPTSLRRRRPGDGVPTPTPLGRRLHALEVDQSRSARRAESGRERALRTFSASASSWLSLLLRDPSACGCFPGFTGSAAAAQPWATGKRGALDGDRARGGRSPKRCRGGGDRGGERSKEMTPAMVAALRESLKDACSLEDVTERMEKHMSKGACEEVLFMMFQICKNIDEGRLKMKARCPLVTDLRLKEKATRVFMSYNPYWLRIGLHIVLGGDSLLQTGQGKRDKEVHFLKLILEKHMLSQIMTAKSCGNKKLVEEHHVQGYSDVLGNIILKRIFLLVVALDRTKIESTLPLEAGIDGLDGGSPLLFCHQSQIKSSRQIIQESLRETMHGEGDILVHLTTMGYKLNYQQPALSEYDFTMRNLFEDLQDGIILCRVVQLLLADASIISKVIVPSDTDKKRRSNCTTAIQYIKQARVPLSDSDGVTISAEDIAAGDKELILSLLWNMFIHMQLPLLASATSLARELTKLNVHVTEQQISENKPHMGLLYNWVQAICSKIGMTVESSSQLDRRALNCFINYYLNIDISPFKETPTGCRKELFTCHQLDTISDIAGWPSSEMGKDIPASGILADGVLFDERSTILLLAFLSSHLTNDERLDQLKNLINMRLYKSADTKIAARRISRGKIDIKYHPSQTDKNDGACTNQEWAATIIQTQARSLIAKNKYCERKKAIFILQGALRAWSAIISNRNRSCLSIAASIPWQAQGNNRYFIFIMERHRFVQMRKSAIMIQLAVRIWIRGRKKFKNSDSFKSCEFLEGKTPPKISSIAPSPQEHCSGGDKTIASPTACKHCEHVLTVRASAAAPILYFDGMDSLDSTTPLQFSGNQSNFITSTTQLCKSEHDCRSCVVEKSNSVSVSKLVSADDIQCSSSICFPVCKELVAAQTIQSAYRRFLNNRNRITGAIKIQSHWRCYSVRKCFMKEIQAIVGIQTSIRVFLCYQAFQRHRLAAVLIQRVVRGWLARKRLLGSSSLRTYTRLCVVDQSQKRKCYQSLELNIVLDSVIRLQRCWRKFLLRQSVKTYVISIQSFVRGWLARKQLNQTFRCINIIQRWWRKVLFLKLRKQAALVIQAHFRGWIARQVAFRTRKSITIIQSYVKAYLVRKASKQEVAHIRSRLQKSSSQVDDSMRLINRLVSALSQLHRCRSIHSIRQTCATLSTATEYSKKCCEKLVAAGAVDILLKQIYLLNRGIADQEVLKQVFLTLRNIARYSNLRQVLASTAESVEIIFQELLRNKADGFFIASDILKSLCESKEGRETVQALSHLIKRLRNLVHDLEKKVELDKRNGRTGAVKATNLRRLREAATLYHILTSGT

SEQ ID NO: 190785 - protein, 1404 aa, Zea Mays
MSRREPDTSPFCDLSNLRTPRPNPKTVPPSPQFFTASKSALQAPTPTSLRRRRPGDGVPTPTPLGRRLHALEVDQSRSARRAESGRERALRTFSASASSWLSLLLRDPSACGCFPGFTGSAAAAQPWATGKRGALDGDRARGGRSPKRCRGGGDRGGERSKEMTPAMVAALRESLKDACSLEDVTERMEKHMSKGACEEVLFMMFQICKNIDEGRLKMKARCPLVTDLRLKEKATRVFMSYNPYWLRIGLHIVLGGDSLLQTGQGKRDKEVHFLKLILEKHMLSQIMTAKSCGNKKLVEEHHVQGYSDVLGNIILKRIFLLVVALDRTKIESTLPLEAGIDGLDGGSPLLFCHQSQIKSSRQIIQESLRETMHGEGDILVHLTTMGYKLNYQQPALSEYDFTMRNLFEDLQDGIILCRVVQLLLADASIISKVIVPSDTDKKRRSNCTTAIQYIKQARVPLSDSDGVTISAEDIAAGDKELILSLLWNMFIHMQLPLLASATSLARELTKLNVHVTEQQISENKPHMGLLYNWVQAICSKIGMTVESSSQLDRRALNCFINYYLNIDISPFKETPTGCRKELFTCHQLDTISDIAGWPSSEMGKVLSDVLQAVDIPASGILADGVLFDERSTILLLAFLSSHLTNDERLDQLKNLINMRLYKSADTKIAARRISRGKIDIKYHPSQTDKNDGACTNQEWAATIIQTQARSLIAKNKYCERKKAIFILQGALRAWSAIISNRNRSCLSIAASIPWQAQGNNRYFIFIMERHRFVQMRKSAIMIQLAVRIWIRGRKKFKNSDSFKSCEFLEGKTPPKISSIAPSPQEHCSGGDKTIASPTACKHCEHVLTVRASAAAPILYFDGMDSLDSTTPLQFSGNQSNFITSTTQLCKSEHDCRSCVVEKSNSVSVSKLVSADDIQCSSSICFPVCKELVAAQTIQSAYRRFLNNRNRITGAIKIQSHWRCYSVRKCFMKEIQAIVGIQTSIRVFLCYQAFQRHRLAAVLIQRVVRGWLARKRLLGSSSLRTYTRLCVVDQSQKRKCYQSLELNIVLDSVIRLQRCWRKFLLRQSVKTYVISIQSFVRGWLARKQLNQTFRCINIIQRWWRKVLQTRKRAVIVIQTRFRGWVARQDAIRTRNSICNIQRWWRKVLFLKLRKQAALVIQAHFRGWIARQVAFRTRKSITIIQSYVKAYLVRKASKQEVAHIRSRLQKSSSQVDDSMRLINRLVSALSQLHRCRSIHSIRQTCATLSTATEYSKKCCEKLVAAGAVDILLKQIYLLNRGIADQEVLKQVFLTLRNIARYSNLRQVLASTAESVEIIFQELLRNKADGFFIASDILKSLCESKEGRETVQALSHLIKRLRNLVHDLEKKEWAHRSREGDQPAAASGGRHTLSYPHQWYLTRRQHS

SEQ ID NO: 190786 - protein, 706 aa, Zea Mays
MSRREPDTSPFCDLSNLRTPRPNPKTVPPSPQFFTASKSALQAPTPTSLRRRRPGDGVPTPTPLGRRLHALEVDQSRSARRAESGRERALRTFSASASSWLSLLLRDPSACGCFPGFTGSAAAAQPWATGKRGALDGDRARGGRSPKRCRGGGDRGGERSKEMTPAMVAALRESLKDACSLEDVTERMEKHMSKGACEEVLFMMFQICKNIDEGRLKMKARCPLVTDLRLKEKATRVFMSYNPYWLRIGLHIVLGGDSLLQTGQGKRDKEVHFLKLILEKHMLSQIMTAKSCGNKKLVEEHHVQGYSDVLGNIILKRIFLLVVALDRTKIESTLPLEAGIDGLDGGSPLLFCHQSQIKSSRQIIQESLRETMHGEGDILVHLTTMGYKLNYQQPALSEYDFTMRNLFEDLQDGIILCRVVQLLLADASIISKVIVPSDTDKKRRSNCTTAIQYIKQARVPLSDSDGVTISAEDIAAGDKELILSLLWNMFIHMQLPLLASATSLARELTKLNVHVTEQQISENKPHMGLLYNWVQAICSKIGMTVESSSQLDRRALNCFINYYLNIDISPFKETPTGCRKELFTCHQLDTISDIAGWPSSEMGKVLSDVLQAVDIPASGILADGVLFDERSTILLLAFLSSHLTNDERLDQLKNLINMRLYKSADTKIAARRISRGKIDIKYHPSQTDKNDGACTNQGLFFIYSLV

SEQ ID NO: 190787 - protein, 1232 aa, Zea Mays
MSRREPDTSPFCDLSNLRTPRPNPKTVPPSPQFFTASKSALQAPTPTSLRRRRPGDGVPTPTPLGRRLHALEVDQSRSARRAESGRERALRTFSASASSWLSLLLRDPSACGCFPGFTGSAAAAQPWATGKRGALDGDRARGGRSPKRCRGGGDRGGERSKEMTPAMVAALRESLKDACSLEDVTERMEKHMSKGACEEVLFMMFQICKNIDEGRLKMKARCPLVTDLRLKEKATRVFMSYNPYWLRIGLHIVLGGDSLLQTGQGKRDKEVHFLKLILEKHMLSQIMTAKSCGNKKLVEEHHVQGYSDVLGNIILKRIFLLVVALDRTKIESTLPLEAGIDGLDGGSPLLFCHQSQIKSSRQIIQESLRETMHGEGDILVHLTTMGYKLNYQQPALSEYDFTMRNLFEDLQDGIILCRVVQLLLADASIISKVIVPSDTDKKRRSNCTTAIQYIKQARVPLSDSDGVTISAEDIAAGDKELILSLLWNMFIHMQLPLLASATSLARELTKLNVHVTEQQISENKPHMGLLYNWVQAICSKIGMTVESSSQLDRRALNCFINYYLNIDISPFKETPTGCRKELFTCHQLDTISDIAGWPSSEMGKVLSDVLQAVDIPASGILADGVLFDERSTILLLAFLSSHLTNDERLDQLKNLINMRLYKSADTKIAARRISRGKIDIKYHPSQTDKNDGACTNQATPLQFSGNQSNFITSTTQLCKSEHDCRSCVVEKSNSVSVSKLVSADDIQCSSSICFPVCKELVAAQTIQSAYRRFLNNRNRITGAIKIQSHWRCYSVRKCFMKEIQAIVGIQTSIRVFLCYQAFQRHRLAAVLIQRVVRGWLARKRLLGSSSLRTYTRLCVVDQSQKRKCYQSLELNIVLDSVIRLQRCWRKFLLRQSVKTYVISIQSFVRGWLARKQLNQTFRCINIIQRWWRKVLQTRKRAVIVIQTRFRGWVARQDAIRTRNSICNIQRWWRKVLFLKLRKQAALVIQAHFRGWIARQVAFRTRKSITIIQSYVKAYLVRKASKQEVAHIRSRLQKSSSQVDDSMRLINRLVSALSQLHRCRSIHSIRQTCATLSTATEYSKKCCEKLVAAGAVDILLKQIYLLNRGIADQEVLKQVFLTLRNIARYSNLRQVLASTAESVEIIFQELLRNKADGFFIASDILKSLCESKEGRETVQALSHLIKRLRNLVHDLEKKVELDKRNGRTGAVKATNLRRLREAATLYHILTSGT

SEQ ID NO: 190788 - protein, 1395 aa, Zea Mays
MSRREPDTSPFCDLSNLRTPRPNPKTVPPSPQFFTASKSALQAPTPTSLRRRRPGDGVPTPTPLGRRLHALEVDQSRSARRAESGRERALRTFSASASSWLSLLLRDPSACGCFPGFTGSAAAAQPWATGKRGALDGDRARGGRSPKRCRGGGDRGGERSKEMTPAMVAALRESLKDACSLEDVTERMEKHMSKGACEEVLFMMFQICKNIDEGRLKMKARCPLVTDLRLKEKATRVFMSYNPYWLRIGLHIVLGGDSLLQTGQGKRDKEVHFLKLILEKHMLSQIMTAKSCGNKKLVEEHHVQGYSDVLGNIILKRIFLLVVALDRTKIESTLPLEAGIDGLDGGSPLLFCHQSQIKSSRQIIQESLRETMHGEGDILVHLTTMGYKLNYQQPALSEYDFTMRNLFEDLQDGIILCRVVQLLLADASIISKVIVPSDTDKKRRSNCTTAIQYIKQARVPLSDSDGVTISAEDIAAGDKELILSLLWNMFIHMQLPLLASATSLARELTKLNVHVTEQQISENKPHMGLLYNWVQAICSKIGMTVESSSQLDRRALNCFINYYLNIDISPFKETPTGCRKELFTCHQLDTISDIAGWPSSEMGKDIPASGILADGVLFDERSTILLLAFLSSHLTNDERLDQLKNLINMRLYKSADTKIAARRISRGKIDIKYHPSQTDKNDGACTNQEWAATIIQTQARSLIAKNKYCERKKAIFILQGALRAWSAIISNRNRSCLSIAASIPWQAQGNNRYFIFIMERHRFVQMRKSAIMIQLAVRIWIRGRKKFKNSDSFKSCEFLEGKTPPKISSIAPSPQEHCSGGDKTIASPTACKHCEHVLTVRASAAAPILYFDGMDSLDSTTPLQFSGNQSNFITSTTQLCKSEHDCRSCVVEKSNSVSVSKLVSADDIQCSSSICFPVCKELVAAQTIQSAYRRFLNNRNRITGAIKIQSHWRCYSVRKCFMKEIQAIVGIQTSIRVFLCYQAFQRHRLAAVLIQRVVRGWLARKRLLGSSSLRTYTRLCVVDQSQKRKCYQSLELNIVLDSVIRLQRCWRKFLLRQSVKTYVISIQSFVRGWLARKQLNQTFRCINIIQRWWRKVLQTRKRAVIVIQTRFRGWVARQDAIRTRNSICNIQRWWRKVLFLKLRKQAALVIQAHFRGWIARQVAFRTRKSITIIQSYVKAYLVRKASKQEVAHIRSRLQKSSSQVDDSMRLINRLVSALSQLHRCRSIHSIRQTCATLSTATEYSKKCCEKLVAAGAVDILLKQIYLLNRGIADQEVLKQVFLTLRNIARYSNLRQVLASTAESVEIIFQELLRNKADGFFIASDILKSLCESKEGRETVQALSHLIKRLRNLVHDLEKKEWAHRSREGDQPAAASGGRHTLSYPHQWYLTRRQHS

SEQ ID NO: 190789 - protein, 1115 aa, Zea Mays
MARGCSRASSDPTSRPRLPWMAPQPPRACQCSLITGGPSPCSASATAECRSMPKLRILRLFGNPLEFLPEILPLHNLRHLTLANIRIEAVESLKSVNVQIETENSSYFIAARHKLGAFFSLVFRFSSCHHPLLASALAKIMEDRSNHIAISKEENAVRQLISMISSDNRHVVEQACLAISSLASDISSAMQLIKCDIMKPIEAVLKSSDEEELVSVLQVVVTLTFVSDHVAQKMLTKDVLKSLKALCGHKNSEVQRLSLFAVGNLAFCLETRRTLMHSESLRDLLIRLTISQERRVSKAAARALAILGENENLRRAIRGRPVAKKGLRILSMDGGGMKGLATVQMLKQIEQGTGKRIHEMFDLICGTSTGGMLAMALGIKQMTLDQCEEIYTKLGKLVFAEPIPKDEAATWKEKLDQLFKSSSQSFRVVVHGSKHSADQFERLLKEMCADEDGDLLIESAVKGIPKVFAVSTLVSVMPAQPYIFRNYQYPPGTLEVSPGMAESPSISAIGTAVSGAPVGIKRGAFMGSCKHRVWEAIRASSAAPYYLDDFSVDANRWQDGAIVANNPTIFAIREAQLLWPDTRIDCLVSIGCGSVPTKSRRGGWRYLDTGQVLIESACSVERVEETLDTLIPMLPEMQYFRFNPVDERCGMELDETDPAIWLKLEAATDEYIQKNFLAFKNLCELLVPRYQEEEKSSDIYKSLSFSRLTSLNQGFSESNPTLGWRRVVLLVEASFSPDFGKKINHARSLESFCSQNGIRLALMNSASGFGKPATALPTPITSPLFTGSFPSSPLLYSPDGTQRIGRIDLVPPLSLDGHPTTKSSPPTSPLKSRQPSAHVRSLYDKLQNMPQVGVIHLALQNDSTGSVLSWQNDVFVVAEPGELADRFLQSVKTSLSTLLRGRNRKGAYSLSKISCLSELVAECPSFEIGGIHHRYIGRQTQVMEDNQEIGAYMFRRTVPAVHMAPEDVRWMVGAWRERIIVCSGKYGLAHGLVKAFMDCGAKAVISSSIEPPDSQTIVYHGMDVNGSLENGKFVIGDEEADESEPEPVSPVSDWEDSDVEKGGNHDMDDEEYLAQFMCLMYDKLFREGVTVDTALQQALRSHPKLKYSCHLPHVL

SEQ ID NO: 190790 - protein, 826 aa, Zea Mays
MSWGLGWKRSSEIFHLTLDYGDYDDNDDHQPSSPSPPASSSPSASASSTPVSSSSPTATRNGDVGFRIELEWSAGDDEDQVALRLQSQLMVALPPPHDAVSVDLIPRDDGEEEVVQIEMRVVRRREALRSVRVSRAPGSALGSGDGAGVLARLIRSNLAPAPAVDGPTAAAGVPVLADHWRPVAMLSLCNCGMSVLPVELTRLPLLEKLYLDNNKLSVLPPEVGALKNMEVLSVNNNMLVSVPVELRQCVMLEELSLEHNKLVRPLLDFRSMPKLRILRLFGNPLEFLPEILPLHNLRHLTLANIRIEAVESLKSVNVQIETENSSYFIAARHKLGAFFSLVFRFSSCHHPLLASALAKIMEDRSNHIAISKEENAVRQLISMISSDNRHVVEQACLAISSLASDISSAMQLIKCDIMKPIEAVLKSSDEEELVSVLQVVVTLTFVSDHVAQKMLTKDVLKSLKALCGHKNSEVQRLSLFAVGNLAFCLETRRTLMHSESLRDLLIRLTISQERRVSKAAARALAILGENENLRRAIRGRPVAKKGLRILSMDGGGMKGLATVQMLKQIEQGTGKRIHEMFDLICGTSTGGMLAMALGIKQMTLDQCEEIYTKLGKLVFAEPIPKDEAATWKEKLDQLFKSSSQSFRVVVHGSKHSADQFERLLKEMCADEDGDLLIESAVKGIPKVFAVSTLVSVMPAQPYIFRNYQYPPGTLEVSPGMAESPSISAIGTAVSGAPVGIKRGAFMGSCKHRVWEAIRASSAAPYYLDDFSVDANRWQDGAIVANNPTIFAIREAQLLWPDTRIDCLVSIGCGSVPTKWMNDVVWN

SEQ ID NO: 190791 - protein, 399 aa, Zea Mays
MLQTPIAMATALSKSAVKSHPRSPTTAQPPPNPGSNAACLAKAVEGAGPGPGAIGMFGKLGPRICKLLGGHGVQAKAALLGVMGSLAQVGAISSHNMPQTLQSIRDCLENSDWATRKAAADTLCVFATHSGHLIGDGIAPTISALEACRFDKVRPVRDSMIDAVQLWKKLTGEDATADGRNKDLGDGEGKLDSRRSMQSGGKSECFDDCSPDSPSNMKGSSIAEKAAVLLKKRPTLTDRELNPEFFQKLETRKTDDLAVEVVVPRKTLQSHLRSEDDTEEDDDPVGPVDSNGSAEDEANLTQMRASSNFQNIRDRWASQRGNSNKDAKSRTADVEDRGEPSTKDSTAATMNIPGEGPSVNNKTNWLAIQRQLSHLERQQTSLMNMLQFHFLFNAKGKRT

SEQ ID NO: 190792 - protein, 302 aa, Zea Mays
MPQTLQSIRDCLENSDWATRKAAADTLCVFATHSGHLIGDGIAPTISALEACRFDKVRPVRDSMIDAVQLWKKLTGEDATDGRNKDLGDGEGKLDSRRSMQSGGKSECFDDCSPDSPSNMKGSSIAEKAAVLLKKRPTLTDRELNPEFFQKLETRKTDDLAVEVVVPRKTLQSHLRSEDDTEEDDDPVGPVDSNGSAEDEANLTQMRASSNFQNIRDRWASQRGNSNKDAKSRTADVEDRGEPSTKDSTAATMNIPGEGPSVNNKTNWLAIQRQLSHLERQQTSLMNMLQFHFLFNAKGKRT

SEQ ID NO: 190793 - protein, 583 aa, Zea Mays
MLQTPIAMATALSKSAVKSHPRSPTTAQPPPNPGSNAASAGVGAAPPPPPPLSAAAGATPSKNAAMVELKSRVLAALAKLSDRDTHHIAVEELERIIRAPPLTDAVPMLLNALASDSPGFASPARRESLRLLATLCASHPDAAAPHLHKVLAHLARRLKDPASDTSVRDACRDVAGQLAAVYLRPLSASGVAEAGNATVMLFVKPLFEVMGEQSKAVQGGAAACLAKAVEGAGPGPGAIGMFGKLGPRICKLLGGHGVQAKAALLGVMGSLAQVGAISSHNMPQTLQSIRDCLENSDWATRKAAADTLCVFATHSGHLIGDGIAPTISALEACRFDKVRPVRDSMIDAVQLWKKLTGEDATDGRNKDLGDGEGKLDSRRSMQSGGKSECFDDCSPDSPSNMKGSSIAEKAAVLLKKRPTLTDRELNPEFFQKLETRKTDDLAVEVVVPRKTLQSHLRSEDDTEEDDDPVGPVDSNGSAEDEANLTQMRASSNFQNIRDRWASQRGNSNKDAKSRTADVEDRGEPSTKDSTAATMNIPGEGPSVNNKTNWLAIQRQLSHLERQQTSLMNMLQFHFLFNAKGKRT

SEQ ID NO: 190794 - protein, 81 aa, Zea Mays
MQRRGDGNEMGSAQTLDPRRWWRTRRAWARPHCGLETRDESRMEKSRTDRYRITDLVSFVPIDFEPDVKNENGTRTGYTKR

SEQ ID NO: 190795 - protein, 246 aa, Zea Mays
MLASAATVKPSTAAAAATCKAAFKPLHLPPLPAAAGLRPLSLSVSARPLYRQEHVLASVAVAAAGRNERATSPAPPSATADGARPLEVAAPAETGRRAKIGVYFATWWALNVIFNIYNKKVLNAFPYPWLTSTLSLAAGSAIMLASWATRIAEAPQTDLDFWKALTPVAIAHTIGHVAATVSMAKVAVSFTHIIKSGEPAFSVLVSRFFLGEHFPAPVYFSLLPIIGGCALAAVTELNFNMDSWGQ

SEQ ID NO: 190796 - protein, 110 aa, Zea Mays
MSDLDIQIPTAFDPFAEANAGDSGAAAGSKDYVHVRIQQRNGRKSLTTVQGLKKEFSYSKILKDLKKEFCCNGTVVQDPELGQVIQLQGDQRKNVSNFLVQKEHIKIHGF

SEQ ID NO: 190797 - protein, 273 aa, Zea Mays
MVRLIGSVPGYHVGSNIRKWGHMKLRNVLDEIMFNKQFCKSPLIYQFSSLGSLDEKWMSEFACSLSAGKSDDGSQLGIGKPLIVWPTVEDVRCSIEGYAAGSCIPSPQKNVERDFLKKYWSRWKADHVGRCRAMPHIKTFTRYSGQNIAWFLLTSANLSKAAWGALQKNNTQLMIRSYELGVLFLPQTLQSVPQFSCTEKSRSIRDGVALGKTIKTKLVTLCWKGDEEDPSIVRLPVPYQLPPQPYGTQDVPWSWDRRYTKKDVYGSVWPRYG

SEQ ID NO: 190798 - protein, 640 aa, Zea Mays
MASASRVRLGTLVPLTKDNAGSSNGSVSSIPIFQGPNVVGRDHLVVVDKRISRKHLSLHASTDGSIEVVVEGPNPIIVRSKGQRRKYVDMGDEHVPMHLSDLMKGKRYSEEHGAAVKRIRQIMEDEALAKTLQESFAADDAAVSGMPSGQKISSHDSAGSSERNNDRTHSVGPLKDMLPLTFRLMHVQGLPSWTNTSSVTIQDVIQGEVLLAVLSNYMVDIDWLLTACPSLRKVPHVLVLHGQDGASLELMKKLKPANWILHRPPLPISFGTHHSKAMLLVYPQGIRIVVHTANLIHVDWNYKSQGLWMQDFPWKDTVDMNKKTAFENDLVDYLSALKWPEFRVNLPGVGDVNINAAFFRKFDYSNSMVRLIGSVPGYHVGSNIRKWGHMKLRNVLDEIMFNKQFCKSPLIYQFSSLGSLDEKWMSEFACSLSAGKSDDGSQLGIGKPLIVWPTVEDVRCSIEGYAAGSCIPSPQKNVERDFLKKYWSRWKADHVGRCRAMPHIKTFTRYSGQNIAWFLLTSANLSKAAWGALQKNNTQLMIRSYELGVLFLPQTLQSVPQFSCTEKSRSIRDGVALGKTIKTKLVTLCWKGDEEDPSIVRLPVPYQLPPQPYGTQDVPWSWDRRYTKKDVYGSVWPRYG

SEQ ID NO: 190799 - protein, 366 aa, Zea Mays
MASASRVRLGTLVPLTKDNAGSSNGSVSSIPIFQGPNVVGRDHLVVVDKRISRKHLSLHASTDGSIEVVVEGPNPIIVRSKGQRRKVCAKETAKIAHGDVLELIPGDYFVKYVDMGDEHVPMHLSDLMKGKRYSEEHGAAVKRIRQIMEDEALAKTLQESFAADDAAVSGMPSGQKISSHDSAGSSERNNDRTHSVGPLKDMLPLTFRLMHVQGLPSWTNTSSVTIQDVIQGEVLLAVLSNYMVDIDWLLTACPSLRKVPHVLVLHGQDGASLELMKKLKPANWILHRPPLPISFGTHHSKAMLLVYPQGIRIVVHTANLIHVDWNYKSQGLWMQDFPWKDTVDMNKKTAFENDLVDYLSALKVVK

SEQ ID NO: 190800 - protein, 237 aa, Zea Mays
MPSGQKISSHDSAGSSERNNDRTHSVGPLKDMLPLTFRLMHVQGLPSWTNTSSVTIQDVIQGEVLLAVLSNYMVDIDWLLTACPSLRKVPHVLVLHGQDGASLELMKKLKPANWILHRPPLPISFGTHHSKAMLLVYPQGIRIVVHTANLIHVDWNYKSQGLWMQDFPWKDTVDMNKKTAFENDLVDYLSALKWPEFRVNLPGVGDVNINAAFFRKFDYSNSMVDWIGSWLSCGLQY

SEQ ID NO: 190801 - protein, 334 aa, Zea Mays
MPSGQKISSHDSAGSSERNNDRTHSVGPLKDMLPLTFRLMHVQGLPSWTNTSSVTIQDVIQGEVLLAVLSNYMVDIDWLLTACPSLRKVPHVLVLHGQDGASLELMKKLKPANWILHRPPLPISFGTHHSKAMLLVYPQGIRIVVHTANLIHVDWNYKSQGLWMQDFPWKDTVDMNKKTAFENDLVDYLSALKWPEFRVNLPGVGDVNINAAFFRKFDYSNSMVRLIGSVPGYHVGSNIRKWGHMKLRNVLDEIMFNKQFCKSPLIYQFSSLGSLDEKWMSEFACSLSAGKSDDGSQLGIGKPLIVWPTVEDVRCSIELVVAFQVLKRMLRETS

SEQ ID NO: 190802 - protein, 407 aa, Zea Mays
MASASRVRLGTLVPLTKDNAGSSNGSVSSIPIFQGPNVVGRDHLVVVDKRISRKHLSLHASTDGSIEVVVEGPNPIIVRSKGQRRKVCAKETAKIAHGDVLELIPGDYFVKYVDMGDEHVPMHLSDLMKGKRYSEEHGAAVKRIRQIMEDEALAKTLQESFAADDAAVSGMPSGQKISSHDSAGSSERNNDRTHSVGPLKDMLPLTFRLMHVQGLPSWTNTSSVTIQDVIQGEVLLAVLSNYMVDIDWLLTACPSLRKVPHVLVLHGQDGASLELMKKLKPANWILHRPPLPISFGTHHSKAMLLVYPQGIRIVVHTANLIHVDWNYKSQGLWMQDFPWKDTVDMNKKTAFENDLVDYLSALKWPEFRVNLPGVGDVNINAAFFRKFDYSNSMVDWIGSWLSCGLQY

SEQ ID NO: 190803 - protein, 120 aa, Zea Mays
MRSLSRKGDRKPADPDANANANGTAGGGGSERPAACSVHVAAGELGDAPRQRAAGRPHAAGRHARKQVPAVRQAAAPWLDPRRVVLLFPTLSSVGTLILLYFTLSMSRADTSSGGASDAR

SEQ ID NO: 190804 - protein, 184 aa, Zea Mays
MASSSVAADMELDRPNLEDYLPPDSLPQEAPRNLHLRDLLDISPVLTEAAGAIVDDSFTRCFKSNSPEPWNWNIYLFPLWCFGVVIRYGLLFPLRSLTLAIGWLAFFAAFFPVHFLLKGQDKLRNKIECFCCFMDWSDQVPWTTPKHTTSSGICCKPYINDRFHYSGANDSICCHHAEASWMGW

SEQ ID NO: 190805 - protein, 203 aa, Zea Mays
MIDFIILEQMTAFAVIMQKHPGWVGFIQKTILESVGCIWFNRNDLRDREVTARKLRDHVQHPDKNPLLIFPEGTCVNNQYTVMFKKGAFELGCAVCPIAIKYNKIFVDAFWNSKKQSFTMHLVRLMTSWAVVCDVWYLEPQYLREGETAIAFAERVRDMIAARAGLKKVPWDGYLKHNRPSPKHTEEKQRIFAESVLRRLEEK

SEQ ID NO: 190806 - protein, 220 aa, Zea Mays
MASSSVAADMELDRPNLEDYLPPDSLPQEAPRNLHLRDLLDISPVLTEAAGAIVDDSFTRCFKSNSPEPWNWNIYLFPLWCFGVVIRYGLLFPLRSLTLAIGWLAFFAAFFPVHFLLKGQDKLRNKIELVEMMCSVFVASWTGVIKYHGPRPSTRPHQVFVANHTSMIDFIILEQMTAFAVIMQKHPGWVGFIQKTILESVGCIWFNRNDLRDREVTARK

SEQ ID NO: 190807 - protein, 234 aa, Zea Mays
MASSSVAADMELDRPNLEDYLPPDSLPQEAPRNLHLRDLLDISPVLTEAAGAIVDDSFTRCFKSNSPEPWNWNIYLFPLWCFGVVIRYGLLFPLRSLTLAIGWLAFFAAFFPVHFLLKGQDKLRNKIERKLVEMMCSVFVASWTGVIKYHGPRPSTRPHQVFVANHTSMIDFIILEQMTAFAVIMQKHPGWDLFRRLSWKVWVASGLTVMISGIVKLRHGSCVIMFNIQTKTLS

SEQ ID NO: 190808 - protein, 286 aa, Zea Mays
MASSSVAADMELDRPNLEDYLPPDSLPQEAPRNLHLRDLLDISPVLTEAAGAIVDDSFTRCFKSNSPEPWNWNIYLFPLWCFGVVIRYGLLFPLRSLTLAIGWLAFFAAFFPVHFLLKGQDKLRNKIERKLVEMMCSVFVASWTGVIKYHGPRPSTRPHQVFVANHTSMIDFIILEQMTAFAVIMQKHPGWVGFIQKTILESVGCIWFNRNDLRDREVTARKLRDHVQHPDKNPLLIFPEGTCVNNQYTVMFKKVNPTFIYSVICVCVGGYSYICFSTSVFLVAKQ

SEQ ID NO: 190809 - protein, 199 aa, Zea Mays
MASSSVAADMELDRPNLEDYLPPDSLPQEAPRNLHLRDLLDISPVLTEAAGAIVDDSFTRCFKSNSPEPWNWNIYLFPLWCFGVVIRYGLLFPLRSLTLAIGWLAFFAAFFPVHFLLKGQDKLRNKIECFCCFMDWSDQVPWTTPKHTTSSGICCKPYINDRFHYSGANDSICCHHAEASWMGWIYSEDYLGKCGLHLV

SEQ ID NO: 190810 - protein, 855 aa, Zea Mays
MAARCSGGCDGREDSAVEALVQWQKVSDFLIGASYMSIPLELLHFATCADLAPLRWVLLQFGAFIVLCGLVHLVAIFTYARPDSRRLLLAITAAKALAAVAASVAAVSLPTFVPQLLRLKTREALLRDKARQLDRDVALVRRREETATRIVRAITKHVCCGCHGGASLAPDVLRTAVFHLSDALGLHSCAVWMPAAAAAASDGGPSLLHLVHRLPEDDHQDPTTRLAICSTDPDVAAVMASKNAKVLRPGSALRRTTSTSGHGHAGAAAIRMPMLRVSNFVDASSSLSDGQGAGVSYAIMVLVLPAPAPTTKNHRTRGPRGEGGGGAREWSRQELEIVEVAADQLAVALSHAAVLKEWQLTRHKLAERQRVLVHARHDAAVATRARDASQSAMRDGVLRPMHSVAGLLSLMQAQQHEDEAFRCTEQRVAVGAMARISALSTTLTDDVMAALLTPTAAGVSLARRPFDPRALVKDAAGVAGCLARCRGLGFSHRAEMSSLPAGCWVVGDDRRVFHLLLHMVGVLLDQCECHCHDLCFAVDTVPVGDQETMSGSGLPDWITPNFSGCNTVCVRFRFGITRHFRNGLLLSSSPRPQERITRRTSVSISSASSKTRLSIATCNKIVQMMNGKMWWESTPASGGQHEEHMSLILHFQLVYGVASPSASSPAGGGGFYHIGGRFGVPSPSTSAPPQHNFNGLRVLLLNTDDTSREVTRKLLERLGCQVLPVPSAARCLSLLLGSATATGGGDQPSFQSPYLVLQAVLVDLHTPAAAIADAATAMDDGFEVALRIREVTGDRFSWLLILVALPLPPRASRIDVRDVCKRTGVNGVIYKPISPSRCQRWQLSFTGFSKTTTDR

SEQ ID NO: 190811 - protein, 684 aa, Zea Mays
MCSASIFLPRCPNTMFQKNLLPLAAVLAVVASLMAAAAGYPWSVCGDSTDSSDFMPNGRYQAHLDFIAAALPKNASKSPYLFATVVAGTVPDQVWAVGLCRGDAKPTACFTCLTLAFQDLPGYCTYAKDASIYYDRCMVHYSDVHTLSGDDDTGPMMDRYAIGDTQTIASDPGRFVLLVAALVNATADYAAYGSGSAARRGFATGEADAGFDPEFPKLYALAQCMPGQTPALCRECLSRLISQSLDGFRNSIGGRVLAVSCTYRYESAPFYDGPAMVRLAPPSSGAPAPAPAVNFRVPAADGRKYHVPWVALAVVLPALAALNLVACLCLRFRRRRRRQPTAPRDKQQKDPVHSTEAEDIEMVESMMMDVSTLRAATGDFDESNKLGEGGFGAVYKGVLPDGEEIAVKRLSSSSSQGVEELKNELALVAKLKHRNLVRLVGVCLEQQERLLVYEFVPNRSLDLALFGADGREQPPLELDWGQRYRIINGIARGLQYLHEDSRLRVVHRDLKASNVLLDKNMNPKISDFGLARIFGRDQTQAVTSRVVGTYGYMAPEYMMRGNYSVKSDAFSFGVMVLEIVTGRKNSNDGCDLLTTVWMHWEAGTVAELVEPTSMGGSFPEGDVLRCIHIGLLCVQPDPAARPVMSSVVTMLGSDTVTLQAPSKPGFFARNNSAYTTVSTVPVDA

SEQ ID NO: 190812 - protein, 345 aa, Zea Mays
MGWRSAAAIRTLPPVPPASRPRSGTRRRSRAAPSRRAPPSTWTIVPFASPASDSSTSLERTSGSSQNCPAIEPASGSVNATDAWFGAAVAGIFTALVDRAAAASNATRKYFATAEMDFDPKLYGLAQCAPDLTPAQCQGCLGDLQSRVTAQFLSGRPLGNNAFMVWCSLRYSVSPFYAGRAMLQLPAPPAPPPTSTPTLHSSGRKVNAAGISAGIACVVVLMLILSVFFFIRFRLRIKVKKNDHSLKKIGRAQCTIFDLLTLEEATEHFAEKNKLGKGGFGIVYKGILSDGQEIAVKKLLGRAGSGLDQLQNEMIGKEMHLTGSNSTTSSLELPRGFCISMRTQA

SEQ ID NO: 190813 - protein, 401 aa, Zea Mays
MAPPFACAMHGRALLAAAAAALLASAVTLTLLPSAAAQPWVGPWPTCDDTTGNYSAGSAYAKNIKQLILSLQANASNTPALFATGSAGAGADAVYGLILCRGDLSPTDCFDCGTNAGQDVYRVCNGTRDAALVYNQCYVRLAPTDFLATTNNTGMRDLINGNSVPAGVNVTAYDGAITRLLNATARYAVDSSAPSLSPRKYFATGQMAGVDPRFPTGIWSMAQCAGDISPVQCRSCLDDLLAQWWQKFDSKEIGARLDGSRCNLRFETGNFYTGSPMVKLQMNGEEAAPAPVPSTDVLPGTTGGKKNSVGKLLGIILPIVFVAAIAAIALCIWIVRKKRTYQGTNLPQTDTTYMAEDIESIKSILLSLPSLQAATNNFDESNKLGEGGFGTVYKIMRRKDN

SEQ ID NO: 190814 - protein, 132 aa, Zea Mays
MDKTAILSDAIRVVGELRSEAKKLKDSNENLQEKIKELKAEKNELRDEKQRLKAEKESLEQQIKFLNARPSLVPHHPVIPASAFPAPQGPAAAARHKLMMPVIGYPGFPMWQFMPPSDVDTSDDPRSCPPVA

SEQ ID NO: 190815 - protein, 117 aa, Zea Mays
MASPEGTTWVFDCPLMDDLAVAADFAAAPAGGFFWAAPPSLQPQAPVQSVVAASAPNPCMEISSSVDCGQEKEQPTNKRPRSESTTESSTKASREKIRRDKLNERPRRMSCETRSKG

SEQ ID NO: 190816 - protein, 179 aa, Zea Mays
MASPEGTTWVFDCPLMDDLAVAADFAAAPAGGFFWAAPPSLQPQAPVQSVVAASAPNPCMEISSSVDCGQEKEQPTNKRPRSESTTESSTKASREKIRRDKLNERFLELGAILEPGKTPKMDKTAILSDAIRVVGELRSEAKKLKDSNENLQEKIKELKVYTISCGQVINGAVQMGGGT

SEQ ID NO: 190817 - protein, 103 aa, Zea Mays
MLGSSAAYSGGSGARRAKAQGGSRVAIQPTPSRTHADKSCSILEIEKRGTRRPSLGQPRELLCLILDETSEWSSAGFRHLQSLPILLRLPSITGLCCVAKCVL

SEQ ID NO: 190818 - protein, 77 aa, Zea Mays
MSFRAREMYKKVVRRVGGEGKLPAELMKSVKDMLPDSNVIMGRAKRGIFAGRHIRFGNKVSEDGGNNSILLLRYFEL

SEQ ID NO: 190819 - protein, 151 aa, Zea Mays
MTRECPSELVFVFLFGLEVIPNSSWYRWNLDLLSSGNFLFQCPTKASFNNQYTWACVEPGHLATKNDPLLKTVEGTDHTIILMLLETIIRQLTTRKGQVRAHVLQAMVQMDVLVPTGDMTAVRRTAQFFLNSTKEGERNDNRRTGIQKAIN

SEQ ID NO: 190820 - protein, 265 aa, Zea Mays
MTRECPSELVFVFLFGLEVIPNSSWYRWNLDLLSSGNFLFQCPTKASFNNQYTWACVEPGHLATKNDPLLKTVEGTDHTIILMLLETIIRQLTTRKGQVRAHVLQAMVQMDVLVPTGDMTAVRRTAQFFLNSFQERLTAQRKEREMTTAELGFKKQLTKEEKFERRKQRLAAIGEDLLAIAADQPFRFLATFTFVVRAFSVLDGIGKGLDPRFHITEIAKSYAKELLRFNDAGVEIVVKASFNIWCVKRHVYSSYDEFLRLHEGY

SEQ ID NO: 190821 - protein, 174 aa, Zea Mays
MTQLLSGPYDKEGAVINISAGAGGTDAQDWADMLLRMYVRWGEKQRYKTRVVEKSPGEEAGIKSATVELEGRYAYGYLSGEKGTHRIVRQSPFNAKGLRQTSFAGVEVMPLLPEESMAVDIPEEDLEISFTRAGGKGGQNVNKVETAVRMVHIPTGIAVRCSGIISHQFAFVLC

SEQ ID NO: 190822 - protein, 104 aa, Zea Mays
MTQLLSGPYDKEGAVINISAGAGGTDAQDWADMLLRMYVRWGEKQRYKTRVVEKSPGEEAGIKSATVELEGRYAYGYLSGEKGTHRIVRQSPFNAKGLRQFSPI

SEQ ID NO: 190823 - protein, 459 aa, Zea Mays
MVGTSPGGGVFCFSSMVSSPRLLFLLLAGASLCCVAAQKTDTLRQGESLSGAATLVSSPEGVFEAGFFAPDPKQPSRQYLGIWYHSISPRTVVWVANRVAPATSASPSLTLTVTGELRVLDGTAANGTADAPLLWSSNTTSRAGPRGGYSAVLQDTGSLEVRSEDGVLWDSFWHPTDTILSGMRITLQAPGRGPKERMLFTSWASETDPSPGRYALGLDPGNSGQAYIWKDGNVTYWRSGQWNGVNFIGIPWRPLYRSGFTPAIDPVLGNYYTYTATNTSLQRFVVLPNGTDICYMVRKSSQDWELVWYQPSNECEYYATCGPNAKCTASQDGKAKCTCLKGFHPKLQEQWNAGNWSQGCIRSPPLGCETNQSGDGFLPMGNIKWPDFSYWVSTVGDEPGCRTVCLNNCSCGAYVYTATTGCLAWGNELIDMHELQTGAYTLNLKLPASELEDITQFGK

SEQ ID NO: 190824 - protein, 484 aa, Zea Mays
MGNIKWPDFSYWVSTVGDEPGCRTVCLNNCSCGAYVYTATTGCLAWGNELIDMHELQTGAYTLNLKLPASELRGHHPIWKIATIISAIVLFVLAACLLLWWKHGRNIKDAVHGSWRSRHSSTQSQQNSAMLDISQSIRFDDDVEDGKSHELKVYSLDRIRTATSNFSDSNKLGEGGFGPVYMGTLPGGEEVAVKRLCRNSGQGLEEFKNEVILIAKLQHRNLVRLLGCCIQREEKILVYEYMPNKSLDAFLFNPEKQRLLDWKKRFDIIEGIARGLLYLHRDSRLRVVHRDLKASNILLDADMKPKISDFGMARMFGGDQNQFNTNRVVGTFGYMSPEYAMEGIFSVKSDVYGFGVLILEIITGKRAVSFHCHEDSLNIAGYAWRQWNEDNAAELIDPVIRASCSVRQVLRCIHIALLCVQDHADERPDIPTVILMLSNDSSSLPNPRPPTLMLRGREIESSKSSEKDRSHSIGTVTMTQLHGR

SEQ ID NO: 190825 - protein, 270 aa, Zea Mays
MQAPPAPSSVDLPLAVAPPPVKAPTPRPPPPASLQPESPGVFFSAAAAAAPLGTAHRRIAIAVDLSDESAYAVRWAVANYLRPGDAVILLHVRPTSVLYGADWGAVDVSLPNPSATAASEDGDGDCETAAAARRMEDDYDAFTATKADDFASPLKDAGIPYKIHIVRDHDMKERLCLEVERLSLSAVIMGSKGFGAARRTSKGRLGSVSDYCVHHCVCPVVVVRFPDDGSAEGGEAAGLSAAVGAEDVLHPVPEEEGEYHDAAEEHKGFC

SEQ ID NO: 190826 - protein, 292 aa, Zea Mays
MQAPPAPSSVDLPLAVAPPPVKAPTPRPPPPASLQPESPGVFFSAAAAAAPLGTAHRRIAIAVDLSDESAYAVRWAVANYLRPGDAVILLHVRPTSVLYGADWGAVDVSLPNPSATAASEDGDGDCETAAAARRMEDDYDAFTATKADDFASPLKDAGIPYKIHIVRDHDMKERLCLEVERLSLSAVIMGSKGFGAARRTSKGRLGSVSDYCVHHCVCPVVVVRFPDDGSAEGGEAAGLSAAVGAEDVLHPVPEEEGEYHDAAEEHKVPIQPCSSPLMFPPPCLGGSACGGH

SEQ ID NO: 190827 - protein, 52 aa, Zea Mays
MESDAERRRRMSNRVEWKPLSSPKTPIPFQYTYDLVSNILENTLVIAYIKET

SEQ ID NO: 190828 - protein, 151 aa, Zea Mays
MVYCILLAAVLISLIAFSVTRHHIYLYMGIGSVLLIAIYTGYFRRRIRKQFNIRGTESSLDDCVLHLICPCCTLCQEARTLEMNNVQCGVWHGRGDTICLGSNGAGNKAFAALNKASLVPVKSPGLCGMDRSSSAADEQQPLVPPDQLEQV

SEQ ID NO: 190829 - protein, 203 aa, Zea Mays
MGCPNWTNDDIVNKKDDSVAACNGRGILMVSHIGCGTWSRRLSADIGQLNTAQDIWKRCFVDTCSIAHMAHYCIPDSQTWDMIPLSATYDSTTDATDPRNENEILLLSVFCGSLCKYLTIASGRASVFVLQARPTTQIKSWDHAVGVICVQEAGGQTSDWSGEPLDLAADLTSRRIIYPRGGVLVTNGALHDKLVEMISASYK

SEQ ID NO: 190830 - protein, 214 aa, Zea Mays
MPLLHLSLPSHRLLVGGRGRLFFPSSPRRICLSVRAAGDAAVSVAAGAYGLPFRPEGAAHHRELSAAVAVVERACCLCVDVKRSLFSRRSSILEKNDQSPVTVADFGVQALISLELQRLFPSIPLVAEEDSASLRSSKADDNSSDILVESIFSAVVDKVSNNGSHLTQDDVLRAIDRGGKDAVSFDSNPATYWVLDPIDGTKGFLRGNDALYVV

SEQ ID NO: 190831 - protein, 121 aa, Zea Mays
MGCPNWTNDDIVNKKDDSVAACNGRGILMVSHIGCGTWSRRLSADIGQLNTAQDIWKRCFVDTCSIAHMAHYCIPDSQTWDMIPLSATYDSTTDATDPRNENEILLLSVFCGRFVALSNLH

SEQ ID NO: 190832 - protein, 94 aa, Zea Mays
MFTATYSQSWFKPRNFSRNTWIGKRRREKKDRKPRSRTKLSQNLMETFIPQGIRISPLQRRVSQDNRINSNIWTVLRNHQMFPFHHRRLWLLVL

SEQ ID NO: 190833 - protein, 253 aa, Zea Mays
MPPNPITSKSSVVVFAVTSFVDVPPTVAETKLNFLKSYKRPIPSIYSAVLQELLVQQHLMRYKKTYQYDAVFALGFVTVYDQLMEGYPSNEDRDSIFKAYITALNEDPDQYRADALKMEEWARSQNGSSLVDFSSRDGEIEAILKDISERAKGKGNFSYSRFFAVGLFRLLELSNATEPTILDKLCAALNVSKRSVDRDLDVYRNILSKLVQAKELLKEYVDREKKKREERSEAPKPNEAVTKFDGNLYSTRH

SEQ ID NO: 190834 - protein, 191 aa, Zea Mays
MAAISSLPFAALRGAAEWRPSSTAAAVSGAVVLSARSRRGSRSVVRCVATTGDVPPTVAETKLNFLKSYKRPIPSIYSAVLQELLVQQHLMRYKKTYQYDAVFALGFVTVYDQLMEGYPSNEDRDSIFKAYITALNEDPDQYRADALKMEEWARSQNGSSLVDFSSRDGEIEAILKDISERAKALRCTKRQ

SEQ ID NO: 190835 - protein, 126 aa, Zea Mays
MAFEKIKVSNPIIEMDGDEMTRVFWQSIKDKLIFPFLDLDIKYYDLGILHGEATDDKVTVEAAEATLKYNVAIKCATITPGETRRTYEARLVAIYRHVREDGVEGQPISVSTEQFAMTCKLTCLVL

SEQ ID NO: 190836 - protein, 129 aa, Zea Mays
MRTFSTVAPVNHSLPHNPQATLALPPPPRPTAIVALPSAPAVAADAAGHPPLAPPPPRRVWATATAASSSNPHSFLPLPVVSLPPSTTSAVAAGACSFPIPEAKLRLRNCRHGVREDQGLQPNHRDGRR

SEQ ID NO: 190837 - protein, 107 aa, Zea Mays
MTRVFWQSIKDKLIFPFLDLDIKYYDLGILHGEATDDKVTVEAAEATLKYNVAIKCATITPGETRRTYEARLVAIYRHVREDGVEGQPISVSTEQFAMTCKLTCLVL

SEQ ID NO: 190838 - protein, 371 aa, Zea Mays
MLCGRAGGVTSMNPFLMKFFPSVYRKEQEAERNQSNQYCKFDSQLLTMFTSSLYLAALVASFFAATVTRVAGRKWSMFGGGVTFLVGAALNGAAKDVGMLILGRVLLGVGVGFANQSVPVYLSEMAPARLRGMLNIGFQLMVTIGILCANLINYGTAKIRGGWGWRVSLALAAVPAAIIAVGALFLPDTPNSLIDRGYTDAAKRMLKRVRGTDDVEEEYSDLVAASDESKLVAHPWRNILLPRYRPQLVMAIAIPMFQQLTGINVIMFYAPVLFKTLGFADDASLMSAVITGLVNVFATFVSIVTVDRLGRRKLFLQGGTQMLACQIVVGSLIGAKFGFSGVAEIPKGPSSPCSAASSSSSSSSSAPGSSS

SEQ ID NO: 190839 - protein, 619 aa, Zea Mays
MMGEAGEEESAAAPAEVSRQAELDEQRCLAEALDALSSLVSASLSATLFPLKWQLTRDRLHACLADTTVPAGDESGEDRRDAFVNLLRDVAATAREARELVPRSQGRQYGGGKLRLRSDLDVLAAALDAHVARLDEVHASGALTRARALVVPRPGAGATRDDVRFYVRDLFARLRAGGAEMRREAATALSEVLRDDEKCVRVVASDVADGVGVLVALLECPDARVREDVLEAVSVIAGSDAHRGDLVVGGVIAPVVRVLDAAASASSEAAKERAARVLCKLTENSDNAWAVAAHGGVTALLDLCTDHGASGGELVCAACRVLRSLAGVDEIRKYMVADAGAVPVLVSLSQRATDDAARIQAMELVVAIGSGDSSAREAVVQEGAIEVLVRALDASSSSKVREVALRAIDGLCLSPPTSTDRLLAAGFLDSVLSLLRTGDTTLQHCALKAAHRLCPVSEEIRKAMGDAGFMLELVSVLGASSKSPEAREMAAESLCALVSVHRNRKRFVQEDRDDVARVLQLLGSGDEEKLTPAKRFLLSTVTRLADSSSGRRKILTSEHVRNLEKLAETDVPDAKRIVKRLGGSRLRSIFHGIWSLNQKHEPPSDLSPTRMCKSLVSVN

SEQ ID NO: 190840 - protein, 416 aa, Zea Mays
MRREAATALSEVLRDDEKCVRVVASDVADGVGVLVALLECPDARVREDVLEAVSVIAGSDAHRGDLVVGGVIAPVVRVLDAAASASSEAAKERAARVLCKLTENSDNAWAVAAHGGVTALLDLCTDHGASGGELVCAACRVLRSLAGVDEIRKYMVADAGAVPVLVSLSQRATDDAARIQAMELVVAIGSGDSSAREAVVQEGAIEVLVRALDASSSSKVREVALRAIDGLCLSPPTSTDRLLAAGFLDSVLSLLRTGDTTLQHCALKAAHRLCPVSEEIRKAMGDAGFMLELVSVLGASSKSPEAREMAAESLCALVSVHRNRKRFVQEDRDDVARVLQLLGSGDEEKLTPAKRFLLSTVTRLADSSSGRRKILTSEHVRNLEKLAETDVPDAKRIVKRLGGSRLRSIFHGIWSL

SEQ ID NO: 190841 - protein, 1236 aa, Zea Mays
MLSAASVMAPAAATQKSSLEVLLETLKKRDEQPKDAPPTLPARPTCRGRLPTTRRSSLPAGFMLENGMATVAATEAAVVDKKADAKMEIVGLEAKEEKLVKGCIFGTKRKFPNTEVLEESPYVGKFLEERKGTSVCKNPPHISSATIRMNGNVACTDILDYILQKKLRVWCSSPNAKWELGQIQSMSGDDAEILLANGKVLMVSPEQLLPANPDILDGVDDLIQMSYLNEPSVLYNLQLRYSRDLIYTKAGPVLIAVNPLKEVALYGKSSIMQYKQKANDDPHVYAVADLAFNEMLQDGINQSIIISGESGSGKTETAKIAMQYLSDLGGASGTESEVLQTNVILEALGNAKTSRNHNSSRFGKLIEIHFSESGKMCGAKIQTFLLEKSRVVQRAQGERSYHIFYQLCSGAPPLLKKKLFLKSANDYNYLKQSNCLKIDGVDDSKKFTVLVDALDTIQISKEDQMKLFSMLAAVLWLGNISFCVIDNENHVEVVSNEGLSTAAKLLGCTANQLVIALSTCKIRAGNDSIVKKLTLTQAIDARDALAKSIYANLFDWIVDQINHSLGTGRQFTWRSISILDIYGFECFNKNGFEQFCINYANERLQQHFNRHLLKLQQEEYLEDGIDWTPMEFVDNTNCLSLFEKKHLGLLSLLDEESTFPKASDFSFANKLKRQLSGNSCFKSEKEGTFKICHYAGEVTYDTAGFLEKNRDPLHSESIQLLSSCTCELSKHFASVMVADSQNKSSLSWHSVKDTHKQSVVMEFKAQLFKLMQQLESTTPHFIQCIQPNSKHHPRLFEHDLVLHQLKCCGVFEVVRISRTCYPTRITHQQFAERFLLLRSIASQDPLSVSIAVLQKFNIPPEMYQVGYTKLFFRTGQVAALENAKRQMLLGTLHIQTQFRGLHSRRGYQRLKKGAMNLQSFIRGERTRIHFDNLVKRWRAAVLIQKHTRRRLAANMFNDQLNHVILLQSVTRGFLARRKYKCLQNEKESKASHSIVQGNTRKNNSESRICHEMNGHYPHEPVITELQGRITKAEAALRGKEEENVMLKQQLEQYERKWSEYEAKMKCMEEAWKRQLSSLQLSLVVAKKSLAADDAATRAARTDCTPTHAQYDSEDTLSTGTRTPEVIESKHDNHNPEAKVSAGNSDRRVNAVNHLAKEFEDRRQVFEDDAGFLVAVRSGQIGSNMNPDEELRKLKDRFATWKKDYKSRLKETKVNLSKVGTHDEKSRKRWWGKKSSK

SEQ ID NO: 190842 - protein, 1201 aa, Zea Mays
MAPAAATQKSSLEVLLETLKKRDEQPKDAPPTLPARPTCRGRLPTTRRSSLPAGFMLENGMATVAATEAAVVDKKADAKMEIVGLEAKEEKLVKGCIFGTKRKFPNTEVLEESPYVGKFLEERKGTSVCKNPPHISSATIRMNGNVACTDILDYILQKKLRVWCSSPNAKWELGQIQSMSGDDAEILLANGKVLMVSPEQLLPANPDILDGVDDLIQMSYLNEPSVLYNLQLRYSRDLIYTKAGPVLIAVNPLKEVALYGKSSIMQYKQKANDDPHVYAVADLAFNEMLQDGINQSIIISGESGSGKTETAKIAMQYLSDLGGASGTESEVLQTNVILEALGNAKTSRNHNSSRFGKLIEIHFSESGKMCGAKIQTFLLEKSRVVQRAQGERSYHIFYQLCSGAPPLLKKKLFLKSANDYNYLKQSNCLKIDGVDDSKKFTVLVDALDTIQISKEDQMKLFSMLAAVLWLGNISFCVIDNENHVEVVSNEGLSTAAKLLGCTANQLVIALSTCKIRAGNDSIVKKLTLTQAIDARDALAKSIYANLFDWIVDQINHSLGTGRQFTWRSISILDIYGFECFNKNGFEQFCINYANERLQQHFNRHLLKLQQEEYLEDGIDWTPMEFVDNTNCLSLFEKKHLGLLSLLDEESTFPKASDFSFANKLKRQLSGNSCFKSEKEGTFKICHYAGEVTYDTAGFLEKNRDPLHSESIQLLSSCTCELSKHFASVMVADSQNKSSLSWHSVKDTHKQSVVMEFKAQLFKLMQQLESTTPHFIQCIQPNSKHHPRLFEHDLVLHQLKCCGVFEVVRISRTCYPTRITHQQFAERYRFLLLRSIASQDPLSVSIAVLQKFNIPPEMYQVGYTKLFFRTGQVAALENAKRQMLLGTLHIQTQFRGLHSRRGYQRLKKGAMNLQSFIRGERTRIHFDNLVKRWRAAVLIQKHTRRRLAANMFNDQLNHVILLQSVTRGFLARRKYKCLQNEKESKASHSIVQGNTRKNNSESRICHEMNGHYPHEPVITELQGRITKAEAALRGKEEENVMLKQQLEQYERKWSEYEAKMKCMEEAWKRQLSSLQYDSEDTLSTGTRTPEVIESKHDNHNPEAKVSAGNSDRRVNAVNHLAKEFEDRRQVFEDDAGFLVAVRSGQIGSNMNPDEELRKLKDRFATWKKDYKSRLKETKVNLSKVGTHDEKSRKRWWGKKSSK

SEQ ID NO: 190843 - protein, 144 aa, Zea Mays
MCSAWRSGLSYSHVRLLQRSSKPIKISTLWINSKQIWLHTKTWLQSQCMINTFAYLFARKKRHKAGASVHARTLGPKGSDPHKAAVIGYTIGDPLKDTSGPSLNILIKLMAVESLVFAPYFAAHGGITCVLCNSICIEKQYTQS

SEQ ID NO: 190844 - protein, 110 aa, Zea Mays
MLSTSVVAVVVRAQPRDFCVIRQEWTVVRIQFTSLHSWLELQCMPGPLAQKVLTLTRRLSLVTPLEILSRTRLAPPSTFSSSLWRLNPLSSPPTSPPMVALHVCCVIASV

SEQ ID NO: 190845 - protein, 136 aa, Zea Mays
MPRRPARPGLAFRWAQRIKSYHIHSKQIWLHTKTWLQSQCMINTFAYLFARKKRHKAGASVHARTLGPKGSDPHKAAVIGYTIGDPLKDTSGPSLNILIKLMAVESLVFAPYFAAHGGITCVLCNSICIEKQYTQS

SEQ ID NO: 190846 - protein, 85 aa, Zea Mays
MPRRPARPGLAFRWAQRIKSYHIRKGESVEQCLACHSYMCSAWRSGLSYSHVRLLQRSSKPIKISTLWISIFDNTYETSVIFFSA

SEQ ID NO: 190847 - protein, 399 aa, Zea Mays
MAARASCIYSMYGLLAAMGNEKANSYWEAELPPNYDRVGIENFIRAKYEDKRWVPRNGTSKSSSSVRDEKSQESPASANRSGHGHRSSFEQNRASPALPSKVAHAASRISSQASPQPPKVETPVPKVVLPPQSQKSPAKVDATPPKVEKPSVTPPPKVDYATDLFNMLSMDGTTEKESASSSNDDNGWDGFQSAQPVPSSEKKDSAKPAESKTQSTSGMEDLFKDSPAVPLSSAPAVSQVNAKNDIMSLFEKSNMVSPFAAHQQQLALMSQQQALLMAALKAGNAPQMMIPGTANQLNANGTLPFQNWTNLYQNPGSTPAAAQNGATKVANNNQDFSSGTFGFGTPGVYNISPTVPANGATTAGAINNGTASTASSTLPSQSGKDYDFSSLTQGFFTKR

SEQ ID NO: 190848 - protein, 429 aa, Zea Mays
MNEKASVSKELNAKHKKILEGLLRHPENRECADCKSKGPRWASVNLAMGNEKANSYWEAELPPNYDRVGIENFIRAKYEDKRWVPRNGTSKSSSSVRDEKSQESPASANRSGHGHRSSFEQNRASPALPSKVAHAASRISSQASPQPPKVETPVPKVVLPPQSQKSPAKVDATPPKVEKPSVTPPPKVDYATDLFNMLSMDGTTEKESASSSNDDNGWDGFQSAQPVPSSEKKDSAKPAESKTQSTSGMEDLFKDSPAVPLSSAPAVSQVNAKNDIMSLFEKSNMVSPFAAHQQQLALMSQQQALLMAALKAGNAPQMMIPGTANQLNANGTLPFQNWTNLYQNPGSTPAAAQNGATKVANNNQDFSSGTFGFGTPGVYNISPTVPANGATTAGAINNGTASTASSTLPSQSGKDYDFSSLTQGFFTKR

SEQ ID NO: 190849 - protein, 382 aa, Zea Mays
MGNEKANSYWEAELPPNYDRVGIENFIRAKYEDKRWVPRNGTSKSSSSVRDEKSQESPASANRSGHGHRSSFEQNRASPALPSKVAHAASRISSQASPQPPKVETPVPKVVLPPQSQKSPAKVDATPPKVEKPSVTPPPKVDYATDLFNMLSMDGTTEKESASSSNDDNGWDGFQSAQPVPSSEKKDSAKPAESKTQSTSGMEDLFKDSPAVPLSSAPAVSQVNAKNDIMSLFEKSNMVSPFAAHQQQLALMSQQQALLMAALKAGNAPQMMIPGTANQLNANGTLPFQNWTNLYQNPGSTPAAAQNGATKVANNNQDFSSGTFGFGTPGVYNISPTVPANGATTAGAINNGTASTASSTLPSQSGKDYDFSSLTQGFFTKR

SEQ ID NO: 190850 - protein, 165 aa, Zea Mays
MLQWTCFPWLVCCLFWNVIAVTTAWIKGEGVKIWLLAIIYFISGVPGAYVLWYRPLYNAMRTDSALKFGLFFLLYVFHILFCVFSAVAPPVVFEGKSLAGILPAIDLISVNALVGIFYFVGFGLFCLESLLSIWVIQQVYMYFRGSGKAAEMKRDATRGAMRAAF

SEQ ID NO: 190851 - protein, 222 aa, Zea Mays
MAGRYDGNPFEEEDVNPFSEQARGKAGGQSNFGGGAFYMPNTRNMPPASNSRLSPLPPEPADFSATVDIPLDSSKDLKRREKELQAREAELNKREKELKRREEAAARAGIVIEEKNWPPFLPLIHHDITNEIPSHLQRMQYVAFASFLGLVCCLFWNVIAVTTAWIKGEGVKIWLLAIIYFISGVPGAYVLWYRPLYNAMRTDSALKFGLFFLLYVRNFASN

SEQ ID NO: 190852 - protein, 261 aa, Zea Mays
MPPASNSRLSPLPPEPADFSATVDIPLDSSKDLKRREKELQAREAELNKREKELKRREEAAARAGIVIEEKNWPPFLPLIHHDITNEIPSHLQRMQYVAFASFLGLVCCLFWNVIAVTTAWIKGEGVKIWLLAIIYFISGVPGAYVLWYRPLYNAMRTDSALKFGLFFLLYVFHILFCVFSAVAPPVVFEGKSLAGILPAIDLISVNALVGIFYFVGFGLFCLESLLSIWVIQQVYMYFRGSGKAAEMKRDATRGAMRAAF

SEQ ID NO: 190853 - protein, 296 aa, Zea Mays
MAGRYDGNPFEEEDVNPFSEQARGKAGGQSNFGGGAFYMPNTRNMPPASNSRLSPLPPEPADFSATVDIPLDSSKDLKRREKELQAREAELNKREKELKRREEAAARAGIVIEEKNWPPFLPLIHHDITNEIPSHLQRMQYVAFASFLGLVCCLFWNVIAVTTAWIKGEGVKIWLLAIIYFISGVPGAYVLWTDSALKFGLFFLLYVFHILFCVFSAVAPPVVFEGKSLAGILPAIDLISVNALVGIFYFVGFGLFCLESLLSIWVIQQVYMYFRGSGKAAEMKRDATRGAMRAAF

SEQ ID NO: 190854 - protein, 295 aa, Zea Mays
MAGRYDGNPFEEEDVNPFSEQARGKAGGQSNFGGGAFYMPNTRNMPPASNSRLSPLPPEPADFSATVDIPLDSSKDLKRREKELQAREAELNKREKELKRREEAAARAGIVIEEKNWPPFLPLIHHDITNEIPSHLQRMQYVAFASFLGLVCCLFWNVIAVTTAWIKGEGVKIWLLAIIYFISGVPGAYVLWYRPLYNAMRGILPAIDLISVNALVGIFYFVGFGLFCLESLLSIWVIQVSFLLSTVLIFLNQLQCDILEPFLDRVQQVYMYFRGSGKAAEMKRDATRGAMRAAF

SEQ ID NO: 190855 - protein, 1370 aa, Zea Mays
MSMKEESDEVATKTRLLSLELLQGLLEGVSNAFTKNFHFIDSVKAYLSYALLRASVTSSPVVFQGEIGVFFPLIVLRSLDSSDSSLSQKASVLRMLEKVCKDPQMLADVFVNYDCDLEGPNLFERTVSALSRIAQGSQIADTNSIVSSQTVSVKGSSLQCLVSILKSLAVWEQLRRYSLKQGSIVESHEGDASRSVTTDEMKSQEDVRNQFERAKAHKSTLEAAISEFNRKPTKGIEYLLSNKLIENKASSVAQFLKSNPGLDKVMIGEYLGQHEEFPLAVMHAYVDSMKFSGLKFDAAIREFLKGFRLPGEAQKIDRIMEKFAERYCADNPELFKNADTAYVLAYAVIMLNTDAHNPMVWPKMSKSDFVRMNTASDAEECAPKELLEEIYDSIVKEEIKIKDDSHDTSKTTKRPETEETGRLVNILNLALPRLKSASDTKAESEKIIKQTQALFRNQGQKKGVFHVAQQVELVRPMLEAVGWPLLATFSVTMEEGDSKPRVVSCMEGFRAGIHLTRVLGMDTMRYAFLTSLVRFTFLHAPKEMRSKNVEALKTLLGLADTDMDALQDTWNAVLECVSRLEYITSNPSISATVMLGSNQISRDSVVQSLKELAGKPAEQIFVNSVKLPSDSIVEFFTALCGVSAEELKQTPARVFSLQKLVEISYYNMARIRLVWARIWSVLAQHFIAAGSHHEEKVAMYAIDSLRQLGMKYLERAELNNFTFQSDILKPFVILMRNSHNSKIRGLIVDCIVQLIKSKVGSIKSGWRCVFMIFTAAADDEDESIVESAFENVEQVILEHFDQVVGDCFMDCVNCLIGFANNKCTPRISLKAIALLRICEDRLAEGFIPGGAVKPIDVVPEANFDVSEHYWFPMLAGLSDLTLDSRPEVRHCALEVLFDLLNERGHKFSSPFWESIFHRVLFPIFDHVRHAGRDGLSSSGDDWLRDTSIHSLQLICNLFNTFYKEVSFMLPPLLSLLLECAKKTDQTVVSIALGALVHLIEVGGHQFSDGDWDTLLKSIRDASYTTQPLELLNSLRFQKSKHQQLLSREESNAQGNSYLDSQGEPSISDSNNGEHNHPEAGLQTILENSEGRTQPAVFPRGQSFGQRIMGNMMDNILVRSLTSKSKGRTDDIAPPSPVKAPDDEADKAEEEESPMMETVRSKCITQLLLLGAIESIQKKYWSRLKATQQIAIMDILLSLLEFASSYNSPSNLRTRMHHIPPERPPLNLLRQELAGTTIYLDILHKSTVEQDEKDSIEETNGLNVESDDQEKIKYLAEGKLVSFCGQVLKEASDLQPSTGEAASADIHRVLDLRAPVIVKVLKGMCIMDAQIFKRHLKEFYPLITKLICCDQMDVRGALGDLFSKQLTPLMS

SEQ ID NO: 190856 - protein, 1536 aa, Zea Mays
MLTQMISIVFRRMESEQVSVLPASSVVKDTPSSITNESENGEISTDGQDEEKVTPGDALSMNRPSEAPPTSVEELQNLAGGADIKVLHWFHLITRDLLQGLEAVLDKAVELEDGKKVSRGIDLDTVNIIQRDALLLFRTLCKMSMKEESDEVATKTRLLSLELLQGLLEGVSNAFTKNFHFIDSVKAYLSYALLRASVTSSPVVFQYACGIFSVLLLRFRESLKGEIGVFFPLIVLRSLDSSDSSLSQKASVLRMLEKVCKDPQMLADVFVNYDCDLEGPNLFERTVSALSRIAQGSQIADTNSIVSSQTVSVKGSSLQCLVSILKSLAVWEQLRRYSLKQGSIVESHEGDASRSVTTDEMKSQEDVRNQFERAKAHKSTLEAAISEFNRKPTKGIEYLLSNKLIENKASSVAQFLKSNPGLDKVMIGEYLGQHEEFPLAVMHAYVDSMKFSGLKFDAAIREFLKGFRLPGEAQKIDRIMEKFAERYCADNPELFKNADTAYVLAYAVIMLNTDAHNPMVWPKMSKSDFVRMNTASDAEECAPKELLEEIYDSIVKEEIKIKDDSHDTSKTTKRPETEETGRLVNILNLALPRLKSASDTKAESEKIIKQTQALFRNQGQKKGVFHVAQQVELVRPMLEAVGWPLLATFSVTMEEGDSKPRVVSCMEGFRAGIHLTRVLGMDTMRYAFLTSLVRFTFLHAPKEMRSKNVEALKTLLGLADTDMDALQDTWNAVLECVSRLEYITSNPSISATVMLGSNQISRDSVVQSLKELAGKPAEQIFVNSVKLPSDSIVEFFTALCGVSAEELKQTPARVFSLQKLVEISYYNMARIRLVWARIWSVLAQHFIAAGSHHEEKVAMYAIDSLRQLGMKYLERAELNNFTFQSDILKPFVILMRNSHNSKIRGLIVDCIVQLIKSKVGSIKSGWRCVFMIFTAAADDEDESIVESAFENVEQVILEHFDQVVGDCFMDCVNCLIGFANNKCTPRISLKAIALLRICEDRLAEGFIPGGAVKPIDVVPEANFDVSEHYWFPMLAGLSDLTLDSRPEVRHCALEVLFDLLNERGHKFSSPFWESIFHRVLFPIFDHVRHAGRDGLSSSGDDWLRDTSIHSLQLICNLFNTFYKEVSFMLPPLLSLLLECAKKTDQTVVSIALGALVHLIEVGGHQFSDGDWDTLLKSIRDASYTTQPLELLNSLRFQKSKHQQLLSREESNAQGNSYLDSQGEPSISDSNNGEHNHPEAGLQTILENSEDLPSPSGRTQPAVFPRGQSFGQRIMGNMMDNILVRSLTSKSKGRTDDIAPPSPVKAPDDEADKAEEEESPMMETVRSKCITQLLLLGAIESIQKKYWSRLKATQQIAIMDILLSLLEFASSYNSPSNLRTRMHHIPPERPPLNLLRQELAGTTIYLDILHKSTVEQDEKDSIEETNGLNVESDDQEKIKYLAEGKLVSFCGQVLKEASDLQPSTGEAASADIHRVLDLRAPVIVKVLKGMCIMDAQIFKRHLKEFYPLITKLICCDQMDVRGALGDLFSKQLTPLMS

SEQ ID NO: 190857 - protein, 1707 aa, Zea Mays
MAGAAGGFVTRAFEAMLKECAANRGKFAALQQSIQSYLDSIKGATAEGAVITEALASAGRVLDGPQAELVLQPLRLAVETKHVKLVEPALDCLHKLIAYDHLEGDPGLEGGKNSPIFTDILNMVCGCVDNTSSDSTVLQVLKVLLNAVASNRFRVHGEPLLGVIRVCYNIALNSKSPVNQATSKAMLTQMISIVFRRMESEQVSVLPASSVVKDTPSSITNESENGEISTDGQDEEKVTPGDALSMNRPSEAPPTSVEELQNLAGGADIKGLEAVLDKAVELEDGKKVSRGIDLDTVNIIQRDALLLFRTLCKMSMKEESDEVATKTRLLSLELLQGLLEGVSNAFTKNFHFIDSVKAYLSYALLRASVTSSPVVFQYACGIFSVLLLRFRESLKGEIGVFFPLIVLRSLDSSDSSLSQKASVLRMLEKVCKDPQMLADVFVNYDCDLEGPNLFERTVSALSRIAQGSQIADTNSIVSSQTVSVKGSSLQCLVSILKSLAVWEQLRRYSLKQGSIVESHEGDASRSVTTDEMKSQEDVRNQFERAKAHKSTLEAAISEFNRKPTKGIEYLLSNKLIENKASSVAQFLKSNPGLDKVMIGEYLGQHEEFPLAVMHAYVDSMKFSGLKFDAAIREFLKGFRLPGEAQKIDRIMEKFAERYCADNPELFKNADTAYVLAYAVIMLNTDAHNPMVWPKMSKSDFVRMNTASDAEECAPKELLEEIYDSIVKEEIKIKDDSHDTSKTTKRPETEETGRLVNILNLALPRLKSASDTKAESEKIIKQTQALFRNQGQKKGVFHVAQQVELVRPMLEAVGWPLLATFSVTMEEGDSKPRVVSCMEGFRAGIHLTRVLGMDTMRYAFLTSLVRFTFLHAPKEMRSKNVEALKTLLGLADTDMDALQDTWNAVLECVSRLEYITSNPSISATVMLGSNQISRDSVVQSLKELAGKPAEQIFVNSVKLPSDSIVEFFTALCGVSAEELKQTPARVFSLQKLVEISYYNMARIRLVWARIWSVLAQHFIAAGSHHEEKVAMYAIDSLRQLGMKYLERAELNNFTFQSDILKPFVILMRNSHNSKIRGLIVDCIVQLIKSKVGSIKSGWRCVFMIFTAAADDEDESIVESAFENVEQVILEHFDQVVGDCFMDCVNCLIGFANNKCTPRISLKAIALLRICEDRLAEGFIPGGAVKPIDVVPEANFDVSEHYWFPMLAGLSDLTLDSRPEVRHCALEVLFDLLNERGHKFSSPFWESIFHRVLFPIFDHVRHAGRDGLSSSGDDWLRDTSIHSLQLICNLFNTFYKEVSFMLPPLLSLLLECAKKTDQTVVSIALGALVHLIEVGGHQFSDGDWDTLLKSIRDASYTTQPLELLNSLRFQKSKHQQLLSREESNAQGNSYLDSQGEPSISDSNNGEHNHPEAGLQTILENSEDLPSPSGRTQPAVFPRGQSFGQRIMGNMMDNILVRSLTSKSKGRTDDIAPPSPVKAPDDEADKAEEEESPMMETVRSKCITQLLLLGAIESIQKKYWSRLKATQQIAIMDILLSLLEFASSYNSPSNLRTRMHHIPPERPPLNLLRQELAGTTIYLDILHKSTVEQDEKDSIEETNGLNVESDDQEKIKYLAEGKLVSFCGQVLKEASDLQPSTGEAASADIHRVLDLRAPVIVKVLKGMCIMDAQIFKRHLKEFYPLITKLICCDQMDVRGALGDLFSKQLTPLMS

SEQ ID NO: 190858 - protein, 1708 aa, Zea Mays
MAGAAGGFVTRAFEAMLKECAANRGKFAALQQSIQSYLDSIKGATAEGAVITEALASAGRVLDGPQAELVLQPLRLAVETKHVKLVEPALDCLHKLIAYDHLEGDPGLEGGKNSPIFTDILNMVCGCVDNTSSDSTVLQVLKVLLNAVASNRFRVHGEPLLGVIRVCYNIALNSKSPVNQATSKAMLTQMISIVFRRMESEQVSVLPASSVVKDTPSSITNESENGEISTDGQDEEKVTPGDALSMNRPSEAPPTSVEELQNLAGGADIKGLEAVLDKAVELEDGKKVSRFVKLVLSGIDLDTVNIIQRDALLLFRTLCKMSMKEESDEVATKTRLLSLELLQGLLEGVSNAFTKNFHFIDSVKAYLSYALLRASVTSSPVVFQYACGIFSVLLLRFRESLKGEIGVFFPLIVLRSLDSSDSSLSQKASVLRMLEKVCKDPQMLADVFVNYDCDLEGPNLFERTVSALSRIAQGSQIADTNSIVSSQTVSVKGSSLQCLVSILKSLAVWEQLRRYSLKQGSIVESHEGDASRSVTTDEMKSQEDVRNQFERAKAHKSTLEAAISEFNRKPTKGIEYLLSNKLIENKASSVAQFLKSNPGLDKVMIGEYLGQHEEFPLAVMHAYVDSMKFSGLKFDAAIREFLKGFRLPGEAQKIDRIMEKFAERYCADNPELFKNADTAYVLAYAVIMLNTDAHNPMVWPKMSKSDFVRMNTASDAEECAPKELLEEIYDSIVKEEIKIKDDSHDTSKTTKRPETEETGRLVNILNLALPRLKSASDTKAESEKIIKQTQALFRNQGQKKGVFHVAQQVELVRPMLEAVGWPLLATFSVTMEEGDSKPRVVSCMEGFRAGIHLTRVLGMDTMRYAFLTSLVRFTFLHAPKEMRSKNVEALKTLLGLADTDMDALQDTWNAVLECVSRLEYITSNPSISATVMLGSNQISRDSVVQSLKELAGKPAEQIFVNSVKLPSDSIVEFFTALCGVSAEELKQTPARVFSLQKLVEISYYNMARIRLVWARIWSVLAQHFIAAGSHHEEKVAMYAIDSLRQLGMKYLERAELNNFTFQSDILKPFVILMRNSHNSKIRGLIVDCIVQLIKSKVGSIKSGWRCVFMIFTAAADDEDESIVESAFENVEQVILEHFDQVVGDCFMDCVNCLIGFANNKCTPRISLKAIALLRICEDRLAEGFIPGGAVKPIDVVPEANFDVSEHYWFPMLAGLSDLTLDSRPEVRHCALEVLFDLLNERGHKFSSPFWESIFHRVLFPIFDHVRHAGRDGLSSSGDDWLRDTSIHSLQLICNLFNTFYKEVSFMLPPLLSLLLECAKKTDQTVVSIALGALVHLIEVGGHQFSDGDWDTLLKSIRDASYTTQPLELLNSLRFQKSKHQQLLSREESNAQGNSYLDSQGEPSISDSNNGEHNHPEAGLQTILENSEGRTQPAVFPRGQSFGQRIMGNMMDNILVRSLTSKSKGRTDDIAPPSPVKAPDDEADKAEEEESPMMETVRSKCITQLLLLGAIESIQKKYWSRLKATQQIAIMDILLSLLEFASSYNSPSNLRTRMHHIPPERPPLNLLRQELAGTTIYLDILHKSTVEQDEKDSIEETNGLNVESDDQEKIKYLAEGKLVSFCGQVLKEASDLQPSTGEAASADIHRVLDLRAPVIVKVLKGMCIMDAQIFKRHLKEFYPLITKLICCDQMDVRGALGDLFSKQLTPLMS

SEQ ID NO: 190859 - protein, 1519 aa, Zea Mays
MAGAAGGFVTRAFEAMLKECAANRGKFAALQQSIQSYLDSIKGATAEGAVITEALASAGRVLDGPQAELVLQPLRLAVETKHVKLVEPALDCLHKLIAYDHLEGDPGLEGGKNSPIFTDILNMVCGCVDNTSSDSTVLQVLKVLLNAVASNRFRVHGEPLLGVIRVCYNIALNSKSPVNQATSKAMLTQMISIVFRRMESEQVSVLPASSVVKDTPSSITNESENGEISTDGQDEEKVTPGDALSMNRPSEAPPTSVEELQNLAGGADIKGLEAVLDKAVELEDGKKVSRGIDLDTVNIIQRDALLLFRTLCKMSMKEESDEVATKTRLLSLELLQGLLEGVSNAFTKNFHFIDSVKAYLSYALLRASVTSSPVVFQYACGIFSVLLLRFRESLKGEIGVFFPLIVLRSLDSSDSSLSQKASVLRMLEKVCKDPQMLADVFVNYDCDLEGPNLFERTVSALSRIAQGSQIADTNSIVSSQTVSVKGSSLQCLVSILKSLAVWEQLRRYSLKQGSIVESHEGDASRSVTTDEMKSQEDVRNQFERAKAHKSTLEAAISEFNRKPTKGIEYLLSNKLIENKASSVAQFLKSNPGLDKVMIGEYLGQHEEFPLAVMHAYVDSMKFSGLKFDAAIREFLKGFRLPGEAQKIDRIMEKFAERYCADNPELFKNADTAYVLAYAVIMLNTDAHNPMVWPKMSKSDFVRMNTASDAEECAPKELLEEIYDSIVKEEIKIKDDSHDTSKTTKRPETEETGRLVNILNLALPRLKSASDTKAESEKIIKQTQALFRNQGQKKGVFHVAQQVELVRPMLEAVGWPLLATFSVTMEEGDSKPRVVSCMEGFRAGIHLTRVLGMDTMRYAFLTSLVRFTFLHAPKEMRSKNVEALKTLLGLADTDMDALQDTWNAVLECVSRLEYITSNPSISATVMLGSNQISRDSVVQSLKELAGKPAEQIFVNSVKLPSDSIVEFFTALCGVSAEELKQTPARVFSLQKLVEISYYNMARIRLVWARIWSVLAQHFIAAGSHHEEKVAMYAIDSLRQLGMKYLERAELNNFTFQSDILKPFVILMRNSHNSKIRGLIVDCIVQLIKSKVGSIKSGWRCVFMIFTAAADDEDESIVESAFENVEQVILEHFDQVVGDCFMDCVNCLIGFANNKCTPRISLKAIALLRICEDRLAEGFIPGGAVKPIDVVPEANFDVSEHYWFPMLAGLSDLTLDSRPEVRHCALEVLFDLLNERGHKFSSPFWESIFHRVLFPIFDHVRHAGRDGLSSSGDDWLRDTSIHSLQLICNLFNTFYKEVSFMLPPLLSLLLECAKKTDQTVVSIALGALVHLIEVGGHQFSDGDWDTLLKSIRDASYTTQPLELLNSLRFQKSKHQQLLSREESNAQGNSYLDSQGEPSISDSNNGEHNHPEAGLQTILENSEDLPSPSGRTQPAVFPRGQSFGQRIMGNMMDNILVRSLTSKSKGRTDDIAPPSPVKAPDDEADKAEEEESPMMETVRSKCITQLLLLGAIESIQTEWSLK

SEQ ID NO: 190860 - protein, 280 aa, Zea Mays
MKKFLPENFTAILFHYDGNVNGWNDLPWSKSVIHIAASNQTKWWFAKRFLHPAVVSIYQYIFLWDEDLEVDNFSPRRYLNIVRSEGLEISQPGLDSKLSEIHHRITVRKKAGTFHRRVSRANKKCSREGPPCSGWVEGMAPVFSKSAWQCVWHLIQNDLIHGWGIDYKFGYCAQGDRTKNIGVVDSEFIVHRGVQTLGGSTITKDGIRGKNAKPLGQKAAQIQRSRGRAPGLDMRTKIRRKSRSELRDFQKRWDRAAREDRTWVDPFARSRRKRKNRNPQ

SEQ ID NO: 190861 - protein, 397 aa, Zea Mays
MKLRLHLFVLCVIIIFLVYNMANFQHKQTTLEAKSHPFDTVTVSDRDAVKVPQKAEARIGYLPHGIVESNSDMDLKPLWLTTSARSKKPKQNDNFLIAIAAGINQKKTVDAIMKKFLPENFTAILFHYDGNVNGWNDLPWSKSVIHIAASNQTKWWFAKRFLHPAVVSIYQYIFLWDEDLEVDNFSPRRYLNIVRSEGLEISQPGLDSKLSEIHHRITVRKKAGTFHSVYFDRRVSRANKKCSREGPPCSGWVEGMAPVFSKSAWQCVWHLIQNDLIHGWGIDYKFGYCAQGDRTKNIGVVDSEFIVHRGVQTLGGSTITKDGIRGKNAKPLGQKAAQIQRSRGRAPGLDMRTKIRRKSRSELRDFQKRWDRAAREDRTWVDPFARSRRKRKNRNPQ

SEQ ID NO: 190862 - protein, 151 aa, Zea Mays
MVFVAKMPSHSARKQLKSKDREYVVCLTPYLNVCCILPLPKTSAHHVCGQVKMFLILTKYIENNINIYTSKQIYFEYICSLFCSMTMASVMISRGGLQALICEQRSGENRDPSSVIFRSAGTGLQGKTEHGLIRLPAPEESGRIETHSRSA

SEQ ID NO: 190863 - protein, 685 aa, Zea Mays
MLLVMGNPGRSRQLSALVASAAILLSLSALPICRPYTYEQDVFAINGLYTALGAPQLPNWTSNGGDPCNEGWQGVSCVASNITSIILSGANLGGQLGNTLGNFTSLITLDLSNNNIGGTIPDGLPLTMQRFFLSANQLSGSLPSTLSSLTLLTSMSLNSNHLTGAIPDVFSALTGLANLDFSDNNLTGPLPPSMGNLTSLTSLHIQNNQISGTLNVLQDLPFQDLNVENNLFSGPVPVKLLNLPNFKKDGNPFNTSIAPSAQPPIAPTPLPSIPPSSGHVPSKEPAHSSSVPGGSTSGSGKHTTLKLVGYILIGVVLAVVLVLIAMYCLSKYKEKRSRDDIYMKNKIGRVPQKLGEPKIKEPPLKLKNDAEKAPNVVSDGREEHKLKVPTSETSNVVYDPSPRDGAELRFITDSFSEENIIRDSRFGKVYLAKLPDGELLEILKIDSSNSKVPVDAFLELVVRISELRHPNILGLVGYCAEFEQRLLVYEYCSKMTLHDELRHVDDSSKPLSWNARLQVASEAAKALQHLHDGCQPPVVHQNFEPSVVLLNSTLVVHISECGLASLASKSVSQLSGHTLFHYEAPEVHESGSVSDRSDVYSFGVVMLELLTGRKPYDSSYPRAEQHLVRWATSQLYDIDAITKMVDPSIRGQCSDKALSRFADIISRCIQVKTIDPTSDKGTQCD

SEQ ID NO: 190864 - protein, 679 aa, Zea Mays
MLLVMGNPGRSRQLSALVASAAILLSLSALPICRPYTYEQDVFAINGLYTALGAPQLPNWTSNGGDPCNEGWQGVSCVASNITSIILSGANLGGQLGNTLGNFTSLITFFLSANQLSGSLPSTLSSLTLLTSMSLNSNHLTGAIPDVFSALTGLANLHIQNNQISGTLNVLQDLPFQDLNVENNLFSGPVPVKLLNLPNFKKDGNPFNTSIAPSAQPPIAPTPLPSIPPSSGHVPSKEPAHSSSVPGGSTSGSGKHTTLKLVGYILIGVVLAVVLVLIAMYCLSKYKEKRSRDDIYMKNKIGRVPQKLGEPKIKEPPLKLKNDAEKAPNVVSDGREEHKLKVPTSETSNVVYDPSPRDGAELRFITDSFSEENIIRDSRFGKVYLAKLPDGELLEILKIDSSNSKVPVDAFLELVVRISELRHPNILGLVGYCAEFEQRLLVYEYCSKMTLHDELRHVDDSSKPLSWNARLQVASEAAKALQHLHDGCQPPVVHQNFEPSVVLLNSTLVVHISECGLASLASKSVSQLSGHTLFHYEAPEVHESGSVSDRSDVYSFGVVMLELLTGRKPYDSSYPRAEQHLVRWATSQLYDIDAITKMVDPSIRGQCSDKALSRFADIISRCIQHEPEFRPPMSEVVQDLTRMMPLTTIDAVVGYFGQCKMGGTQWQDAETAPRFVHCQ

SEQ ID NO: 190865 - protein, 419 aa, Zea Mays
MLLVMGNPGRSRQLSALVASAAILLSLSALPICRPYTYEQDVFAINGLYTALGAPQLPNWTSNGGDPCNEGWQGVSCVASNITSIGANLGGQLGNTLGNFTSLITLDLSNNNIGGTIPDGLPLTMQRFFLSANQLSGSLPSTLSSLTLLTSMSLNSNHLTGAIPDVFSALTGLANLDFSDNNLTGPLPPSMGNLTSLTSLHIQNNQISGTLNVLQDLPFQDLNVENNLFSGPVPVKLLNLPNFKKDGNPFNTSIAPSAQPPIAPTPLPSIPPSSGHVPSKEPAHSSSVPGGSTSGSGKHTTLKLVGYILIGVVLAVVLVLIAMYCLSKYKEKRSRDDIYMKNKIGRVPQKLGEPKIKEPPLKLKNDAEKAPNVVSDGREEHKLKVPTSETSNVVYDPSPRDGAELRFITDSCTFGCYNE

SEQ ID NO: 190866 - protein, 418 aa, Zea Mays
MMLRKKLQMWFMIQVQGMGQNLDSSPTAVPLAVTMNKKEHVIDMEKADNFVEDQLHPPQPMALRTEKVTVNPSVRTRRGRVPSVEKVESTTTVKSFSIASLQQYTNSFSEENIIRDSRFGKVYLAKLPDGELLEILKIDSSNSKVPVDAFLELVVRISELRHPNILGLVGYCAEFEQRLLVYEYCSKMTLHDELRHVDDSSKPLSWNARLQVASEAAKALQHLHDGCQPPVVHQNFEPSVVLLNSTLVVHISECGLASLASKSVSQLSGHTLFHYEAPEVHESGSVSDRSDVYSFGVVMLELLTGRKPYDSSYPRAEQHLVRWATSQLYDIDAITKMVDPSIRGQCSDKALSRFADIISRCIQHEPEFRPPMSEVVQDLTRMMPLTTIDAVVGYFGQCKMGGTQWQDAETAPRFVHCQ

SEQ ID NO: 190867 - protein, 427 aa, Zea Mays
MLLVMGNPGRSRQLSALVASAAILLSLSALPICRPYTYEQDVFAINGLYTALGAPQLPNWTSNGGDPCNEGWQGVSCVASNITSIILSGANLGGQLGNTLGNFTSLITLDLSNNNIGGTIPDGLPLTMQRFFLSANQLSGSLPSTLSSLTLLTSMSLNSNHLTGAIPDVFSALTGLANLDFSDNNLTGPLPPSMGNLTSLTSLHIQNNQISGTLNVLQDLPFQDLNVENNLFSGPVPVKLLNLPNFKKDGNPFNTSIAPSAQPPIAPTPLPSIPPSSGHVPSKEPAHSSSVPEKRSRDDIYMKNKIGRVPQKLGEPKIKEPPLKLKNDAEKAPNVVSDGREEHKLKVPTSETSNVVYDPSPRDGAELRFITDSRWHCGLKKSLSIPVYVQEGEEYLQLKRWNRRLLSSPFPLHPFNNIPIVSVRKIS

SEQ ID NO: 190868 - protein, 388 aa, Zea Mays
MWFMIQVQGMGQNLDSSPTAVPLAVTMNKKEHVIDMEKADNFVEDQLHPPQPMALRTEKVTVNPSVRTRRGRVPSVEKVESTTTVKSFSIASLQQYTNSFSEENIIRDSRFGKVYLAKLPDGELLEILKIDSSNSKVPVDAFLELVVRISELRHPNILGLVGYCAEFEQRLLVYEYCSKMTLHDELRHVDDSSKPLSWNARLQVASEAAKALQHLHDGCQPPVVHQNFEPSVVLLNSTLVVHISECGLASLASKSVSQLSGHTLFHYEAPEVHESGSVSDRSDVYSFGVVMLELLTGRKPYDSSYPRAEQHLVRWATSQLYDIDAITKMVDPSIRGQCSDKALSRFADIISRCIQHEPEFRPPMSEVVQDLTRMKLEFEDAPRSGASC

SEQ ID NO: 190869 - protein, 735 aa, Zea Mays
MLLVMGNPGRSRQLSALVASAAILLSLSALPICRPYTYEQDVFAINGLYTALGAPQLPNWTSNGGDPCNEGWQGVSCVASNITSIILSGANLGGQLGNTLGNFTSLITLDLSNNNIGGTIPDGLPLTMQRFFLSANQLSGSLPSTLSSLTLLTSMSLNSNHLTGAIPDVFSALTGLANLHIQNNQISGTLNVLQDLPFQDLNVENNLFSGPVPVKLLNLPNFKKDGNPFNTSIAPSAQPPIAPTPLPSIPPSSGHVPSKEPAHSSSVPGGSTSGSGKHTTLKLVGYILIGVVLAVVLVLIAMYCLSKYKEKRSRDDIYMKNKIGRVPQKLGEPKIKEPPLKLKNDAEKAPNVVSDGREEHKLKVPTSETSNVVYDPSPRDGAELRFITDSVRTRRGRVPSVEKVESTTTVKSFSIASLQQYTNSFSEENIIRDSRFGKVYLAKLPDGELLEILKIDSSNSKVPVDAFLELVVRISELRHPNILGLVGYCAEFEQRLLVYEYCSKMTLHDELRHVDDSSKPLSWNARLQVASEAAKALQHLHDGCQPPVVHQNFEPSVVLLNSTLVVHISECGLASLASKSVSQLSGHTLFHYEAPEVHESGSVSDRSDVYSFGVVMLELLTGRKPYDSSYPRAEQHLVRWATSQLYDIDAITKMVDPSIRGQCSDKALSRFADIISRCIQHEPEFRPPMSEVVQDLTRMMPLTTIDAVVGYFGQCKMGGTQWQDAETAPRFVHCQ

SEQ ID NO: 190870 - protein, 598 aa, Zea Mays
MQRFFLSANQLSGSLPSTLSSLTLLTSMSLNSNHLTGAIPDVFSALTGLANLDFSDNNLTGPLPPSMGNLTSLTSLHIQNNQISGTLNVLQDLPFQDLNVENNLFSGPVPVKLLNLPNFKKDGNPFNTSIAPSAQPPIAPTPLPSIPPSSGHVPSKEPAHSSSVPGGSTSGSGKHTTLKLVGYILIGVVLAVVLVLIAMYCLSKYKEKRSRDDIYMKNKIGRVPQKLGEPKIKEPPLKLKNDAEKAPNVVSDGREEHKLKVPTSETSNVVYDPSPRDGAELRFITDSFSEENIIRDSRFGKVYLAKLPDGELLEILKIDSSNSKVPVDAFLELVVRISELRHPNILGLVGYCAEFEQRLLVYEYCSKMTLHDELRHVDDSSKPLSWNARLQVASEAAKALQHLHDGCQPPVVHQNFEPSVVLLNSTLVVHISECGLASLASKSVSQLSGHTLFHYEAPEVHESGSVSDRSDVYSFGVVMLELLTGRKPYDSSYPRAEQHLVRWATSQLYDIDAITKMVDPSIRGQCSDKALSRFADIISRCIQHEPEFRPPMSEVVQDLTRMMPLTTIDAVVGYFGQCKMGGTQWQDAETAPRFVHCQ

SEQ ID NO: 190871 - protein, 725 aa, Zea Mays
MLLVMGNPGRSRQLSALVASAAILLSLSALPICRPYTYEQDVFAINGLYTALGAPQLPNWTSNGGDPCNEGWQGVSCVASNITSIILSGANLGGQLGNTLGNFTSLITLDLSNNNIGGTIPDGLPLTMQRFFLSANQLSGSLPSTLSSLTLLTSMSLNSNHLTGAIPDVFSALTGLANLDFSDNNLTGPLPPSMGNLTSLTSLHIQNNQISGTLNVLQDLPFQDLNVENNLFSGPVPVKLLNLPNFKKDGNPFNTSIAPSAQPPIAPTPLPSIPPSSGHVPSKEPAHSSSVPGGSTSGSGKHTTLKLVGYILIGVVLAVVLVLIAMYCLSKYKEKRSRDDIYMKNKIGRVPQKLGEPKIKEPPLKLKNDAEKAPNVVSDGREEHKLKVPTSETSNVVYDPSPRDGAELRFITDSFSEENIIRDSRFGKVYLAKLPDGELLEILKIDSSNSKVPVDAFLELVVRISELRHPNILGLVGYCAEFEQRLLVYEYCSKMTLHDELRHVDDSSKPLSWNARLQVASEAAKALQHLHDGCQPPVVHQNFEPSVVLLNSTLVVHISECGLASLASKSVSQLSGHTLFHYEAPEVHESGSVSDRSDVYSFGVVMLELLTGRKPYDSSYPRAEQHLVRWATSQLYDIDAITKMVDPSIRGQCSDKALSRFADIISRCIQHEPEFRPPMSEVVQDLTRMMPLTTIDAVVGYFGQCKMGGTQWQDAETAPRFVHCQ

SEQ ID NO: 190872 - protein, 247 aa, Zea Mays
MLLVMGNPGRSRQLSALVASAAILLSLSALPICRPYTYEQDVFAINGLYTALGAPQLPNWTSNGGDPCNEGWQGVSCVASNITSIILSGANLGGQLGNTLGNFTSLITLDLSNNNIGGTIPDGLPLTMQRFFLSANQLSGSLPSTLSSLTLLTSMSLNSNHLTGAIPDVFSALTGLANLDFSDNNLTGPLPPSMGNLTSLTSLHIQNNQISGTLNVLQDLPFQDLNVENNLFSGPVPVKLLNLPNFK

SEQ ID NO: 190873 - protein, 90 aa, Zea Mays
MHLSYTRTDVTLFRETISYNYFSGHANVDYSNFTYAHHIPVYPKGVSVLMPGQDMPTFIAHPAPAPCPPERIRWPSHQPPPFAGSSSNPS

SEQ ID NO: 190874 - protein, 83 aa, Zea Mays
MPAEASHDLISLSLGSMPSLRYLPPSAQRKQTARCWTSPRTWTRSWTGSACSCRRSCGRRRCGPWRPGGARAPAAASGSSRTC

SEQ ID NO: 190875 - protein, 495 aa, Zea Mays
MLPRTHSHQARRRSGLGPQLCAAAAALLLLLSLAVLHSRLSSSSSSRFPTSASRSRPSTPAADSNSSALLADEEDEDVAAALDPLLTVTTTAAEGDSLANPDDDRIDELDVLDEDAAGANEADSASASTVGAATPLVWDHVTGAARLPFRLPASVESLPAGLPRLDSPRRIAAAAFGSDDELVDLELRVEISSIAGIEDALLLKPASGKAAETRLRAGWARWLEGKADYLRRDRMLRSNLESLNPRNHPLLQDPDSPGLTSLTRGDRMVQRMLLAELDKPASKSFERRRLLSYENKQSMTTTVKEKPQTGRRWGYFPGIDPHLGFSEFMERFFEHGKCSMRVFMVWNSPQWAYDIRHQRGLESLLKQHPDACVVMLSETLELESFHQFVKEGYKVAVAVPNLDELLESTPTHVFASVWYEWRQTKYYHLHYSELVRLAALYKYGGIYLDSDVIILKPLTSLRNSIGATNHVSGNSRFGGAVLAFEKQRCQIGTAT

SEQ ID NO: 190876 - protein, 117 aa, Zea Mays
MGMWKVVCVTDASAYIASWIVRLLLDRGYTVRATVRDTAFGNVEPTSVDLFKNFHYSKNNGFIEFVQKAIDDMEGIMSEPVQDGHEPKLANEAVSQVVKINYFSSCCRCLFGLQEYL

SEQ ID NO: 190877 - protein, 557 aa, Zea Mays
MESSSGEELEEEFPGHEWITPQSSINAAYQSQTEKGIRKICSDLLELKDAIENLSANRQSKFLAFLRISEEVVEAEQELIELQKHVSSQGILVQDLMSGVCRELDIWHKSSKEEDATKKDSETELDEILSDDTQDPRTIFLDKLDVLLAEHKMEEAVLALEAEEKKYLVADESGKESNADNTAFKTALVKRKTILEDQLVRYCGQPSLSMNELRKCLSGLIKIGKSSLAHQVLLKAYGSRLQKSVEAFLPNCSIYTETYSATLSQLVFSAIAKAAKETNTLLGDSPMNTNRIIQWAEYEIETFARLVKENSPLPESVSALRSACICIETSLFHCSCLESQGLKFSKLLMVLLRPYIEEVLDLNFRRVRRKIVDGARNDDILLLTPQEGSPLSGAVSPNVMLTSSGKKFMSIVNDVLDQILPMTIVHFGGAILNKFIQLFDRYVETLIKVLPGPSEDDNLLESKEPIELKAESDAQQLTLIGTAYTVADELLPAAVSKFFDIQAEKKGAGGSSEGLGPGSIYAMEYKEWKRNLQHSLDKLRDHFCRQLLHFFATMPKA

SEQ ID NO: 190878 - protein, 460 aa, Zea Mays
MGNCCVTPKAADDAGGGKKPKEPKQKKGKKPNPFSIEYNRSGQASAPKLVVLRDPTGRDIAARYELGAELGRGEFGVTYLCTDRASGEALACKSISKKKLRTAVDLEDVRREVEIMRHLPKHPNVVTLRDTYEDDNAVHLVMELCEGGELFDRIVARGHYTERAAALVLRTIVEVVQMCHKHGVMHRDLKPENFLFANKKESAALKAIDFGLSVFFTPGERFSEIVGSPYYMAPEVLKRNYGPEVDVWSAGVILYILLCGVPPFWAETEQGVAQAIIRSVIDFKRDPWPRVSDNAKDLVRGMLNPDPKRRLTAHQVLGHPWLQNIKKAPNVNLGETVKARLQQFSVMNKFKKHALRVIAEHLSVEEAADIKDMFEKMDLNKDQMLSFEELKLGLHKFGHQMPDADVQTLMEAVSLHSFSPQQKLNLHHFNIVLEFLFCLCQTPLDSVLSTRFNVFPSHFN

SEQ ID NO: 190879 - protein, 249 aa, Zea Mays
MLSEQTAASTSSSGGGVERQDRWLQPVAENEEEEEEAEEEEEEELEETNPLAIVPDSNPIPSPRRGPPPAAPGADAAALVAADGHGSREGGGVSVGQVRKEEVESKIAAWQVAEVAKVNNRFKREEVVINGWEGDQVEKASAWLKKYEVINIHGSIASKPSKPPLIMYLDCPVLISSVLLCCMAQRKLEEKRAKAMEKAQNEVAKARRKAEEKRASAEAKRGTKVARVLELANFMRAVGRAPSTKRSFF

SEQ ID NO: 190880 - protein, 228 aa, Zea Mays
MAVAQAATVVAAAAACRGISPSGTTGVFRWRPRRRALARARPARRGSRATGRGRGLVVVAEFGGTYEDGFEDVHKNIINYFTYKATHTVLHQLYEMNPPAYTWLYSYISVNDPLDGDYFLRLLAKERQDLAERVMITRLHLYGKWIKRCDHAMMYERISKENLDIMRQRRKRRTRSRGNPHVCVATEADSKPAWGQEQPRLAPEGIEKYCPIHRSSTHDLTASQGLVP

SEQ ID NO: 190881 - protein, 127 aa, Zea Mays
MYPRGPDGGRDASSRPMLATPAGNDTREEDEITTAEAHVEKDAARMDAALLMRTTPKMDEFHTGGDLDSSGSGSGISGPSASKRQLQRRGSWRQRVSREECGRGCNGSAGTPSTLIISFVFLFDLFF

SEQ ID NO: 190882 - protein, 162 aa, Zea Mays
MGDEMPRLALCLPLPPATTRARRMRSPPRRLMWRKTPRGWTLPSSCGLRPRWTSFTPGAIWTQVEVEAASRGQAPPKDSYKEGDRGGNESAATEKNVVVAVMGQQEMLHVLPTEPSHSLFSFCNFLDDREVLPFMSNFPVGKQYATTSWSEFGHCMKHLLDN

SEQ ID NO: 190883 - protein, 129 aa, Zea Mays
MGDEMPRLALCLPLPPATTRARRMRSPPRRLMWRKTPRGWTLPSSCGLRPRWTSFTPGAIWTQVEVEAASRGQAPPKDSYKEGDRGGNESAATEKNVVVAVMGQQVHHPRSSFPLCFCLIYFFKISLSV

SEQ ID NO: 190884 - protein, 129 aa, Zea Mays
MYPRGPDGGRDASSRPMLATPAGNDTREEDEITTAEAHVEKDAARMDAALLMRTTPKMDEFHTGGDLDSSGSGSGISGPSASKRQLQRRGSWRQRVSSNREECGRGCNGSAAQIGNVACVADRTISLSL

SEQ ID NO: 190885 - protein, 402 aa, Zea Mays
MDSRPRETDAPGDPANGAAPPLAAAVTAATGDVEIIRPRNDKRGYRRVVLPNSLECLLISDPDTDKAAASMNVSVGYFCDPDGLEGLAHFLEHMLFYASEKYPEEDSYSKYIAEHGGSTNAFTSSEHTNFYFDVNSDSLHDALDRFAQFFIKPLMSPDATLREIKAVDSENQKNLLSDPWRMSQLQKHLCAENHPYHKFSTGNWNTLEVKAKEKGLDTRLELIKFYDSHYSANLMQLVVYGKDSLDNLQNLVENKFCDIRDVGRKPFSFPGHPCTPEHLQVLVKAVPIKQGHTLRILFPITPNIRCYKEGPCKYISHLIGHEGEGSLFYVLKKLGWAMSLEAGEGDWSHDFSFFCVVIQLTDVGQEHMEDTLGLLFRYIKLLQNSGTPKWIFDELAEPTRQI

SEQ ID NO: 190886 - protein, 69 aa, Zea Mays
MGGGGAALLLLVMWAGVASAAVYEVGGTIGWTVMGNPDYAAWASSKQIVIGDTVGIRIRTATLNTSSLG

SEQ ID NO: 190887 - protein, 212 aa, Zea Mays
MGPTAGSGEDKAMSELRKKHRVDLERLTITSRPFKTLSFFVLAIAQNLERTCSSVLKKGYQLKTAMLLVVATWLLLMFTDGLNEKHLQELFWYVRFGLWWIILGVASSIGLGSGLHTFIMYLAPHVALFTIKAVQCGRVDLKSAPYDTILLERRPSWLEKDCLQFGPPIYHETIPFSKILQEVYLEAILWGIGTALGELPPYFLSRTACQAA

SEQ ID NO: 190888 - protein, 285 aa, Zea Mays
MTEGQTNDFLRDMIEMTEGQTNDFLRDMIEMRKRQKSGRDTYAKGKSKRVGGGDGGDGGAAGDSADDGDAKGSGDDADADKDSKRMRTKFEELCNEDKILVFFKKLLNEWNQELDEMTELEKRTAKGKSMVATFKQCARYLSPLFEFCRKKVLPDDIRRALLVIVECCMKRDYLAAMDQYIKLAIGNAPWPIGVTMVGIHERSAREKIYTNSVAHIMNDETTRKYLQSIKRLMTLSQRRYPALPSKSVEFNSLANGSDLQALLSEENGSGKASEERLRLMPALKE

SEQ ID NO: 190889 - protein, 316 aa, Zea Mays
MTEGQTNDFLRDMIEMRKRQKAGRDTYAKGKSKRVGGGDGGDGGAAGDSADDGDAKGSGDDADADKDSKRMRTKFEELCNEDKILVFFKKLLNEWNQELDEMTELEKRTAKGKSMVATFKQCARYLSPLFEFCRKKLLNEWNQELDEMTELEKRTAKGKSMVATFKQCARYLSPLFEFCRKKVLPDDIRRALLVIVECCMKRDYLAAMDQYIKLAIGNAPWPIGVTMVGIHERSAREKIYTNSVAHIMNDETTRKYLQSIKRLMTLSQRRYPALPSKSVEFNSLANGSDLQALLSEENGSGKASEERLRLMPALKE

SEQ ID NO: 190890 - protein, 200 aa, Zea Mays
MRTKFEELCNEDKILVFFKKLLNEWNQELDEMTELEKRTAKGKSMVATFKQCARYLSPLFEFCRKKVLPDDIRRALLVIVECCMKRDYLAAMDQYIKLAIGNAPWPIGVTMVGIHERSAREKIYTNSVAHIMNDETTRKYLQSIKRLMTLSQRRYPALPSKSVEFNSLANGSDLQALLSEENGSGKASEERLRLMPALKE

SEQ ID NO: 190891 - protein, 270 aa, Zea Mays
MTEGQTNDFLRDMIEMRKRQKAGRDTYAKGKSKRVGGGDGGDGGAAGDSADDGDAKGSGDDADADKDSKRMRTKFEELCNEDKILVFFKKLLNEWNQELDEMTELEKRTAKGKSMVATFKQCARYLSPLFEFCRKKVLPDDIRRALLVIVECCMKRDYLAAMDQYIKLAIGNAPWPIGVTMVGIHERSAREKIYTNSVAHIMNDETTRKYLQSIKRLMTLCQRRYPALPSKSVEFNSLANGSDLQALLSEENGSGKASEERLRLMPASKE

SEQ ID NO: 190892 - protein, 394 aa, Zea Mays
MRKNACKPNKVSYNALIDAYGSAGMLKEAISLLHEMEQDGIQPDVISISTLLTACGRCKQLTKIDIILAAAKSRGIQLNTVAYNSGIGSYLSLGDYKKALVLYTSMRAGNVKPDAVTYNILISGSCKLGRYVESLKFFEDMLDLNIHLTKEVYSSVICSYVKQGKLTEAASTFNSMKETGCFPDVLTYTTLIKAYSDDGSWRRAWDLFKEMENNGTQPDAIVCSSLMEALNKGGQPERVLQLIEFMKQKKIQLNQKAYFEIISSCTMLRDWKTASQIIEHLDSSLSSISFGTLNHILNFLGKCGRTESMMKLFYKMVTSCSTVGLSTYTILLRNLLIVGKWRKYVEVLQWMEDAGVCPTLYMYQSVLPYIWRDNSMDYVTLMQEKINALREKVT

SEQ ID NO: 190893 - protein, 807 aa, Zea Mays
MSSAPPPPPSLNPEVPPRIVRAPPRRPPPRAPGPPPWAERRPAVSVDLDRGRRSVRTEVDGVRAASLPARHRLRVEGNRWQRDWKVSEVVARLLALPHADADAVDAVLNCWAGRFARRNFPLLIREIAISGSLKHAVHVFRWMKNQENYCARNDIYGMMIRLHARHNKVDQARGLFFEMQEWRCKPNTDTYNSLIHAHARAGQWCWAINIMDDMQRAAIPPSRTTYNNVINACGAAGNWKKALELCKKMTENGVGPDLITHNIVLSAFKNGAQYSKAIAYFEIMKSSKVAPDTCTMNIVIHCLVKIGLYGEAIELFNSMRERRTTCHPDVVTYTSIMYSYSVCGQAENCKAVFDIMVAEGVRPNIVSYNALLGAYASHGMHTEALETFKLLKQNGLRPDIVSYTSLLNAYGRSAQPEKAREVFNEMRKNACKPNKVSYNALIDAYGSAGMLKEAISLLHEMEQDGIQPDVISISTLLTACGRCKQLTKIDIILAAAKSRGIQLNTVAYNSGIGSYLSLGDYKKALVLYTSMRAGNVKPDAVTYNILISGSCKLGRYVESLKFFEDMLDLNIHLTKEVYSSVICSYVKQGKLTEAASTFNSMKETGCFPDVLTYTTLIKAYSDDGSWRRAWDLFKEMENNGTQPDAIVCSSLMEALNKGGQPERVLQLIEFMKQKKIQLNQKAYFEIISSCTMLRDWKTASQIIEHLDSSLSSISFGTLNHILNFLGKCGRTESMMKLFYKMVTSCSTVGLSTYTILLRNLLIVGKWRKFCSGWKMLESAQHSICIKACFHISGETTVWTMLLSCKKK

SEQ ID NO: 190894 - protein, 149 aa, Zea Mays
MFFRPLFKVMALLSGFAGVYTEVIIKKNPSRNINAQNFWLYIFGMLFNLVAICVQDFDAVMNKGFFHGYSFITVLMILNHALSGIAVSMVMKYANNIIKVYSTSVAMLLTATVSVFLFGFHLSLAFLLGSTVVSVSVYLHSVGKLQQRN

SEQ ID NO: 190895 - protein, 333 aa, Zea Mays
MPFLLTPGARAVPSPSTLSRLLLPLHLQITNGRHNHQHGHVPASPLLYPRLRNRRSRFFAASSSSSSPQMAAPADAAGGSSDAFEVIRVHQAKAVRLSPVEEIRTIMDRSVRCVLATHSQDHAGYPSGSMVDFACDQDGYPILAVSSLAVHSKNLSGNPKCSLLVAKDPEDRTDTVITVYGDAVPVSDEEKDSVRSAYLRRHPDAFWVDFGDFSFLHIKPKAVRYVSGVATALLGSGEFNVAEYKEAKVDPISQFSTPITSHMNKDHANDTKLIVQHSTTVKVDFAYMLDVDSLGFNVKAGYDGSVLKLRIPFPRQAQDRKWVLTLDSLNLII

SEQ ID NO: 190896 - protein, 324 aa, Zea Mays
MPFLLTPGARAVPSPSTLSRLLLPLHLQITNGRHNHQHGHVPASPLLYPRLRNRRSRFFAASSSSSSPQMAAPADAAGGSSDAFEVIRVHQAKAVRLSPVEEIRTIMDRSVRCVLATHSQDHAGYPSGSMVDFACDQDGYPILAVSSLAVHSKNLSGNPKCSLLVAKDPEDRTDTVITVYGDAVPVSDEEKDSVRSAYLRRHPDAFWVDFGDFSFLHIKPKAVRYVSGVATALLGSGEFNVAEYKEAKVDPISQFSTPITSHMNKDHANDTKLIVQHSTTVKVDFAYMLDVDSLGFNVKAGYDGSVLKLRIPFPRQAQDRKWGC

SEQ ID NO: 190897 - protein, 273 aa, Zea Mays
MAAPADAAGGSSDAFEVIRVHQAKAVRLSPVEEIRTIMDRSVRCVLATHSQDHAGYPSGSMVDFACDQDGYPILAVSSLAVHSKNLSGNPKCSLLVAKDPEDRTDTVITVYGDAVPVSDEEKDSVRSAYLRRHPDAFWVDFGDFSFLHIKPKAVRYVSGVATALLGSGEFNVAEYKEAKVDPISQFSTPITSHMNKDHANDTKLIVQHSTTVKVDFAYMLDVDSLGFNVKAGYDGSVLKLRIPFPRQAQDRKDVKTLIVEMLQAARASSSDPE

SEQ ID NO: 190898 - protein, 544 aa, Zea Mays
MPYLKSILMHATDKSNRMLRAKSMECISLVGMAVGKDKFRDDARQVMEVLMALQGAPMETDDPITSYMLQSAQLKPDVTVTSAESDDDIASDDDSIETITLGDKRIGIRTSVLEEKATACNMLCCYADELKEGFFPWIDQVAPTLVPLLKFYFHEEVRRAAVAAMPELLRSAKLAVEKGQAQGRDESYVKQLSDYIIAALVEALHKEPETEMCSSMLDSLNECMQLSGLLLDEAQVRAIIDEIKNVIIASATRKRERSERTKAEDFDADEGELLKEENEQEEEVFDQVSECLGTLIKTFKGSFLPFFEELSMYITPMLGKDKTPEERRIAICIFDDVAEQCRESALKYYDTYLPFLLEASNDENSDVRQAAVYGVGVCAEFGGHVFRPLVGEALSKLNNVIRHPDARLPDNIMAYDNAVSALGKICQFHRDGIDAAQVVPAWLSCLPIKDDKVEAKVVHGQLCSMVERSDAEILGPHSQYLPKIVSIFAEVLCNGTELATDETRNRMVNVLRRFQQTLPPDFLASTFSNLQPQQQLLLQSILST

SEQ ID NO: 190899 - protein, 1126 aa, Zea Mays
MASAEDQAAAAALLGGDPAAFDALLSTLMSSSNADRSAAEAAFHRLRASHPEPLALRLATSLAAPTTPADLRAMAGVLLRKVLSPAPSSDASSNNATPPAPLWPQLSPAGQAALKAHLLSALQSDPPKPIAKKVCDAISELAASLLPENAWPELLPFLFRAASGPDAHNLQESALLIFARLADYIAESLLDHLMTIHNLLASALAHPTSPDVRIAALGAAVNLVQCLPTNSDRDKMQDLLPAMMRALTDCLNSGQEVSAQEALELLVELAGAEPRFLRRQIADVVGAMLQVAEATQLEDGTRHLAVEFVITLAEARERAPGMMRRLPQFVGRLFAVLMQMLLDVEDDPAWHSAETEDEDAGEGNNYGVAQECLDRLSIAIGGNAIVPIASELLPQYLSSAEWQKHHAALITLAQIAEGCAKVMLKNLEQVVSMILNGFQHPHPRVRWAAINAIGQLSTDLGPDLQVHYHQQVLPALANAMDDFQNPRVQAHAASAILNFSENCTPEILTPYLDGIVNKLLVLLQNGKQMVQEGALTALASVADSSQDHFKKYYDAVMPYLKSILMHATDKSNRMLRAKSMECISLVGMAVGKDKFRDDARQVMEVLMALQGAPMETDDPITSYMLQAWARLCKCLGQDFLPYMSVVMPPLLQSAQLKPDVTVTSAESDDDIASDDDSIETITLGDKRIGIRTSVLEEKATACNMLCCYADELKEGFFPWIDQVAPTLVPLLKFYFHEEVRRAAVAAMPELLRSAKLAVEKGQAQGRDESYVKQLSDYIIAALVEALHKEPETEMCSSMLDSLNECMQLSGLLLDEAQVRAIIDEIKNVIIASATRKRERSERTKAEDFDADEGELLKEENEQEEEVFDQVSECLGTLIKTFKGSFLPFFEELSMYITPMLGKDKTPEERRIAICIFDDVAEQCRESALKYYDTYLPFLLEASNDENSDVRQAAVYGVGVCAEFGGHVFRPLVGEALSKLNNVIRHPDARLPDNIMAYDNAVSALGKICQFHRDGIDAAQVVPAWLSCLPIKDDKVEAKVVHGQLCSMVERSDAEILGPHSQYLPKIVSIFAEVLCNGTELATDETRNRMVNVLRRFQQTLPPDFLASTFSNLQPQQQLLLQSILST

SEQ ID NO: 190900 - protein, 1116 aa, Zea Mays
MASAEDQAAAAALLGGDPAAFDALLSTLMSSSNADRSAAEAAFHRLRASHPEPLALRLATSLAAPTTPADLRAMAGVLLRKVLSPAPSSDASSNNATPPAPLWPQLSPAGQAALKAHLLSALQSDPPKPIAKKVCDAISELAASLLPENAWPELLPFLFRAASGPDAHNLQESALLIFARLADYIAESLLDHLMTIHNLLASALAHPTSPDVRIAALGAAVNLVQCLPTNSDRDKMQDLLPAMMRALTDCLNSGQEVSAQEALELLVELAGAEPRFLRRQIADVVGAMLQVAEATQLEDGTRHLAVEFVITLAEARERAPGMMRRLPQFVGRLFAVLMQMLLDVEDDPAWHSAETEDEDAGEGNNYGVAQECLDRLSIAIGGNAIVPIASELLPQYLSSAEWQKHHAALITLAQIAEGCAKVMLKNLEQVVSMILNGFQHPHPRVRWAAINAIGQLSTDLGPDLQVHYHQQVLPALANAMDDFQNPRVQAHAASAILNFSENCTPEILTPYLDGIVNKLLVLLQNGKQMVQEGALTALASVADSSQDHFKKYYDAVMPYLKSILMHATDKSNRMLRAKSMECISLVGMAVGKDKFRDDARQVMEVLMALQGAPMETDDPITSYMLQAWARLCKCLGQDFLPYMSVVMPPLLQSAQLKPDVTVTSAESDDDIASDDDSIETITLGDKRIGIRTSVLEEKATACNMLCCYADELKEGFFPWIDQVAPTLVPLLKFYFHEEVRRAAVAAMPELLRSAKLAVEKGQAQGRDESYVKQLSDYIIAALVEALHKEPETEMCSSMLDSLNECMQLSGLLLDEAQVRAIIDEIKNVIIASATRKRERSERTKAEDFDADEGELLKEENEQEEEVFDQVSECLGTLIKTFKGSFLPFFEELSMYITPMLGKDKTPEERRIAICIFDDVAEQCRESALKYYDTYLPFLLEASNDENSDVRQAAVYGVGVCAEFGGHVFRPLVGEALSKLNNVIRHPDARLPDNIMAYDNAVSALGKICQFHRDGIDAAQVVPAWLSCLPIKDDKVEAKVVHGQLCSMVESQYLPKIVSIFAEVLCNGTELATDETRNRMVNVLRRFQQTLPPDFLASTFSNLQPQQQLLLQSILST

SEQ ID NO: 190901 - protein, 1118 aa, Zea Mays
MASAEDQAAAAALLGGDPAAFDALLSTLMSSSNADRSAAEAAFHRLRASHPEPLALRLATSLAAPTTPADLRAMAGVLLRKVLSPAPSSDASSNNATPPAPLWPQLSPAGQAALKAHLLSALQSDPPKPIAKKVCDAISELAASLLPENAWPELLPFLFRAASGPDAHNLQESALLIFARLADYIAESLLDHLMTIHNLLASALAHPTSPDVRIAALGAAVNLVQCLPTNSDRDKMQDLLPAMMRALTDCLNSGQEVSAQEALELLVELAGAEPRFLRRQIADVVGAMLQVAEATQLEDGTRHLAVEFVITLAEARERAPGMMRRLPQFVGRLFAVLMQMLLDVEDDPAWHSAETEDEDAGEGNNYGVAQECLDRLSIAIGGNAIVPIASELLPQYLSSAEWQKHHAALITLAQIAEGCAKVMLKNLEQVVSMILNGFQHPHPRVRWAAINAIGQLSTDLGPDLQVHYHQQVLPALANAMDDFQNPRVQAHAASAILNFSENCTPEILTPYLDGIVNKLLVLLQNGKQMVQEGALTALASVADSSQDHFKKYYDAVMPYLKSILMHATDKSNRMLRAKSMECISLVGMAVGKDKFRDDARQVMEVLMALQGAPMETDDPITSYMLQAWARLCKCLGQDFLPYMSVVMPPLLQSAQLKPDVTVTSAESDDDIASDDDSIETITLGDKRIGIRTSVLEEKATACNMLCCYADELKEGFFPWIDQVAPTLVPLLKFYFHEEVRRAAVAAKLAVEKGQAQGRDESYVKQLSDYIIAALVEALHKEPETEMCSSMLDSLNECMQLSGLLLDEAQVRAIIDEIKNVIIASATRKRERSERTKAEDFDADEGELLKEENEQEEEVFDQVSECLGTLIKTFKGSFLPFFEELSMYITPMLGKDKTPEERRIAICIFDDVAEQCRESALKYYDTYLPFLLEASNDENSDVRQAAVYGVGVCAEFGGHVFRPLVGEALSKLNNVIRHPDARLPDNIMAYDNAVSALGKICQFHRDGIDAAQVVPAWLSCLPIKDDKVEAKVVHGQLCSMVERSDAEILGPHSQYLPKIVSIFAEVLCNGTELATDETRNRMVNVLRRFQQTLPPDFLASTFSNLQPQQQLLLQSILST

SEQ ID NO: 190902 - protein, 1058 aa, Zea Mays
MASAEDQAAAAALLGGDPAAFDALLSTLMSSSNADRSAAEAAFHRLRASHPEPLALRLATSLAAPTTPADLRAMAGVLLRKVLSPAPSSDASSNNATPPAPLWPQLSPAGQAALKAHLLSALQSDPPKPIAKKVCDAISELAASLLPENAWPELLPFLFRAASGPDAHNLQESALLIFARLADYIAESLLDHLMTIHNLLASALAHPTSPDVRIAALGAAVNLVQCLPTNSDRDKMQDLLPAMMRALTDCLNSGQEVSAQEALELLVELAGAEPRFLRRQIADVVGAMLQVAEATQLEDGTRHLAVEFVITLAEARERAPGMMRRLPQFVGRLFAVLMQMLLDVEDDPAWHSAETEDEDAGEGNNYGVAQECLDRLSIAIGGNAIVPIASELLPQYLSSAEWQKHHAALITLAQIAEGCAKVMLKNLEQVVSMILNGFQHPHPRVRWAAINAIGQLSTDLGPDLQVHYHQQVLPALANAMDDFQNPRVQAHAASAILNFSENCTPEILTPYLDGIVNKLLVLLQNGKQMVQEGALTALASVADSSQDHFKKYYDAVMPYLKSILMHATDKSNRMLRAKSMECISLVGMAVGKDKFRDDARQVMEVLMALQGAPMETDDPITSYMLQAWARLCKCLGQDFLPYMSVVMPPLLQSAQLKPDVTVTSAESDDDIASDDDSIETITLGDKRIGIRTSVLEEKATACNMLCCYADELKEGFFPWIDQVAPTLVPLLKFYFHEEVRRAAVAAMPELLRSAKLAVEKGQAQGRDESYVKQLSDYIIAALVEALHKEPETEMCSSMLDSLNECMQLSGLLLDEAQVRAIIDEIKNVIIASATRKRERSERTKAEDFDADEGELLKEENEQEEEVFDQVSECLGTLIKTFKGSFLPFFEELSMYITPMLGKDKTPEERRIAICIFDDVAEQCRESALKYYDTYLPFLLEASNDENSDVRQVVPAWLSCLPIKDDKVEAKVVHGQLCSMVERSDAEILGPHSQYLPKIVSIFAEVLCNGTELATDETRNRMVNVLRRFQQTLPPDFLASTFSNLQPQQQLLLQSILST

SEQ ID NO: 190903 - protein, 846 aa, Zea Mays
MASAEDQAAAAALLGGDPAAFDALLSTLMSSSNADRSAAEAAFHRLRASHPEPLALRLATSLAAPTTPADLRAMAGVLLRKVLSPAPSSDASSNNATPPAPLWPQLSPAGQAALKAHLLSALQSDPPKPIAKKVCDAISELAASLLPENAWPELLPFLFRAASGPDAHNLQESALLIFARLADYIAESLLDHLMTIHNLLASALAHPTSPDVRIAALGAAVNLVQCLPTNSDRDKMQDLLPAMMRALTDCLNSGQEVSAQEALELLVELAGAEPRFLRRQIADVVGAMLQVAEATQLEDGTRHLAVEFVITLAEARERAPGMMRRLPQFVGRLFAVLMQMLLDVEDDPAWHSAETEDEDAGEGNNYGVAQECLDRLSIAIGGNAIVPIASELLPQYLSSAEWQKHHAALITLAQIAEGCAKVMLKNLEQVVSMILNGFQHPHPRVRWAAINAIGQLSTDLGPDLQVHYHQQVLPALANAMDDFQNPRVQAHAASAILNFSENCTPEILTPYLDGIVNKLLVLLQNGKQMVQEGALTALASVADSSQDHFKKYYDAVMPYLKSILMHATDKSNRMLRAKSMECISLVGMAVGKDKFRDDARQVMEVLMALQGAPMETDDPITSYMLQAWARLCKCLGQDFLPYMSVVMPPLLQSAQLKPDVTVTSAESDDDIASDDDSIETITLGDKRIGIRTSVLEEKATACNMLCCYADELKEGFFPWIDQVAPTLVPLLKFYFHEEVRRAAVAAMPELLRSAKLAVEKGQAQGRDESYVKQLSDYIIAALVEALHKEPETEMCSSMLDSLNELPPGKENARREQKRKILMLMKESYSKKRMNRRRKYLIRSVSA

SEQ ID NO: 190904 - protein, 88 aa, Zea Mays
MAGSVAIVGVNARCPAELRQDGVCNNACPVFKKDEYCCVGSAANDCHPTNYSRYFKGQCPDAYSYPKDDATSTFTCPAGTNYKVVFCP

SEQ ID NO: 190905 - protein, 81 aa, Zea Mays
MAGSVAIVGIFVALLAVAGEAAVFTKDEYCCVGSAANDCHPTNYSRYFKGQCPDAYSYPKDDATSTFTCPAGTNYKVVFCP

SEQ ID NO: 190906 - protein, 471 aa, Zea Mays
MEFTESFKQTGPCSFSPDSRFLAIAVDYRLVVRDVLSLKVVVQLFSCVDKISSVEWAPDSEYILCGLYKRPMVQAWSLSQPDWTCKIDEGPAGIAYARWSPDSRHILTTSEFQLRLTVWSLVNTACVHVQWPKHGSKGVSFTKDGKFAAICTRRDCKDYINLLSCHSWEIMTVFAIDTVDLAGVEWSPYDSAIVVWDSLLEYKVLIYSPDGRCLFKYLAYESGLGVKTVAWSPCGQFLAVGSYDQAVRTLNHLTWKTFAEFSHAGYIRSPCNAAIYKEVDDPWQLDMSELCLSEGLSRNMPDNGAENGTEGGGSRVKYAVMDVPITLPSLKPAFDKPNPKQGIGMLSWSSDSHYFFTRNDNMPTVLWIWDICRLELAAVLVQKDPIRAAAWDPTCTRLVLCTESPHLYMWTPSGACCVNIPFLNFRIVDLKWSSNGSCLLLKERESFCCATIISALPEEEPDHSDDTSEDE

SEQ ID NO: 190907 - protein, 435 aa, Zea Mays
MEFTESFKQTGPCSFSPDSRFLAIAVDYRLVVRDVLSLKVVQLFSCVDKISSVEWAPDSEYILCGLYKRPMVQAWSLSQPDWTCKIDEACVHVQWPKHGSKGVSFTKDGKFAAICTRRDCKDYINLLSCHSWEIMTVFAIDTVDLAGVEWSPYDSAIVVWDSLLEYKVLIYSPDGRCLFKYLAYESGLGVKTVAWSPCGQFLAVGSYDQAVRTLNHLTWKTFAEFSHAGYIRSPCNAAIYKEVDDPWQLDMSELCLSEGLSRNMPDNGAENGTEGGGSRVKYAVMDVPITLPSLKPAFDKPNPKQGIGMLSWSSDSHYFFTRNDNMPTVLWIWDICRLELAAVLVQKDPIRAAAWDPTCTRLVLCTESPHLYMWTPSGACCVNIPFLNFRIVDLKWSSNGSCLLLKERESFCCATIISALPEEEPDHSDDTSEDE

SEQ ID NO: 190908 - protein, 88 aa, Zea Mays
MPRINQSPMPRGVVSWPSKLTLRSPSPLPRSPRPTLSVSVHRRSRPPLEDHRKADSVVEDPNLFEEDQRDTFEQEGEDEDFDRDYDEL

SEQ ID NO: 190909 - protein, 76 aa, Zea Mays
MFQQVAQEINSEAKFQNDFLHELQMTLAKAQAGVKNNMRRLNKSIIQQGSNHVLYVVLFALFCFFIVYLLSKFSRR

SEQ ID NO: 190910 - protein, 231 aa, Zea Mays
MLSPCSSSQLLSAPSSSFPSPVPSYHASPASSSFPSPTRLDHSSGGSSTHNPAAAAAAAAASLLPFLRGLPNLPPLRVSSSAPVTPPLSSPTAAAASRPPTKVRRPNWDAAAAVVAADPFRHPLFAVSAPASPTRARRREHPDTIPECDESDVCSAVDSARWISFQATTAPASPTYNLVHPASDSMELDGTTAAVEEFEFDKGRVVTPWEGERIHEVAAEELELTLGVGAK

SEQ ID NO: 190911 - protein, 179 aa, Zea Mays
MQVNGKKTIGSFQKKYNIGSFELLSKTAPIQAISLIILGPFVDYYLNGRSLLNYPFSGGATFFILLSCSLAVFCNMSQYLCIGRFSATSFQVLGHMKTVCVLILGWILFDSALTVKNILGMLLAVMGMVVYSWAMEAEKKVAAPVPRIKSEMLDGEDVPLKARVSGVPAVDLEDGEMKS

SEQ ID NO: 190912 - protein, 243 aa, Zea Mays
MEAEKKAPAVSDVGAWAMNVVSSVSLIMANKQLMSSSGYAFAFATTLTGFHFTVTALVGWISNATGYSVSKHVPLWELVWFSLVANTSITGMNLSLMLNSVGFYQISKLSMIPVVCLMEWVLNSKHYTTKVISAVVVVAAGVGICTVTDVEVNAKGFICACVAVFCTSLQQITIGSFQKKYNIGSFELLSKTAPIQAISLIILGPFVDYYLNGRSLLNYPFSGGATVSYPSHNSRFLRALLSL

SEQ ID NO: 190913 - protein, 381 aa, Zea Mays
MTRLVSVYHSCSRVARPRCALVVAAASLPASIRRRLVLVTTPRGREVFHRLPAYPSPCPLTFPAPPAPHPVRKPPSLPVLPSLPRRQRNTPPCFIITQRPLPHEATETGRVQQPATSPSEPCCPPLRVRVRLCAAGRREGEAAAGRHGGREEGAGGVRRGRVGDERRQLRQPHHGQQAAHVLLRLRLRLRHHADRVPLHGHGARRVDLQRHRLLRLQARPALGARLVLSRRQHLHHRDEPQPHAQLRRLLPDLQTEHDSGGLPHGMGAEQQALHHQGHLGGGCRGRRCRDLHRHGCRGQCQGVHLRLRGSVLHVASTDCELFSFFHQSSCYSPFFWYCVFHYDDMENSSFDSHNAILQFATRFGYVTLNLSCQPYVNRFGQ

SEQ ID NO: 190914 - protein, 134 aa, Zea Mays
MVSEFGDDNFVIENWELKEIISCDGRMKLSSQMFFASIDQRSERAAGETACTSLVAIIADWFQANQNIMPIQSQFDSLIREGSLEWRNLCENETYRKRFPDKHFDLETVLHTKIHPLTVSPSNLLFDLSYYDYG

SEQ ID NO: 190915 - protein, 193 aa, Zea Mays
MQREYLRAVHPRDGAEADGEEGHVGHGRRDGHADGPWDLFVLVVPDDGEPGGEPDQREDHAAHAAQEERPPADSIEQERGHQDEERLGDAHRAGRSQELVVAGDAGGLEHARAVQHHGVDAGRLLEEVDADAREEDATHGRGRGQDELLPHPRLLAVPLLWHGHHVAVELLRDAGGGLDVSEPLRGLLRRGCR

SEQ ID NO: 190916 - protein, 64 aa, Zea Mays
MIILLDLFFLGSLSSLLLDHVSPYVSDVLWLMVFLDTLSPLTVECICCLPSYQISSESSSILSS

SEQ ID NO: 190917 - protein, 136 aa, Zea Mays
MHFDLKPLPVMSLCTCKYHFCDISTSQYGTVSEERFSEERHMHGHVSFVDLETAKRIISESGPHFICGNEVRAKAYREKHELKLIKRLLLINEWHPKKQATVILTGLIKRLLLIISISDSFTLHRCLFLRMWCINY

SEQ ID NO: 190918 - protein, 310 aa, Zea Mays
MDIEECRTRLQDKVRLLHPKNAEGIVDYMIANTPLENIRSYLLTATDNVLMNLFEGANRLQNILNLSEENEPLFGLFTPFDQIGPQKQHQFSSRNHSQVLQAPLYPIGPSGAFQNPYSKLTGFRDHFQSLSILDGDTPSHYKCASINVGGYPSNGKVQTKTCRFYLSIRKCKYGENCHFSLVCGYPEINDMRQVDHLGSLQMLEMEIDLLLLQPSSQVPVDHLEKKFLEIYTKLLEIDGFHTEDQRNRKTGYGLTDLFMQLNATRETERFLLILNISASFTLHYCIDVCCLRCLVFLSLSVKWQIVLFFF

SEQ ID NO: 190919 - protein, 380 aa, Zea Mays
MDIEECRTRLQDKVRLLHPKNAEGIVDYMIANTPLENIRSYLLTATDNVLMNLFEGANRLQNILNLSEENEPLFGLFTPFDQIGPQKQHQFSSRNHSQVLQAPLYPIGPSGAFQNPYSKLTGFRDHFQSLSILDGDTPSHYKCASINVGGYPSNGKVQTKTCRFYLSIRKCKYGENCHFSLVCGYPEINDMRQVDHLGSLQMLEMEIDLLLLQPSSQVPVDHLEKKFLEIYTKLLEIDGFHTEDQRNRKTGYGLTDLFMQLNATRETERRGRYYVVLVKDAPKYVTHGFQPAVPLAGSDFNKICVTFKSESIFTHTDVQNYFSQYGTVSEERFSEERHMHGHVSFVDLETAKRIISESGPHFICGNEVRAKAYREKHELK

SEQ ID NO: 190920 - protein, 433 aa, Zea Mays
MDIEECRTRLQDKVRLLHPKNAEGIVDYMIANTPLENIRSYLLTATDNVLMNLFEGANRLQNILNLSEENEPLFGLFTPFDQIGPQKQHQFSSRNHSQVLQAPLYPIGPSGAFQNPYSKLTGFRDHFQSLSILDGDTPSHYKCASINVGGYPSNGKVQTKTCRFYLSIRKCKYGENCHFSLVCGYPEINDMRQVDHLGSLQMLEMEIDLLLLQPSSQVPVDHLEKKFLEIYTKLLEIDGFHTEDQRNRKTGYGLTDLFMQLNATRETERRGRYYVVLVKDAPKYVTHGFQPAVPLAGSDFNKICVTFKSESIFTHTDVQNYFSQYGTVSEERFSEERHMHGHVSFVDLETAKRIISESGPHFICGNEVRAKAYREKHELKLIKRLLLINEWHPKKQATVILTGLIKRLLLIISISDSFTLHRCLFLRMWCINY

SEQ ID NO: 190921 - protein, 495 aa, Zea Mays
MDIEECRTRLQDKVRLLHPKNAEGIVDYMIANTPLENIRSYLLTATDNVLMNLFEGANRLQNILNLSEENEPLFGLFTPFDQIGPQKQHQFSSRNHSQVLQAPLYPIGPSGAFQNPYSKLTGFRDHFQSLSILDGDTPSHYKCASINVGGYPSNGKVQTKTCRFYLSIRKCKYGENCHFSLVCGYPEINDMRQVDHLGSLQMLEMEIDLLLLQPSSQVPVDHLEKKFLEIYTKLLEIDGFHTEDQRNRKTGYGLTDLFMQLNATRETERRGRYYVVLVKDAPKYVTHGFQPAVPLAGSDFNKICVTFKSESIFTHTDVQNYFSQYGTVSEERFSEERHMHGHVSFVDLETAKRIISESGPHFICGNEVRAKAYREKHELNFRQGRHNVVPVEDAPKYMTGGFVLEMPPASSASNKIFITFNCIHIFTHTSVQKYFSQYGTVNEVIIPIMQKRPDFGFVSFLDSESVKQILSERGPHFICGNEVHVKAYREKHELE

SEQ ID NO: 190922 - protein, 527 aa, Zea Mays
MDIEECRTRLQDKVRLLHPKNAEGIVDYMIANTPLENIRSYLLTATDNVLMNLFEGANRLQNILNLSEENEPLFGLFTPFDQIGPQKQHQFSSRNHSQVLQAPLYPIGPSGAFQNPYSKLTGFRDHFQSLSILDGDTPSHYKCASINVGGYPSNGKVQTKTCRFYLSIRKCKYGENCHFSLVCGYPEINDMRQVDHLGSLQMLEMEIDLLLLQPSSQVPVDHLEKKFLEIYTKLLEIDGFHTEDQRNRKTGYGLTDLFMQLNATRETERRGRYYVVLVKDAPKYVTHGFQPAVPLAGSDFNKICVTFKSESIFTHTDVQNYFSQYGTVSEERFSEERHMHGHVSFVDLETAKRIISESGPHFICGNEVRAKAYREKHELNFRQGRHNVVPVEDAPKYMTGGFVLEMPPASSASNKIFITFNCIHIFTHTSVQKYFSQYGTVNEVIIPIMQKRPDFGFVSFLDSESVKQILSERGPHFICGNEVHVKAYREKHELECGRFAILPPLAVDFANLLSDTQIIDTYRTHKS

SEQ ID NO: 190923 - protein, 466 aa, Zea Mays
MQNHGSNHASPSSNLMTENKPLCSRESSHTANVSSAPNQPVSIVCPSDNMPAEVGTSEMHLINSSENAAQETQTENVAEKSAEDGYNWRKYGQKHVKGSENPRSYYKCTHPNCEVKKLLERSLDGQITEVVYKGHHNHPKPQPNRRLAAGAVPSSQAEERYDGVAPIEDKPSNIYSNLCNQAHSAGMVDNVPGPASDDDVDAGGGRPYPGDDSNDDDDLDSKRRKMESAGIDAALMGKPNREPRVVVQTVSEVDILDDGYRWRKYGQKVVKGNPNPRSYYKCTHTGCPVRKHVERASHDPKSVITTYEGKHNHEVPASRNASHEMSAAPMKPVVHPINSSMPGFGGMMRACDARAFNNQYSQAAESDTISLDLGVGISPNHSDATNQMQPSVPEPMQYQMRHMAPVYGSMGLPGMPVPAIPGNVVASSIYGSREEKGNEGFTFKAAPLDRSANLCYSSAGNLVMGP

SEQ ID NO: 190924 - protein, 524 aa, Zea Mays
MAANMNKSTHPDILPSPRDNSADSGQEDGGSREFEFKPHLNSQSSATAVNNQNHHDIPMQNHGSNHASPSSNLMTENKPLCSRESSHTANVSSAPNQPVSIVCPSDNMPAEVGTSEMHLINSSENAAQETQTENVAEKSAEDGYNWRKYGQKHVKGSENPRSYYKCTHPNCEVKKLLERSLDGQITEVVYKGHHNHPKPQPNRRLAAGAVPSSQAEERYDGVAPIEDKPSNIYSNLCNQAHSAGMVDNVPGPASDDDVDAGGGRPYPGDDSNDDDDLDSKRRKMESAGIDAALMGKPNREPRVVVQTVSEVDILDDGYRWRKYGQKVVKGNPNPRSYYKCTHTGCPVRKHVERASHDPKSVITTYEGKHNHEVPASRNASHEMSAAPMKPVVHPINSSMPGFGGMMRACDARAFNNQYSQAAESDTISLDLGVGISPNHSDATNQMQPSVPEPMQYQMRHMAPVYGSMGLPGMPVPAIPGNVVASSIYGSREEKGNEGFTFKAAPLDRSANLCYSSAGNLVMGP

SEQ ID NO: 190925 - protein, 630 aa, Zea Mays
MCDEGKKQVTHLSRVGSLYMATSVVVARLAGEASQPKVLPSANGVSSESYWRVAATRRWQGRGVRCCAAGFRGGGADADAVIASEDFVGFFREAWPYIRGHRGSTFVVVISSEVVCGPHFYRVLQDISLLHGLGIKFVLVPGTHIQIDKLLSERGKKAKYVGQYRITDEDARKAAMDAAGRIRLTIEAKLSPGPPMLNLRRHGVIGRWHGLVDSIASGNFLGAKRRGVVNGIDYGFTGEVTKIDVSRIRERLDSDSIVVISNMGFSSSGDVLNCNTYEVATACALALEADKLICVVDGQVFDDHGRAIQYMSIEEADLLIRKRARQSDIAASYVKVVDEEGINSLHKGDDRPSLSPKAYINGYAASFRNGLGFNNGNGIYSGEQGFAIGGEERLSRSNADPFKNGLGFNNGNGIYSGEQGFAIGGEERLSRSNGYLSELVAAAYVCHGGVQRVHIIDGCVDGSLLLELFTRDGAGTMIARDVYEGTRMATAEDLPGIRKIIRPLEDSGVLVRRTDAQLLEALESFYVVERDGSIIACAALFPFPEEQSGEVAAIAVSEECRGRGQGDKLLDYVEKMALSLGLKKLFLLTTRTADWFVRRGFSECSIGSIPEQRRKRINLSRGSKYYIKQL

SEQ ID NO: 190926 - protein, 450 aa, Zea Mays
MCDEGKKQVTHLSRVGSLYMATSVVVARLAGEASQPKVLPSANGVSSESYWRVAATRRWQGRGVRCCAAGFRGGGADADAVIASEDFVGFFREAWPYIRGHRGSTFVVVISSEVVCGPHFYRVLQDISLLHGLGIKFVLVPGTHIQIDKLLSERGKKAKYVGQYRITDEDARKAAMDAAGRIRLTIEAKLSPGPPMLNLRRHGVIGRWHGLVDSIASGNFLGAKRRGVVNGIDYGFTGEVTKIDVSRIRERLDSDSIVVISNMGFSSSGDVLNCNTYEVATACALALEADKLICVVDGQVFDDHGRAIQYMSIEEADLLIRKRARQSDIAASYVKVVDEEGINSLHKGDDRPSLSPKAYINGYAASFRNGLGFNNGNGIYSGEQGFAIGGEERLSRSNADPFKNGLGFNNGNGIYSGEQGFAIGGEERLSRSNGYLSELVAAAYVCHGCL

SEQ ID NO: 190927 - protein, 275 aa, Zea Mays
MDAAGRIRLTIEAKLSPGPPMLNLRRHGVIGRWHGLVDSIASGNFLGAKRRGVVNGIDYGFTGEVTKIDVSRIRERLDSDSIVVISNMGFSSSGDVLNCNTYEVATACALALEADKLICVVDGQVFDDHGRAIQYMSIEEADLLIRKRARQSDIAASYVKVVDEEGINSLHKGDDRPSLSPKAYINGYAASFRNGLGFNNGNGIYSGEQGFAIGGEERLSRSNADPFKNGLGFNNGNGIYSGEQGFAIGGEERLSRSNGYLSELVAAAYVCHGCL

SEQ ID NO: 190928 - protein, 140 aa, Zea Mays
MGLCRVVDPVDSSPMGSSVTGMGVFMLASTSICDENGQVLIYSPARTASQQGSGKVGRWKINFLSTQKWENPLMGWTSTGDPYANVGEAGLTFDSAESAKAFAEKHGWNYVVRKRHAPLLRPKAYAENFKWRGPPKAEQA

SEQ ID NO: 190929 - protein, 147 aa, Zea Mays
MAAPLRRSLPSLGRALLTPAPARMLSAEASDALVEIKPGEIGMVSGIPEEHLRRKVLIYSPARTASQQGSGKVGRWENPLMGWTSTGDPYANVGEAGLTFDSAESAKAFAEKHGWNYVVRKRHAPLLRPKAYAENFKWRGPPKAEQA

SEQ ID NO: 190930 - protein, 127 aa, Zea Mays
MHLVSLDAAQASLTLTNLLGAVSNGCVGVGGGGAEPPGEEVIPGLALQPADVAGCSDGGDLPVVLPLDLCRACERPVRVRQRGPVRYHQRHLPADPPRRGSHGVEPRALGLPHHLLVRVVHEPDAVA

SEQ ID NO: 190931 - protein, 321 aa, Zea Mays
MIASVDLDLVIGSDFSGQVLPLPLPAARRTQNPRLPAAAATRHAAMSAAAALRPIEPLPLPTGLSLSPRLKLLLTFFRADLTVRPLDEWQLKSALLAFLRDPPLPLPLLPDSDLSVSRLPDLQKRRREEPVASGVLHVRDLSFLRPRKGDGEAEEMTGEQEKYFEWRSTLVQKLEGIELNLEGVKFRMTVEIPSSDDFRTMKKSWEDFYSSELLNTRNPVRKIAKRPDTIVVRGVPSRWFAETRVSSKPSTLVTHTVFSALGKIRNLNISNDDEIEAKGHGVNKGLISGLNCKVQVQFESYNDFQDAMKALCGRSLEKDHG

SEQ ID NO: 190932 - protein, 379 aa, Zea Mays
MIASVDLDLVIGSDFSGQVLPLPLPAARRTQNPRLPAAAATRHAAMSAAAALRPIEPLPLPTGLSLSPRLKLLLTFFRADLTVRPLDEWQLKSALLAFLRDPPLPLPLLPDSDLSVSRLPDLQKRRREEPVASGVLHVRDLSFLRPRKGDGEAEEMTGEQEKYFEWRSTLVQKLEGIELNLEGVKFRMTVEIPSSDDFRTMKKSWEDFYSSELLNTRNPVRKIAKRPDTIVVRGVPSRWFAETRVSSKPSTLVTHTVFSALGKIRNLNISNDDEIEAKGHGVNKGLISGLNCKVQVQFESYNDFQDAMKALCGRSLEKEGSRLKVDYDVTWDCEGFFRISQYEPVRNNLEERDSLASVNSQRKHHTSRIESDYRKRFRE

SEQ ID NO: 190933 - protein, 98 aa, Zea Mays
MLIDQSQWRLSSDFRVMNDFRNEHRDGSAYTCRALTIYRLQPCRWKILETKTNSLSGLDKLFSVSLYGEDQIFSDSSQRLRSRVTIQGKGCASLPVIG

SEQ ID NO: 190934 - protein, 279 aa, Zea Mays
MIASVDLDLVIGSDFSGQVLPLPLPAARRTQNPRLPAAAATRHAAMSAAAALRPIEPLPLPTGLSLSPRLKLLLTFFRADLTVRPLDEWQLKSALLAFLRDPPLPLPLLPDSDLSVSRLPDLQKRRREEPVASGVLHVRDLSFLRPRKGDGEAEEMTGEQEKYFEWRSTLVQKLEGIELNLEGVKFRMTVEIPSSDDFRTMKKSWEDFYSSELLNTRNPVRKIAKRPDTIVVRGVPSRWFAETRVSSKPSTLVTHTVFSALGKIRSKRTWSQQGAHIWT

SEQ ID NO: 190935 - protein, 265 aa, Zea Mays
MIASVDLDLVIGSDFSGQVLPLPLPAARRTQNPRLPAAAATRHAAMSAAAALRPIEPLPLPTGLSLSPRLKLLLTFFRADLTVRPLDEWQLKSALLAFLRDPPLPLPLLPDSDLSVSRLPDLQKRRREEPVASGVLHVRDLSFLRPRKGDGEAEEMTGEQEKYFEWRSTLVQKLEGIELNLEGVKFRMTVEIPSSDDFRTMKKSWEDFYSSELLNTRNPVRKIAKRPDTIVVRGVPSRWFAETRVSSKPSTLVTHTVFSALGKIR

SEQ ID NO: 190936 - protein, 411 aa, Zea Mays
MGDNRRRGEVGCREYGSSSVEPCGQGMQLGEADGSRGGFSDRTSREGRWRLRLQGGLVKLLKSCDYRTLAIGDGGNDVRMIQQADIGVGISGREGLQAARAADYSIGKFRFLKRLILVHGRYSYNRTAFLSHFSFLSGIAGTSLFNSVSLMAYNVFYTSIPVLTTVLDKDLSEKTVMQNPEILLYCQAGRLLNPSTFAGWFGRSLYHAIIIFLITIHAYANEKSEMEELSMVALSGSIWLQAFVVTLEMNSFTSVQLLAIWGNLIAFYVLNFFISSIPTSGMYTIMFGLCRQPSYWITLVLISGVGMGPVLALKYFRYTYRPSVINILQKAERSRGPMYTLLNLESQLRSDKDSMMVAGSTAPAKNKSSVYEPLLSDSPMASRRSLAPASSFDIFQPAHSRTSHPRNIKAN

SEQ ID NO: 190937 - protein, 487 aa, Zea Mays
MSRGVPEPKLTAMDAMIDKLTGAIFLFQLTVVVVLGAAGNIWKDMEARKQWYVKYDDNEPWYQILVIPLRFELLCSIMIPISIKVSLDFVKSLYAKFIDWDDDIYDLENDTPARAANTAISEDLGQVEYILTDKTGTLTENKMIFRRCCIGGTFYGNESGDALRDVELLNAVANNSPNVIKFLTVMTLCNTVIPIKSPTGPILYKAQSQDEDALVNAAANLHMVLVSKNGSNAEIHFNRRVMQYEILDILEFTSDRKRMSIVILDCQSGKFFLLSKGADEAMLPCAYSGQKTKTFVDAVDKYAQLGLRTLCLGWRELEPEEYTKWSQSFKEANSSLNDREWKVAEVCQKLEHSLEILGVSAIEDRLQDGVPETIEILRQSGINFWMLTGDKQSTAIQIALLCNLISSEPKGQLLHINGKTQDEVARSLERVLLTMRITSSEPKELAFVVDGWALEIILSRYTEAFTELAVLSKTALCCRVTPSQKAQ

SEQ ID NO: 190938 - protein, 426 aa, Zea Mays
MSRGVPEPKLTAMDAMIDKLTGAIFLFQLTVVVVLGAAGNIWKDMEARKQWYVKYDDNEPWYQILVIPLRFELLCSIMIPISIKVSLDFVKSLYAKFIDWDDDIYDLENDTPARAANTAISEDLGQVEYILTDKTGTLTENKMIFRRCCIGGTFYGNESGDALRDVELLNAVANNSPNVIKFLTVMTLCNTVIPIKSPTGPILYKAQSQDEDALVNAAANLHMVLVSKNGSNAEIHFNRRVMQYEILDILEFTSDRKRMSIVILDCQSGKFFLLSKGADEAMLPCAYSGQKTKTFVDAVDKYAQLGLRTLCLGWRELEPEEYTKWSQSFKEANSSLNDREWKVAEVCQKLEHSLEILGVSAIEDRLQDGVPETIEILRQSGINFWMLTGDKQSTAIQIALLCNLISSGAGFCSGWLGTRDYSITLY

SEQ ID NO: 190939 - protein, 842 aa, Zea Mays
MSRGVPEPKLTAMDAMIDKLTGAIFLFQLTVVVVLGAAGNIWKDMEARKQWYVKYDDNEPWYQILVIPLRFELLCSIMIPISIKVSLDFVKSLYAKFIDWDDDIYDLENDTPARAANTAISEDLGQVEYILTDKTGTLTENKMIFRRCCIGGTFYGNESGDALRDVELLNAVANNSPNVIKFLTVMTLCNTVIPIKSPTGPILYKAQSQDEDALVNAAANLHMVLVSKNGSNAEIHFNRRVMQYEILDILEFTSDRKRMSIVILDCQSGKFFLLSKGADEAMLPCAYSGQKTKTFVDAVDKYAQLGLRTLCLGWRELEPEEYTKWSQSFKEANSSLNDREWKVAEVCQKLEHSLEILGVSAIEDRLQDGVPETIEILRQSGINFWMLTGDKQSTAIQIALLCNLISSEPKGQLLHINGKTQDEVARSLERVLLTMRITSSEPKELAFVVDGWALEIILSRYTEAFTELAVLSKTALCCRVTPSQKAQLVKLLKSCDYRTLAIGDGGNDVRMIQQADIGVGISGREGLQAARAADYSIGKFRFLKRLILVHGRYSYNRTAFLSHFSFLSGIAGTSLFNSVSLMAYNVFYTSIPVLTTVLDKDLSEKTVMQNPEILLYCQAGRLLNPSTFAGWFGRSLYHAIIIFLITIHAYANEKSEMEELSMVALSGSIWLQAFVVTLEMNSFTSVQLLAIWGNLIAFYVLNFFISSIPTSGMYTIMFGLCRQPSYWITLVLISGVGMGPVLALKYFRYTYRPSVINILQKAERSRGPMYTLLNLESQLRSDKDSMMVAGSTAPAKNKSSVYEPLLSDSPMASRRSLAPASSFDIFQPAHSRTSHPRNIKAN

SEQ ID NO: 190940 - protein, 1040 aa, Zea Mays
MGTVQALHESIFLVDSLSATMVTYHSCKSYKQANDKEVWIVKNGARKHIQAQDIRVGNIVWIRENEEVPCDLVLLGTSEPQGICHVETAALDGEIDLKTRASPPPCVGLEFEQLHKIKGVIECPIPDKDIRRFDANIRLFPPFIDNDICPLTINNTLLQSCYLRNTEWACGVAVYTGNETKLGMSRGVPEPKLTAMDAMIDKLTGAIFLFQLTVVVVLGAAGNIWKDMEARKQWYVKYDDNEPWYQILVIPLRFELLCSIMIPISIKVSLDFVKSLYAKFIDWDDDIYDLENDTPARAANTAISEDLGQVEYILTDKTGTLTENKMIFRRCCIGGTFYGNESGDALRDVELLNAVANNSPNVIKFLTVMTLCNTVIPIKSPTGPILYKAQSQDEDALVNAAANLHMVLVSKNGSNAEIHFNRRVMQYEILDILEFTSDRKRMSIVILDCQSGKFFLLSKGADEAMLPCAYSGQKTKTFVDAVDKYAQLGLRTLCLGWRELEPEEYTKWSQSFKEANSSLNDREWKVAEVCQKLEHSLEILGVSAIEDRLQDGVPETIEILRQSGINFWMLTGDKQSTAIQIALLCNLISSEPKGQLLHINGKTQDEVARSLERVLLTMRITSSEPKELAFVVDGWALEIILSRYTEAFTELAVLSKTALCCRVTPSQKAQLVKLLKSCDYRTLAIGDGGNDVRMIQQADIGVGISGREGLQAARAADYSIGKFRFLKRLILVHGRYSYNRTAFLSQYSFYKSLLICFIQILFSFLSGIAGTSLFNSVSLMAYNVFYTSIPVLTTVLDKDLSEKTVMQNPEILLYCQAGRLLNPSTFAGWFGRSLYHAIIIFLITIHAYANEKSEMEELSMVALSGSIWLQAFVVTLEMNSFTSVQLLAIWGNLIAFYVLNFFISSIPTSGMYTIMFGLCRQPSYWITLVLISGVGMGPVLALKYFRYTYRPSVINILQKAERSRGPMYTLLNLESQLRSDKDSMMVAGSTAPAKNKSSVYEPLLSDSPMASRRSLAPASSFDIFQPAHSRTSHPRNIKAN

SEQ ID NO: 190941 - protein, 734 aa, Zea Mays
MKRFVYINDESYQNDYCDNRVSNTKYTLLNFVPKNLWEQFRRFMNQYFLLIACLQLWSLITPVNPASTWGPLIFIFAVSATKEAWDDYNRYISDKQANDKEVWIVKNGARKHIQAQDIRVGNIVWIRENEEVPCDLVLLGTSEPQGICHVETAALDGEIDLKTRASPPPCVGLEFEQLHKIKGVIECPIPDKDIRRFDANIRLFPPFIDNDICPLTINNTLLQSCYLRNTEWACGVAVYTGNETKLGMSRGVPEPKLTAMDAMIDKLTGAIFLFQLTVVVVLGAAGNIWKDMEARKQWYVKYDDNEPWYQILVIPLRFELLCSIMIPISIKVSLDFVKSLYAKFIDWDDDIYDLENDTPARAANTAISEDLGQVEYILTDKTGTLTENKMIFRRCCIGGTFYGNESGDALRDVELLNAVANNSPNVIKFLTVMTLCNTVIPIKSPTGPILYKAQSQDEDALVNAAANLHMVLVSKNGSNAEIHFNRRVMQYEILDILEFTSDRKRMSIVILDCQSGKFFLLSKGADEAMLPCAYSGQKTKTFVDAVDKYAQLGLRTLCLGWRELEPEEYTKWSQSFKEANSSLNDREWKVAEVCQKLEHSLEILGVSAIEDRLQDGVPETIEILRQSGINFWMLTGDKQSTAIQIALLCNLISSEPKGQLLHINGKTQDEVARSLERVLLTMRITSSEPKELAFVVDGWALEIILSRYTEAFTELAVLSKTALCCRVTPSQKAQ

SEQ ID NO: 190942 - protein, 295 aa, Zea Mays
MRARSAHDHDLMYTVVDHYLENHKGKLTEEDKSRLCYNVNCTKLSQHLFMHLVQNPRLPLRFVVQAMLVEQLHSHHTMLLTHHHQAAALAPTRSAAPLLKPTPSGVFSGGVAGEDASMTLGDILQRDAALHQSAHIRASMQATSLRIETLERELAGLRTRLRRSEQQQAETEAAAAAATGASSTDCAPGKSASFRIPRSRLWEGEELAPVGLRRAAARDSSARGFKSRLVHGFKNLFGRRQAATGAPSATGEDSSTRCFGDKGAAAATPELESDDDEVVSMEERRRPHRRNHSLV

SEQ ID NO: 190943 - protein, 562 aa, Zea Mays
MEMSIGWQELGVVDTIYEDDHEEEEEDDDDHEGQEEERFDSPTGTMSSSPPTSRSSSPEVEDAAAVAEAHPSSLPPALRRAVQAWCRENGSRKPDVVVRVQEHRLPLHRDVITSRSSYLRRLLSESSDVAITLPAGLTFDAFVQAIATCYVVPDDAAAAALSPASLAAAWVAGAWLELGAGPGPGRDPCGLTHAAEDYFHEVATDHGRAAGVLRCCAAFLGGEAAGPAADLLARCVEVLAASDSGSGRWLDDVAALPVEEFLVVVEAMRARSAHDHDLMYTVVDHYLENHKGKLTEEDKSRLCYNVNCTKLSQHLFMHLVQNPRLPLRFVVQAMLVEQLHSHHTMLLTHHHQAAALAPTRSAAPLLKPTPSGVFSGGVAGEDASMTLGDILQRDAALHQSAHIRASMQATSLRIETLERELAGLRTRLRRSEQQQAETEAAAAAATGASSTDCAPGKSASFRIPRSRLWEGEELAPVGLRRAAARDSSARGFKSRLVHGFKNLFGRRQAATGAPSATGEDSSTRCFGDKGAAAATPELESDDDEVVSMEERRRPHRRNHSLV

SEQ ID NO: 190944 - protein, 230 aa, Zea Mays
MAPGSKAERKAALDAGAWMFNVVTSVGIIMVNKALMATHGFSFATTLTGLHFAMTTLMTLVMKWLGYIQPSYLPLPELVKFAFFANLSIVGMNVSLMWNSVGFYQIAKLCIIPVLCILEIMFDKVRYSRDTKLSIVLVLVGVAVCTVTDVSVNSQGLLAAVIAVWSTALQQHYVHHLQWKYSLGSFNLLGHTAPAQAASLLVLGPFVDFWLTNKRVDAFNYTSIVTNCRP

SEQ ID NO: 190945 - protein, 54 aa, Zea Mays
MSNATAMGIIYRLTQHHVQLPENLGNYQLLEWNVQPLSRRPVDSVVPEQELQPL

SEQ ID NO: 190946 - protein, 69 aa, Zea Mays
MFFFSRTRRRTAPHYILSRGIEKTEQNKKGLQSSLRRPETGIQIKIHKGIKKSNYSNLPKALPRVQPDV

SEQ ID NO: 190947 - protein, 53 aa, Zea Mays
MLILVVFSDLTTFRVLAIASLLTLIVAFMAYINSHLATHLFPKASRPRSHLSS

SEQ ID NO: 190948 - protein, 141 aa, Zea Mays
MVTRTPAGARSGRGGGKEAARLVYRQPAVGRVTLAHKNLRLCSCAHSSSSRYTVAIVLRRCRSVTSAEHSFVPSALSRIISVCCSKFRDFCSDLLSASHMRTFLFLCFVSHPATYLPDETEVYYHGVKLLVGPIRNDGDQC

SEQ ID NO: 190949 - protein, 54 aa, Zea Mays
MSGFQMTSSKCRCHLFLAKAYVPLALDKLLSWIRRLLLTVRIGLLAGETTETIF

SEQ ID NO: 190950 - protein, 123 aa, Zea Mays
MVYLSSVLSSDRLQQTSVSCPAHSLSDFIRKKYQVLGGLKQLLSRHGRLALFNNKALAQPSQTAPPVHHMSGFQMTSSKCRCHLFLAKAYVPLALDKLLSWIRRLLLTVRIGLLAGETTETIF

SEQ ID NO: 190951 - protein, 140 aa, Zea Mays
MPAATSVSLAVADAVWAEIRSAGRASDEHLSILETLFGKNMLRACKIVDERGVRRVTGAPSGRSVFLVMGESKRKEEYLCFPEHLCTCYSFFYDVVGRGEQLSCKHQLAARLAEAVGEHQEVEVKDEELANMLARTLGII

SEQ ID NO: 190952 - protein, 86 aa, Zea Mays
MSIAAMAAVQGRPVGLIERSQCSHGDRGGGSDGGEEEGVAEVVVLEVAEQRRRSVELAVATTTKAAVVAQTPCRRQKNTSIRMKTL

SEQ ID NO: 190953 - protein, 905 aa, Zea Mays
MEGDDFTPEGGKLPEFKLDARQAQGFISFFKKLPQDPRAVRLFDRRDYYTAHGENATFIARTYYHTMSALRQLGSSSDGILSASVSKAMFETIARNILLERTDCTLELYEGSGSNWRLTKSGTPGNIGSFEDILFANNDMEDSPVIVALFPACRESQLYVGLSFLDMTNRKLGLAEFPEDSRFTNVESALVALGCKECLLPADCEKSIDLNPLQDVISNCNVLLTEKKKADFKSRDLAQDLGRIIRGSVEPVRDLLSQFDYALGPLGALLSYAELLADDTNYGNYTIEKYNLNCYMRLDSAAVRALNIAEGKTDVNKNFSLFGLMNRTCTVGMGKRLLNRWLKQPLLDVNEINNRLDMVQAFVEDPELRQGLRQQLKRISDIDRLTHSLRKKSANLQPVVKLYQSCSRIPYIKGILQQYNGQFSTLIRSKFLEPLEEWMAKNRFGRFSSLVETAIDLAQLENGEYRISPLYSSDLGVLKDELSVVENHINNLHVDTASDLDLSVDKQLKLEKGSLGHVFRMSKKEEQKVRKKLTGSYLIIETRKDGVKFTNSKLKNLSDQYQALFGEYTSCQKKVVGDVVRVSGTFSEVFENFAAVLSELDVLQSFADLATSCPVPYVRPDITASDEGDIVLLGSRHPCLEAQDGVNFIPNDCTLVRGKSWFQIITGPNMGGKSTFIRQLHGVSTFMQEMLETASILKGASDKSLIIIDELGRGTSTYDGFGLAWAICEHLMEVTRAPTLFATHFHELTALAHRNDDEHQHISDIGVANYHVGAHIDPLSRKLTMLYKVEPGACDQSFGIHVAEFANFPEAVVALAKSKAAELEDFSTTPTFSDDLKDEVGSKRKRVFSPDDITRGAARARLFLEEFAALPMDEMDGSKILEMATKMKADLQKDAADNPWLQQFF

SEQ ID NO: 190954 - protein, 692 aa, Zea Mays
MEGDDFTPEGGKLPEFKLDARQAQGFISFFKKLPQDPRAVRLFDRRDYYTAHGENATFIARTYYHTMSALRQLGSSSDGILSASVSKAMFETIARNILLERTDCTLELYEGSGSNWRLTKSGTPGNIGSFEDILFANNDMEDSPVIVALFPACRESQLYVGLSFLDMTNRKLGLAEFPEDSRFTNVESALVALGCKECLLPADCEKSIDLNPLQDVISNCNVLLTEKKKADFKSRDLAQDLGRIIRGSVEPVRDLLSQFDYALGPLGALLSYAELLADDTNYGNYTIEKYNLNCYMRLDSAAVRALNIAEGKTDVNKNFSLFGLMNRTCTVGMGKRLLNRWLKQPLLDVNEINNRLDMVQAFVEDPELRQGLRQQLKRISDIDRLTHSLRKKSANLQPVVKLYQSCSRIPYIKGILQQYNGQFSTLIRSKFLEPLEEWMAKNRFGRFSSLVETAIDLAQLENGEYRISPLYSSDLGVLKDELSVVENHINNLHVDTASDLDLSVDKQLKLEKGSLGHVFRMSKKEEQKVRKKLTGSYLIIETRKDGVKFTNSKLKNLSDQYQALFGEYTSCQKKVVGDVVRVSGTFSEVFENFAAVLSELDVLQSFADLATSCPVPYVRPDITASDEGDIVLLGSRHPCLEAQDGVNFIPNDCTLVRGKSWFQIITGPNMGGKSTFIRQLVSINFHMRIRLV

SEQ ID NO: 190955 - protein, 712 aa, Zea Mays
MEGDDFTPEGGKLPEFKLDARQAQGFISFFKKLPQDPRAVRLFDRRDYYTAHGENATFIARTYYHTMSALRQLGSSSDGILSASVSKAMFETIARNILLERTDCTLELYEGSGSNWRLTKSGTPGNIGSFEDILFANNDMEDSPVIVALFPACRESQLYVGLSFLDMTNRKLGLAEFPEDSRFTNVESALVALGCKECLLPADCEKSIDLNPLQDVISNCNVLLTEKKKADFKSRDLAQDLGRIIRGSVEPVRDLLSQFDYALGPLGALLSYAELLADDTNYGNYTIEKYNLNCYMRLDSAAVRALNIAEGKTDVNKNFSLFGLMNRTCTVGMGKRLLNRWLKQPLLDVNEINNRLDMVQAFVEDPELRQGLRQQLKRISDIDRLTHSLRKKSANLQPVVKLYQSCSRIPYIKGILQQYNGQFSTLIRSKFLEPLEEWMAKNRFGRFSSLVETAIDLAQLENGEYRISPLYSSDLGVLKDELSVVENHINNLHVDTASDLDLSVDKQLKLEKGSLGHVFRMSKKEEQKVRKKLTGSYLIIETRKDGVKFTNSKLKNLSDQYQALFGEYTSCQKKVVGDVVRVSGTFSEVFENFAAVLSELDVLQSFADLATSCPVPYVRPDITASDEGDIVLLGSRHPCLEAQDGVNFIPNDCTLVRGKSWFQIITGPNMGGKSTFIRQQMIQAPKITMELKDFLACPVTAKLLLLHQLLKE

SEQ ID NO: 190956 - protein, 835 aa, Zea Mays
MNEKGASAPTPTFDNQEGLQQPREVLANGKLSSTNGQENSDVHDIQVVATSVDSEGHKFGSTCQEDMKGVIAQTLVTTVDPSCSDEIECQANEQTKISEYPDLDYTAFGSPRSLSRTNGDTHLRTTKNEGLQNGDIKIITENTISMDNDLVIYEEKTIVVNGNTVQEVKNIVNEKSIAAKIDKPIIESRNSLNNNNGKIQIAKPSDTSNGKLDGCRLESCLEEALPTKKTTVHDRIVVLPATDVGTEIKTKQEGLGDKQDFAPPPPPPPLASRAGPPPPPPPPGARSGPPPPPPPPGARPGAPPPPPPPGSRTGAPPPPPPPGAPPPPPPPGGGGRGPPPPPAPRGHLGGPPPPPPPSGRAPGVPPPPRAPGVPPPPGNNPSLGRGRGAVRPLGSAYGAAASRKSTLKPLHWVKVTRALQGSLWEELQRNDDSQSVSEFDISELESLFPAAVPKSDDSSKSERRKSLGSKPEKVHLIELRRANNTEIMLTKVKMPLSDLVSAALALDQSTLDVDQVENLIKFCPTKEEMELLKNYTGDKQNLGKCEQFFLELMKVPRMESKLRVFSFKIQFGSQVADLRRSLNIIDSSCNEIRTSLKLKEIMKKILLLGNTLNQGTARGAAVGFRLDSLLKLTDTRATNNKMTLMHYLCKVLAARSPQLLNFYVDLVSLDAASKIQLKMLAEEMQAVSKGLEKVHLEYDASERDGPVSEIFREKLKEFTDNAGADVQSLSSLFSEVGKKADALIKYFGEDPVRCPFEQVISTLLTFVTTFRKAHEENLKQAELEKKKAEKEAEAEKAKNAQLTGKNDSKPSNPRRQAKQTLERTRSASRRGRDVG

SEQ ID NO: 190957 - protein, 971 aa, Zea Mays
MFRIMFNTAFVQSNILALNRDDIDVAWNVNNQFPRDFRAEVHFSDPDSFKPAATVEEIADDGDETDVASVDTGEEFYEAEEDWHDARKDQETRSTDGGISLDDVADGGVATEERSSLEKHQFNEGVKIGVSQNLGSMNEKGASAPTPTFDNQEGLQQPREVLANGKLSSTNGQENSDVHDIQVVATSVDSEGHKFGSTCQEDMKGVIAQTLVTTVDPSCSDEIECQANEQTKISEYPDLDYTAFGSPRSLSRTNGDTHLRTTKNEGLQNGDIKIITENTISMDNDLVIYEEKTIVVNGNTVQEVKNIVNEKSIAAKIDKPIIESRNSLNNNNGKIQIAKPSDTSNGKLDGCRLESCLEEALPTKKTTVHDRIVVLPATDVGTEIKTKQEGLGDKQDFAPPPPPPPLASRAGPPPPPPPPGARSGPPPPPPPPGARPGAPPPPPPPGSRTGAPPPPPPPGAPPPPPPPGGGGRGPPPPPAPRGHLGGPPPPPPPSGRAPGVPPPPRAPGVPPPPGNNPSLGRGRGAVRPLGSAYGAAASRKSTLKPLHWVKVTRALQGSLWEELQRNDDSQSVSEFDISELESLFPAAVPKSDDSSKSERRKSLGSKPEKVHLIELRRANNTEIMLTKVKMPLSDLVSAALALDQSTLDVDQVENLIKFCPTKEEMELLKNYTGDKQNLGKCEQFFLELMKVPRMESKLRVFSFKIQFGSQVADLRRSLNIIDSSCNEIRTSLKLKEIMKKILLLGNTLNQGTARGAAVGFRLDSLLKLTDTRATNNKMTLMHYLCKVLAARSPQLLNFYVDLVSLDAASKIQLKMLAEEMQAVSKGLEKVHLEYDASERDGPVSEIFREKLKEFTDNAGADVQSLSSLFSEVGKKADALIKYFGEDPVRCPFEQVISTLLTFVTTFRKAHEENLKQAELEKKKAEKEAEAEKAKNAQLTGKNDSKPSNPRRQAKQTLERTRSASRRGRDVG

SEQ ID NO: 190958 - protein, 853 aa, Zea Mays
MALFRKFFLKKTPDRLLEISDRVYGIMLALPVDLVRAVFDCCFSTDSMGEDEYRDYLSGIVAQLQEFFPDASFMVSNFWSGDKRSRISDILSEYDMTVMDYPQQYEGCPLLQLEMIHHFLKSCENWLSVEGQHNMLLMHCERGGWPVLAFMLAGLLLYRKTYTGEQKTLEMVYKQARRDFIQQFFPLNPQPSHLRYLHYITRQGGGSEWPPISRPLILDSVVLHVVPRFDVDGGCRPYLRVHGQDSSPGNKSAKVLYEMPKTSKHLPHYGQAEVPIKLSVFCRVYGDVVLEFIHIGDNIEHKETMFRIMFNTAFVQSNILALNRDDIDVAWNVNNQFPRDFRAEVHFSDPDSFKPAATVEEIADDGDETDVASVDTGEEFYEAEEDWHDARKDQETRSTDGGISLDDVADGGVATEERSSLEKHQFNEGVKIGVSQNLGSMNEKGASAPTPTFDNQEGLQQPREVLANGKLSSTNGQENSDVHDIQVVATSVDSEGHKFGSTCQEDMKGVIAQTLVTTVDPSCSDEIECQANEQTKISEYPDLDYTAFGSPRSLSRTNGDTHLRTTKNEGLQNGDIKIITENTISMDNDLVIYEEKTIVVNGNTVQEVKNIVNEKSIAAKIDKPIIESRNSLNNNNGKIQIAKPSDTSNGKLDGCRLESCLEEALPTKKTTVHDRIVVLPATDVGTEIKTKQEGLGDKQDFGIVLPQSRTVARARSPRLESDDRGQIPDKAVSSVLKKMAVGNAKMEEQPKLAKPKTIRRWISPKKESDATSVHRPSHPPSRYDSSPAALAIRSMPTDVKISAVNDAPLLSLKQPYGCNFTREVTSALSASSPPQQSLLPGAQIASRNQCFRV

SEQ ID NO: 190959 - protein, 868 aa, Zea Mays
MALFRKFFLKKTPDRLLEISDRVYVFDCCFSTDSMGEDEYRDYLSGIVAQLQEFFPDASFMVSNFWSGDKRSRISDILSEYDMTVMDYPQQYEGCPLLQLEMIHHFLKSCENWLSVEGQHNMLLMHCERGGWPVLAFMLAGLLLYRKTYTGEQKTLEMVYKQARRDFIQQFFPLNPQPSHLRYLHYITRQGGGSEWPPISRPLILDSVVLHVVPRFDVDGGCRPYLRVHGQDSSPGNKSAKVLYEMPKTSKHLPHYGQAEVPIKLSVFCRVYGDVVLEFIHIGDNIEHKETMFRIMFNTAFVQSNILALNRDDIDVAWNVNNQFPRDFRAEVHFSDPDSFKPAATVEEIADDGDETDVASVDTGEEFYEAEEDWHDARKDQETRSTDGGISLDDVADGGVATEERSSLEKHQFNEGVKIGVSQNLGSMNEKGASAPTPTFDNQEGLQQPREVLANGKLSSTNGQENSDVHDIQVVATSVDSEGHKFGSTCQEDMKGVIAQTLVTTVDPSCSDEIECQANEQTKISEYPDLDYTAFGSPRSLSRTNGDTHLRTTKNEGLQNGDIKIITENTISMDNDLVIYEEKTIVVNGNTVQEVKNIVNEKSIAAKIDKPIIESRNSLNNNNGKIQIAKPSDTSNGKLDGCRLESCLEEALPTKKTTVHDRIVVLPATDVGTEIKTKQEGLGDKQDFGIVLPQSRTVARARSPRLESDDRGQIPDKAVSSVLKKMAVGNAKMEEQPKLAKPKTIRRWISPKKESDATSVHRPSHPPSRYDSSPAALAIRSMPTDVKISAVNDAPLLSLKQPYGCNFTREVTSALSASSPPQQSLLPVFQSLIYQNLRAFFLQLFRSPMTAQNLNVENHLDQNQKKCT

SEQ ID NO: 190960 - protein, 1245 aa, Zea Mays
MALFRKFFLKKTPDRLLEISDRVYGIMLALPVDLVRAVFDCCFSTDSMGEDEYRDYLSGIVAQLQEFFPDASFMVSNFWSGDKRSRISDILSEYDMTVMDYPQQYEGCPLLQLEMIHHFLKSCENWLSVEGQHNMLLMHCERGGWPVLAFMLAGLLLYRKTYTGEQKTLEMVYKQARRDFIQQFFPLNPQPSHLRYLHYITRQGGGSEWPPISRPLILDSVVLHVVPRFDVDGGCRPYLRVHGQDSSPGNKSAKVLYEMPKTSKHLPHYGQAEVPIKLSVFCRVYGDVVLEFIHIGDNIEHKETMFRIMFNTAFVQSNILALNRDDIDVAWNVNNQFPRDFRAEVHFSDPDSFKPAATVEEIADDGDETDVASVDTGEEFYEAEEDWHDARKDQETRSTDGGISLDDVADGGVATEERSSLEKHQFNEGVKIGVSQNLGSMNEKGASAPTPTFDNQEGLQQPREVLANGKLSSTNGQENSDVHDIQVVATSVDSEGHKFGSTCQEDMKGVIAQTLVTTVDPSCSDEIECQANEQTKISEYPDLDYTAFGSPRSLSRTNGDTHLRTTKNEGLQNGDIKIITENTISMDNDLVIYEEKTIVVNGNTVQEVKNIVNEKSIAAKIDKPIIESRNSLNNNNGKIQIAKPSDTSNGKLDGCRLESCLEEALPTKKTTVHDRIVVLPATDVGTEIKTKQEGLGDKQDFAPPPPPPPLASRAGPPPPPPPPGAPPPPPPPGAPPPPPPPGGGGRGPPPPPAPRGHLGGPPPPPPPSGRAPGVPPPPRAPGVPPPPGNNPSLGRGRGAVRPLGSAYGAAASRKSTLKPLHWVKVTRALQGSLWEELQRNDDSQSVSEFDISELESLFPAAVPKSDDSSKSERRKSLGSKPEKVHLIELRRANNTEIMLTKVKMPLSDLVSAALALDQSTLDVDQVENLIKFCPTKEEMELLKNYTGDKQNLGKCEQFFLELMKVPRMESKLRVFSFKIQFGSQVADLRRSLNIIDSSCNEIRTSLKLKEIMKKILLLGNTLNQGTARGAAVGFRLDSLLKLTDTRATNNKMTLMHYLCKVLAARSPQLLNFYVDLVSLDAASKIQLKMLAEEMQAVSKGLEKVHLEYDASERDGPVSEIFREKLKEFTDNAGADVQSLSSLFSEVGKKADALIKYFGEDPVRCPFEQVISTLLTFVTTFRKAHEENLKQAELEKKKAEKEAEAEKAKNAQLTGKNDSKPSNPRRQAKQTLERTRSASRRGRDVG

SEQ ID NO: 190961 - protein, 1262 aa, Zea Mays
MALFRKFFLKKTPDRLLEISDRVYVFDCCFSTDSMGEDEYRDYLSGIVAQLQEFFPDASFMVSNFWSGDKRSRISDILSEYDMTVMDYPQQYEGCPLLQLEMIHHFLKSCENWLSVEGQHNMLLMHCERGGWPVLAFMLAGLLLYRKTYTGEQKTLEMVYKQARRDFIQQFFPLNPQPSHLRYLHYITRQGGGSEWPPISRPLILDSVVLHVVPRFDVDGGCRPYLRVHGQDSSPGNKSAKVLYEMPKTSKHLPHYGQAEVPIKLSVFCRVYGDVVLEFIHIGDNIEHKETMFRIMFNTAFVQSNILALNRDDIDVAWNVNNQFPRDFRAEVHFSDPDSFKPAATVEEIADDGDETDVASVDTGEEFYEAEEDWHDARKDQETRSTDGGISLDDVADGGVATEERSSLEKHQFNEGVKIGVSQNLGSMNEKGASAPTPTFDNQEGLQQPREVLANGKLSSTNGQENSDVHDIQVVATSVDSEGHKFGSTCQEDMKGVIAQTLVTTVDPSCSDEIECQANEQTKISEYPDLDYTAFGSPRSLSRTNGDTHLRTTKNEGLQNGDIKIITENTISMDNDLVIYEEKTIVVNGNTVQEVKNIVNEKSIAAKIDKPIIESRNSLNNNNGKIQIAKPSDTSNGKLDGCRLESCLEEALPTKKTTVHDRIVVLPATDVGTEIKTKQEGLGDKQDFAPPPPPPPLASRAGPPPPPPPPGARSGPPPPPPPPGARPGAPPPPPPPGSRTGAPPPPPPPGAPPPPPPPGGGGRGPPPPPAPRGHLGGPPPPPPPSGRAPGVPPPPRAPGVPPPPGNNPSLGRGRGAVRPLGSAYGAAASRKSTLKPLHWVKVTRALQGSLWEELQRNDDSQSVSEFDISELESLFPAAVPKSDDSSKSERRKSLGSKPEKVHLIELRRANNTEIMLTKVKMPLSDLVSAALALDQSTLDVDQVENLIKFCPTKEEMELLKNYTGDKQNLGKCEQFFLELMKVPRMESKLRVFSFKIQFGSQVADLRRSLNIIDSSCNEIRTSLKLKEIMKKILLLGNTLNQGTARGAAVGFRLDSLLKLTDTRATNNKMTLMHYLCKVLAARSPQLLNFYVDLVSLDAASKIQLKMLAEEMQAVSKGLEKVHLEYDASERDGPVSEIFREKLKEFTDNAGADVQSLSSLFSEVGKKADALIKYFGEDPVRCPFEQVISTLLTFVTTFRKAHEENLKQAELEKKKAEKEAEAEKAKNAQLTGKNDSKPSNPRRQAKQTLERTRSASRRGRDVG

SEQ ID NO: 190962 - protein, 867 aa, Zea Mays
MALFRKFFLKKTPDRLLEISDRVYVFDCCFSTDSMGEDEYRDYLSGIVAQLQEFFPDASFMVSNFWSGDKRSRISDILSEYDMTVMDYPQQYEGCPLLQLEMIHHFLKSCENWLSVEGQHNMLLMHCERGGWPVLAFMLAGLLLYRKTYTGEQKTLEMVYKQARRDFIQQFFPLNPQPSHLRYLHYITRQGGGSEWPPISRPLILDSVVLHVVPRFDVDGGCRPYLRVHGQDSSPGNKSAKVLYEMPKTSKHLPHYGQAEVPIKLSVFCRVYGDVVLEFIHIGDNIEHKETMFRIMFNTAFVQSNILALNRDDIDVAWNVNNQFPRDFRAEVHFSDPDSFKPAATVEEIADDGDETDVASVDTGEEFYEAEEDWHDARKDQETRSTDGGISLDDVADGGVATEERSSLEKHQFNEGVKIGVSQNLGSMNEKGASAPTPTFDNQEGLQQPREVLANGKLSSTNGQENSDVHDIQVVATSVDSEGHKFGSTCQEDMKGVIAQTLVTTVDPSCSDEIECQANEQTKISEYPDLDYTAFGSPRSLSRTNGDTHLRTTKNEGLQNGDIKIITENTISMDNDLVIYEEKTIVVNGNTVQEVKNIVNEKSIAAKIDKPIIESRNSLNNNNGKIQIAKPSDTSNGKLDGCRLESCLEEALPTKKTTVHDRIVVLPATDVGTEIKTKQEGLGDKQDFAPPPPPPPLASRAGPPPPPPPPGARSGPPPPPPPPGARPGAPPPPPPPGSRTGAPPPPPPPGAPPPPPPPGGGGRGPPPPPAPRGHLGGPPPPPPPSGRAPGVPPPPRAPGVPPPPGNNPSLGRGRGAVRPLGSAYGAAASRKSTLKPLHWVKVTRALQGSLWEELQRNDDSQSCSEVR

SEQ ID NO: 190963 - protein, 715 aa, Zea Mays
MGCVASKNAVSVTPAADSSGGLRDRSQPRAQGSAAPLPLPVPVPSLRSSSSAARRPEKVKDEAEEPGKAVVAVAAASRSFRLRSLRKSLEGEQVAAGWPPWLSAVAGEAIQGWIPLKADSFEKLEKVGQGTYSSVFRARDLDTGKIVALKKVRFDNFEPESVRFMAREIQILRRLDHPNVMKLEGLITSRLSCSLYLVFEYMEHDLAGLCSSPDIRFTEAQLKCYMNQLLSGLEHCHSRRVVHRDMKGANLLVNNEGVLKIADFGLANFFDPNKNHPLTSRVVTLWYRPPELLLGSTHYDAAVDLWSLGCVFAEMYRGKPILQGRTEVEQLHKIFKLCGSPADDYWKKSKLPHATVFKPHHPYPSTLRDVFKEVPENALSLLETLLSVEPYKRGTASSALSSEFFRTKPYACEPSSLPKYAPNKEMDAKLRDDALRRKASSRGHGAEASKKSSRISRAAREHTAVPKQINNAEEPKNNVNATRDGTILQDRTKLSLNGDARLFADIQPVPAAAQVKGSSRHAKNESREEMPFSGPLSVPSSSGFAWAAAQRPQEDRALARSRTRSSSRGQFPAEADRDCTRTQATTESAAAGLRDIPRVGSKVREREPHDAAKRAVLRKWSQLERPDSFDSCDTYHSQNFSHAMLVGVGGGALSSKNSFEGGHGHGHGQEEKAEYSGPLLPQSHKVDELLQKNERQCSIRFGCTKETVAADAAVV

SEQ ID NO: 190964 - protein, 551 aa, Zea Mays
MAREIQILRRLDHPNVMKLEGLITSRLSCSLYLVFEYMEHDLAGLCSSPDIRFTEAQLKCYMNQLLSGLEHCHSRRVVHRDMKGANLLVNNEGVLKIADFGLANFFDPNKNHPLTSRVVTLWYRPPELLLGSTHYDAAVDLWSLGCVFAEMYRGKPILQGRTEVEQLHKIFKLCGSPADDYWKKSKLPHATVFKPHHPYPSTLRDVFKEVPENALSLLETLLSVEPYKRGTASSALSSEFFRTKPYACEPSSLPKYAPNKEMDAKLRDDALRRKASSRGHGAEASKKSSRISRAAREHTAVPKQINNAEEPKNNVNATRDGTILQDRTKLSLNGDARLFADIQPVPAAAQVKGSSRHAKNESREEMPFSGPLSVPSSSGFAWAAAQRPQEDRALARSRTRSSSRGQFPAEADRDCTRTQATTESAAAGLRDIPRVGSKVREREPHDAAKRAVLRKWSQLERPDSFDSCDTYHSQNFSHAMLVGVGGGALSSKNSFEGGHGHGHGQEEKAEYSGPLLPQSHKVDELLQKNERHIRQAVRTSWFRRGGRKVDK

SEQ ID NO: 190965 - protein, 141 aa, Zea Mays
MSDSEEHHFESKADAGASKTYPQQAGTVRKNGFIVIKNRPCKVVEVSTSKTGKHGHAKCHFVAIDIFNGKKLEDIVPSSHNCDVSLLTSDGNTKDDLRLPTDETLVAQIKEGFESGKDLVVTVQSAMGEEQICALKDVGPK

SEQ ID NO: 190966 - protein, 68 aa, Zea Mays
MKDRSGNGEEVCDGRVGGCATADRHGGGGAGLGWEGWRWVRVYARDCDDCMRRLSKTVFRVRAERHTC

SEQ ID NO: 190967 - protein, 93 aa, Zea Mays
MSGGAPDMYCRVSGAPSRACLTSARSGAHLMRLQVTVGAEVAVAPLSHRTVRCTPDSPVNYSGAAEANSRDWRVRSRDFLEHRTLSGVHRTVW

SEQ ID NO: 190968 - protein, 243 aa, Zea Mays
MASSSRSTVFSLLLLVALLLSCSGMSSAARLLEEAPPKEEHPHPAVPELPEPELPPHPTDVVPPELPKPELPPHPAVVPELPKPEVPHPVPEQPKPELTPHPAAVPELPKPEVPHPTAVPELPKPEVPHPVPELPKPEVPPHPTAVPELPKPEVPYPVPELPKPELTPHPAAVPELPKSEVPHPVPELPKPELPKPELPPHPTVPKLPHPEVPEVPNHELPPLPKAELPPKPEGHYPEPEAKP

SEQ ID NO: 190969 - protein, 116 aa, Zea Mays
MAERRSAARAAASPPALGGRSKPAAAAVSMLASVPGPRPPNPVPAVPAAVPVPMPAPAVPVPVEVPAVPPPMVPAVVGVMVPTALGVEGARLLGSLVVRAAVPVKSQVAPLALLFW

SEQ ID NO: 190970 - protein, 413 aa, Zea Mays
MLFTTQGCNAWPMTYNIVLHMTSPVHLLRIRRSPPAIAAADMASLRVVSVLVLVAMAASAGGVAARPLVGGGGAWENRAPLQTSRPFNIAHRGSNGELPEETAAAYARAIDEGADFIEADIEATKDGHLVCFHDTTLDGTTDVADHPEFAGRRRTLEVQWANVTGYFVTDFTLVELKTLRAKQRWDFRDKSHNGVSPIITFDEFIDVALNAKRVVGIYPEMKNPVFMNKHVQWADGKKYEDKFIATLKKYGYGGKYMSPAWRARPVFVQSFAPTSLVRAAGLTDSPLVFLVDDVTVRTEDTNQPYDEITSGEHLDYMKRYVVGIGPWKDTVVPPTKDNRLATPSDLVAMAHARGLQVHPYTYRNENKFLHFDFRQDPYAEYDYWINDVGIDGLFTDFPASLRRFQEWTAKNKD

SEQ ID NO: 190971 - protein, 191 aa, Zea Mays
MALRGARGPPCGGGDRTGRRGLPRRAAAAAAAPAHAAVADDADGEHGRPPERHGGGHAHGVVQGGGPRRAQDGRVPVQVQEGGGGADRVRLPRQLPHAGRVRGARRRRRGPQPAAPHRRQPAAVGVLVAPGRLGLAMEMEVVAVPSELQKLETFSLFFFYFALFLFCLFWYSCSHVVAIIITIIINSNSSN

SEQ ID NO: 190972 - protein, 467 aa, Zea Mays
MALEDGSPATFTPQVIANAFVKQYYQTLRYAREDAYKFYNDKSILGRTDSNGKMICVTTIDDIKEQLVSTDCADCLIEIETVDAQPSHVDGVIILVAGYFTTAVVKQKFIQSFFLAPQENSGYYVLNDTFRLTGISFEVKVVAANHDNKSTQITTLPNEPEIDSFKESEVPGVPPAGNILVNDGVISTSANVVSPVKNDPVVETCVKVVNEDVVKIPVAAPASTPVTAEEVVNKDFVKIPESAPALPSSVEKADPAPSAPVEKGAPALRAPVEKADPAPRAPVEKEVTRKTYASVVKIPREDTQPAPAARPSKPNLNIKMVQNTEKNVSSPSKPAHATVNALPGDKGVPKNKSPDEPGYSIFVKNLPFEATVEMVEQEFSKFGAIKSGGVQVKCQPDQFCFGFVEFESQQSMLAAIELLMVLSPVGMTMATAVAVGSILAEVVVTMGTATSGSGAVRTTATTTARIT

SEQ ID NO: 190973 - protein, 482 aa, Zea Mays
MALEDGSPATFTPQVIANAFVKQYYQTLRYAREDAYKFYNDKSILGRTDSNGKMICVTTIDDIKEQLVSTDCADCLIEIETVDAQPSHVDGVIILVAGYFTTAVVKQKFIQSFFLAPQENSGYYVLNDTFRLTGISFEVKVVAANHDNKSTQITTLPNEPEIDSFKESEVPGVPPAGNILVNDGVISTSANVVSPVKNDPVVETCVKVVNEDVVKIPVAAPASTPVTAEEVVNKDFVKIPESAPALPSSVEKAAPAPPASVEKAAAAPPASVEKGAPAPRTPVEKADPAPSAPVEKGAPALRAPVEKADPAPRAPVEKEVTRKTYASVVKIPREDTQPAPAARPSKPNLNIKMVQNTEKNVSSPSKPAHATVNALPGDKGVPKNKSPDEPGYSIFVKNLPFEATVEMVEQEFSKFGAIKSGGVQVKCQPDQFCFGFVEFESQQSMLAAIEASRVYFGTRESYVEEKRTKTRATYHYWTFSVA

SEQ ID NO: 190974 - protein, 54 aa, Zea Mays
MGSGIGDACQQYNNRQDKRDGMRLKPFPKRGSLATSRDDVVFVEATAVVYCPIL

SEQ ID NO: 190975 - protein, 258 aa, Zea Mays
MGRGPVQLRRIENKINRQVTFSKRRNGLLKKAHEISVLCDAEVALIVFSTKGKLYEYSSHSSMEGILERYQRYSFEERAVLNPSIEDQANWGDEYVRLKSKLDALQKSQRQLLGEQLSSLTIKELQQLEQQLDSSLKHIRSRKLYFFLVQNQLMFDSISALQKKEKALTDQNGVLQKFMEAEKEKNKALMNAQLREQQNGASTSSPSLSPPIVPDSMPTLNIGPCQHRGAAESESEPSPAPAQANRGNLPPWMLRTVK

SEQ ID NO: 190976 - protein, 226 aa, Zea Mays
MPDSDNESGGPSNAEFSSPREQDRFLPIANVSRIMKKALPANAKISKDAKETVQECVSEFISFITGEASDKCQREKRKTINGDDLLWAMTTLGFEDYVEPLKLYLHKFRELEGEKAATTSASSGPQPPLHRETTPSSSTHNGAGGPVGGYGMYGGAGGGSGMIMMMGQPMYGGSPPAASSGSYPHHQMAMGGKGGAYGYGGGSSSSPSGLGRQQTLWLEVHEDDGN

SEQ ID NO: 190977 - protein, 295 aa, Zea Mays
MADKISTIVLKVDLECERCYRKIRKVLCKIQDKMNIKTISFDEKSNAVTISGPFDADTVCNKLCCKAGRVIKAMDVKGKDKDGGKPKDAGKPAAAEKDAGKAGKEGGAKAEKKEEKAEKKKEEKGNKDGKAEAKKVKFAEVPAADAKPGKAMPPGMTKADLGPLLEKMMAAKAGSEPQPIAPPPGAAQGVAVPSVWPAPAGSVSGYGYGYNPGYEAPPPPSYYAAGAGGGYGCGCGGYNGYCRCGKPAAPGPGGYYGVPVYDSQGWYYGGGGGARQPYYPQQHCCEDPNAGCSVM

SEQ ID NO: 190978 - protein, 213 aa, Zea Mays
MGSGRTVITWNARASDMDRSGHQVGTFYSASVAVEADYFCASHITFENSAPAAPPGAVGQQAVALRLSGDKTMLYRCRILGTQDTLFDNIGRHFLYNCDIQGSIDFIFGNARSLYQDGAVRGVQLQGPRGEHEEPGALVPLAHLRRGAAVPRPELHQRRAVAQAVDPIRPPGCRAELRRRRAMVPPSELCVGHATSLVFFGAYSVTSKQLVRL

SEQ ID NO: 190979 - protein, 197 aa, Zea Mays
MCLLREMEDHYVHPKSKSNHGSLSGNGYEMKNPGHEVCDRDSSSESDRSHPEASAVSESSLDEHTSTQSDNDEDHGKDNQDTLKPVLSLGKEGSAFLAPKIDYNPSFAYIPYTADAYYGGVGVLTGYAPHTIVHPQQNDTTNSPVMLPAEPAEEEPIYVNAKQYHAILRRRQTRAKLEAQNKMVKGRKVMRQYLFTK

SEQ ID NO: 190980 - protein, 149 aa, Zea Mays
MCLLREMEDHYVHPKSKSNHGSLSGNGYEMKNPGHEVCDRDSSSESDRSHPEASAVSESSLDEHTSTQSDNDEDHGKDNQDTLKPVLSLGKEGSAFLAPKIDYNPSFAYIPYTADAYYGGVGVLTGYAPHTIREIVHDSLYTRCYEGSL

SEQ ID NO: 190981 - protein, 179 aa, Zea Mays
MCLLREMEDHYVHPKSKSNHGSLSGNGYEMKNPGHEVCDRDSSSESDRSHPEASAVSESSLDEHTSTQSDNDEDHGKDNQDTLKPVLSLGKEGSAFLAPKIDYNPSFAYIPYTADAYYGGVGVLTGYAPHTIVHSPLTFQFLSFWPHSASKHQTFRVTRSYNGFCDTFAVIFIAERDRP

SEQ ID NO: 190982 - protein, 72 aa, Zea Mays
MHPKDVDKTKFRTHRGHFEFLVMPFGLTNAPSTFQSLMNDILNSFICKFVLVFFDDILIYSKTWAAHLQHVK

SEQ ID NO: 190983 - protein, 54 aa, Zea Mays
MHPAFKNHEYVIYICECKFAGRQGLEKVKIRTFQWFIGERNGINNAYTALSRIF

SEQ ID NO: 190984 - protein, 823 aa, Zea Mays
MASSEVAVHILDHLFKKLNEVCLLEDGEGEPFHMLLVIFTGSLLPYLQCLDSWLYDGILDDPYEEMFFYANNAVTIDQPSFWEMSYMLRVRGSRVDSSTTLTESESIKKKGSSNKESTTAGACLKVNNQGCVYILCPTFLKDVARAIVSAGKSFQLVEHVQDVHQIQTHKSTHRSNLYQDTNCSGQQKFWPDMSNLRIHDGPPRNKDALEVSTSQFGNDSREMGLLTLSEIFLICISGLLENGDHVYEYLRTLHADNVPNNNAFMENESNLKETEGTCTGNIIEKTWVKLLKDATSGRKCNGMEETIHAVIDKAGFASGCPKDASSNVVEGVFTLSCYENPAITACREVLMRNPASWSELNISESFHLPPLNDGNMRRAIFADGHSAGTSTDYKFGFQFDDLEHVRQEDDRRTLEDLYAFPTLLPCAKENALLSEILPMQKDSTLASRVLKFIQNMSMKDPLQPVGIIQECLSKCIKRQVDLIGNQILCKLMGEWRLMDELFVLRAIYLLGSGDMLQQFLITIFDKLDRGNSWDDDFELNNLLQESIRNSADKMLLTAPDSLVVSLAKYDTHNGEEGISTSKKGRALGFGIDALDMLNFTYKVSWPLDLIINTEALKKYNQVMGFLLKVKRAKFVLDETRKWMWKARGRTAHNFKQHLIVAQKLLHFVDAFHQYVMDRVYHSAWTELCDGMTAATTLDEVMEVHEAYLSSIQRQCFVASDKLWALIASRVKTILGLALDFHNVEQTLSTGGTASAVRTRCEMEIDRIEKQFDECVIFLLRILSFKLNVGHFPHLADLVTRINYNHYFMSDSGSFSAIPGSRPR

SEQ ID NO: 190985 - protein, 52 aa, Zea Mays
MHILPDQCSLCRFGITSPSRLIMEELESMLWKLLLFICQYISSRGMHAWINL

SEQ ID NO: 190986 - protein, 342 aa, Zea Mays
MEDARAVLIKLADRLHNMRTLDSLSKTKQQSVAKETLEIFAPLANQLGILNWKEQLENLCFKYLYPENFDELSTKLIEIYNIDMIAAATRRLEQALQVRGLSYYAIYGRHKSMYSIYRKMARKKLVMDKIYDIHGVRVILENKADCFATLEIIHHLWPRIPGKFKDYINSPKPNRYQSLHTVVLTEQTLPLEIQIRTRDMHLQAEFGIAAHWRYKEGYPSSLACDASSKETHTIPSHSDACLLSYSKQCDHKGPVLVILLENEKMSVQEIPQNWTILDLLKRSSNYGMPLRLRLNCHAVHNWNQELKMGDVLELIPSTPCKSRGHTRELHQKFDHRLAVSQS

SEQ ID NO: 190987 - protein, 311 aa, Zea Mays
MPLPSPLSTSPSPASQPASIRVAAKGANRRRAMTPSVSCPVKCRPHPCLAPQPPAPSPELLAARGAPIAGELRACRSPPYLPLSRSADSLELRAACRGAPPASRARAAVALGGDGPSAALIAGAQSRHAIFRDELVRRAFTAAEAAHRGQVRASGDPYLQHCVETAALLAELGAGPAVVAAGLLHDTVDDAGLGYGFISEHFGAGVADLVKGVSNLSHLSKLARRNDTASRIDEADRLRIVFLAMEDARAVLIKLADRLHNMRTLDSLSKTKQQSVAKETLEIFAPLANQLGILNWKEQLENLCFNCNKTT

SEQ ID NO: 190988 - protein, 370 aa, Zea Mays
MEDARAVLIKLADRLHNMRTLDSLSKTKQQSVAKETLEIFAPLANQLGILNWKEQLENLCFKYLYPENFDELSTKLIEIYNIDMIAAATRRLEQALQVRGLSYYAIYGRHKSMYSIYRKMARKKLVMDKIYDIHGVRVILENKADCFATLEIIHHLWPRIPGKFKDYINSPKPNRYQSLHTVVLTEQTLPLEIQIRTRDMHLQAEFGIAAHWRYKEGERSCCTSVSEIVEWVRWVTWHCQTLNTGYPSSLACDASSKETHTIPSHSDACLLSYSKQCDHKGPVLVILLENEKMSVQEIPQNWTILDLLKRSSNYGMPLRLRLNCHAVHNWNQELKMGDVLELIPSTPCKSRGHTRELHQKFDHRLAVSQS

SEQ ID NO: 190989 - protein, 157 aa, Zea Mays
MPPDVLAQWIADRAQIWTQYVSKRPSGVVAMILGIDDEKGTPQLFTCDPAGYFFGHKAASAGQRDTEAVNFLEKKMKNNPSLPFQETIQMAISALQFALKADLKASEVEVGVVRTDDPTFRVLTEAEIDEHLEAINPEPRHSEMLPGLFRDKLTLEN

SEQ ID NO: 190990 - protein, 191 aa, Zea Mays
MSFLPECFAECEGRALAHEARNQTAEFRFNWGYEMPPDVLAQWIADRAQIWTQYVSKRPSGVVAMILGIDDEKGTPQLFTCDPAGYFFGHKAASAGQRDTEAVNFLEKKMKNNPSLPFQETIQMAISALQFALKADLKASEVEVGVVRTDDPTFRVLTEAEIDEHLEAINPEPRHSEMLPGLFRDKLTLEN

SEQ ID NO: 190991 - protein, 119 aa, Zea Mays
MAVSFANLNSEAGLKKLDEYLLTRSYITGYQASKDDLAVYTSFSAAPSSKYINVARWFNHIDALVRLSGITAEGQGVKVESSAVPSAPTPDVALLKSVLQLPRLLARRKNLGSHQFYLM

SEQ ID NO: 190992 - protein, 101 aa, Zea Mays
MSTLKFCRECNNMLYPREDKETRTLLYACQTCEHEEIATDTCVYKRVIRKPGGEPKDVLKDAATDPSLPRTRSVRCYNCNHPEAAFFQVCTQVLFTCCRCR

SEQ ID NO: 190993 - protein, 435 aa, Zea Mays
MTMAVALQAERSVIEKKKPDIKQRRVVVTGMGVVTPLGHDPDVFYNNLLDGVSGISEIERFDCSNFPTRIAGEIKSFSTDGWVAPKLAKRMDKFMLYLITAGKKALENGGLTEELRNELDKTRCGVLIGSAMGGMKVFNDAIEALRVSYKKMNPFCVPFATTNMGSAILAMDLGWMGPNYSISTACATSNFCILNAANHIRRGEADVMLCGGSDAPLIPIGLGGFVACRALSQRNSDPTKASRPWDMGRDGFVMGEGAGVLVLEELEHAKERGATIYAEFLGGSFTCDAYHMTEPHPEGRGITLCIEKALADAGVAREEINYVNAHATSTQAGDLKEYEAIVRCFRQNPQLRVNSTKSMTGHLIGAAGGIEAVASIQAIRTGWVHPNLNLENPEDTVDVGVLVGSQKERCEVKVALSNSFGFGGHNSSILFAPFK

SEQ ID NO: 190994 - protein, 453 aa, Zea Mays
MAAVAGPLCTWLVAACLSAACDAEEHKQKHFCAGGSRAGGGVMLGQRRRLGARRRGLARSGMTMAVALQAERSVIEKKKPDIKQRRVVVTGMGVVTPLGHDPDVFYNNLLDGVSGISEIERFDCSNFPTRIAGEIKSFSTDGWVAPKLAKRMDKFMLYLITAGKKALENGGLTEELRNELDKTRCGVLIGSAMGGMKVFNDAIEALRVSYKKMNPFCVPFATTNMGSAILAMDLGWMGPNYSISTACATSNFCILNAANHIRRGEADVMLCGGSDAPLIPIGLGGFVACRALSQRNSDPTKASRPWDMGRDGFVMGEGAGVLVLEELEHAKERGATIYAEFLGGSFTCDAYHMTEPHPEGRGITLCIEKALADAGVAREEINYVNAHATSTQAAEGELDQINDWASYRSSWWNRSSCFYTSYKNWLGPSKFEFRKSRGHRGRGRLGRVTEGEM

SEQ ID NO: 190995 - protein, 345 aa, Zea Mays
MDKFMLYLITAGKKALENGGLTEELRNELDKTRCGVLIGSAMGGMKVFNDAIEALRVSYKKMNPFCVPFATTNMGSAILAMDLGWMGPNYSISTACATSNFCILNAANHIRRGEADVMLCGGSDAPLIPIGLGGFVACRALSQRNSDPTKASRPWDMGRDGFVMGEGAGVLVLEELEHAKERGATIYAEFLGGSFTCDAYHMTEPHPEGRGITLCIEKALADAGVAREEINYVNAHATSTQAGDLKEYEAIVRCFRQNPQLRVNSTKSMTGHLIGAAGGIEAVASIQAIRTGWVHPNLNLENPEDTVDVGVLVGSQKERCEVKVALSNSFGFGGHNSSILFAPFK

SEQ ID NO: 190996 - protein, 476 aa, Zea Mays
MAAVAGPLCTWLVAACLSAACDAEEHKQKHFCAGGSRAGGGVMLGQRRRLGARRRGLARSGMTMAVALQAERSVIEKKKPDIKQRRVVVTGMGVVTPLGHDPDVFYNNLLDGVSGISEIERFDCSNFPTRIAGEIKSFSTDGWVAPKLAKRMDKFMLYLITAGKKALENGGLTEELRNELDKTRCGVLIGSAMGGMKVFNDAIEALRVSYKKMNPFCVPFATTNMGSAILAMDLGWMGPNYSISTACATSNFCILNAANHIRRGEADVMLCGGSDAPLIPIGLGGFVACRALSQRNSDPTKASRPWDMGRDGFVMGEGAGVLVLEELEHAKERGATIYAEFLGGSFTCDAYHMTEPHPEGRGITLCIEKALADAGVAREEINYVNAHATSTQAGDLKEYEAIVRCFRQNPQLRVNSTKSMTGHLIGAAGGIEAVASIQDVGVLVGSQKERCEVKVALSNSFGFGGHNSSILFAPFK

SEQ ID NO: 190997 - protein, 75 aa, Zea Mays
MTCEKLQLALRIHRASLCSLLGPMSRGLSSSLRSTLVLMPLPAGTLLVHSPTSCKPPSASHAFLSSLIQDWSPVH

SEQ ID NO: 190998 - protein, 52 aa, Zea Mays
MSRGLSSSLRSTLVLMPLPAGTLLVHSPTSCKPPSASHAFLSSLIQDWSPVH

SEQ ID NO: 190999 - protein, 538 aa, Zea Mays
MRRFAADRARRAVAASLHGAASRSAAPSPHAPAPRHPASPVGAAAMAAAMVRTMSTTAAGTPPVSVATINPKVLKCEYAVRGEIVTHAQNLQQELQKNPESLPFDEILYCNIGNPQSLGQQPVTYFREVLSLCDHPALLDKSETHALYSSDAIERAWQILEKIPGRATGAYSHSQGIKGLRDEIAAGIAARDGFHASGDNIFLTDGASPAVHMMMQLLISSESDGILCPIPQYPLYSASIALHGGSLVPYFLNEETGWGLDVDELKKQLEEARSKGITVRALVVINPGNPTGQVLVEENQKKIVEFCKNEGLVLLADEENIYVEDKPFHSFKKIARSLGYTDDDLPLVSFQSVSKGYYGECGKRGGYMEITGFSPEVREQIYKVASVNLCSNVSGQILASLVMNPPKAGDESFESFMSEKDGILSSLARRAKALEEAFNSLEGITCNKAEGAMYLFPRLHLPQKAIGAAQAVGTAPDAYYAKRLLEATGIVVVPGSGFGQVPGTWHFRCTILPQEDKIPAIVSRLKEFHEKFMDEFRD

SEQ ID NO: 191000 - protein, 462 aa, Zea Mays
MQFEERLLHMLRTYNKNCRKIQNHFLSTRYSTVILEIPNHLGNNQLPISEKFSLYVIIQLSWTKVKLMLCTDAIERAWQILEKIPGRATGAYSHSQGIKGLRDEIAAGIAARDGFHASGDNIFLTDGASPAVHMMMQLLISSESDGILCPIPQYPLYSASIALHGGSLVPYFLNEETGWGLDVDELKKQLEEARSKGITVRALVVINPGNPTGQVLVEENQKKIVEFCKNEGLVLLADEVYQENIYVEDKPFHSFKKIARSLGYTDDDLPLVSFQSVSKGYYGECGKRGGYMEITGFSPEVREQIYKVASVNLCSNVSGQILASLVMNPPKAGDESFESFMSEKDGILSSLARRAKALEEAFNSLEGITCNKAEGAMYLFPRLHLPQKAIGAAQAVGTAPDAYYAKRLLEATGIVVVPGSGFGQVPGTWHFRCTILPQEDKIPAIVSRLKEFHEKFMDEFRD

SEQ ID NO: 191001 - protein, 541 aa, Zea Mays
MRRFAADRARRAVAASLHGAASRSAAPSPHAPAPRHPASPVGAAAMAAAMVRTMSTTAAGTPPVSVATINPKVLKCEYAVRGEIVTHAQNLQQELQKNPESLPFDEILYCNIGNPQSLGQQPVTYFREVLSLCDHPALLDKSETHALYSSDAIERAWQILEKIPGRATGAYSHSQGIKGLRDEIAAGIAARDGFHASGDNIFLTDGASPAVHMMMQLLISSESDGILCPIPQYPLYSASIALHGGSLVPYFLNEETGWGLDVDELKKQLEEARSKGITVRALVVINPGNPTGQVLVEENQKKIVEFCKNEGLVLLADEVYQENIYVEDKPFHSFKKIARSLGYTDDDLPLVSFQSVSKGYYGECGKRGGYMEITGFSPEVREQIYKVASVNLCSNVSGQILASLVMNPPKAGDESFESFMSEKDGILSSLARRAKALEEAFNSLEGITCNKAEGAMYLFPRLHLPQKAIGAAQAVGTAPDAYYAKRLLEATGIVVVPGSGFGQVPGTWHFRCTILPQEDKIPAIVSRLKEFHEKFMDEFRD

SEQ ID NO: 191002 - protein, 94 aa, Zea Mays
MGRLQIVITEKAITDEARYTLIRAGPITMGRIPHGPPSAMRTWDLQTSSESCLRLAMERTKGDRSGVVFVGAARRRRHRVKGSVFAFAPTLLLH

SEQ ID NO: 191003 - protein, 173 aa, Zea Mays
MGTPPPFQESGHCDVCRCTFNTFRRRHHCRSCGRTLCHEHSSYYMALPQYGIYTDVRVCYGCFNKSSSQGHADNPVSAGSISGAADSFSGLSLGKEDDSSPMKNSTVQSTAALIECKCGMPLCICEAPKPEPSPTPVKNINTVPPTTQSNPRPKKPANTQQKASATSSSNSRD

SEQ ID NO: 191004 - protein, 264 aa, Zea Mays
MGTPPPFQESGHCDVCRCTFNTFRRRALPQYGIYTDVRVCYGCFNKSSSQGHADNPVSAGSISGAADSFSGLSLGKEDDSSPMKNSTVQSTAALIECKCGMPLCICEAPKPEPSPTPVKSNPRPKKPANTQQKASATSSSNSSPFLNIGLMNNDSNDKGIVDYEVSGEGLREAIKGGDVKGVKKLLTQGVDSNYCDKQGFTLLHLAALFNQTEIALILMDHGANVESKNGQGETPLDCAPAMLQYKMRQRVEELAASASKGPLG

SEQ ID NO: 191005 - protein, 299 aa, Zea Mays
MGTPPPFQESGHCDVCRCTFNTFRRRHHCRSCGRTLCHEHSSYYMALPQYGIYTDVRVCYGCFNKSSSQGHADNPVSAGSISGAADSFSGLSLGKEDDSSPMKNSTVQSTAALIECKCGMPLCICEAPKPEPSPTPVKNINTVPPTTQSNPRPKKPANTQQKASATSSSNSSPFLNIGLMNNDSNDKGIVDYEVSGEGLREAIKGGDVKGVKKLLTQGVDSNYCDKQGFTLLHLAALFNQTEIALILMDHGANVESKNGQGETPLDCAPAMLQYKMRQRVEELAASASKGPLGIPLGDA

SEQ ID NO: 191006 - protein, 304 aa, Zea Mays
MGTPPPFQESGHCDVCRCTFNTFRRRALPQYGIYTDVRVCYGCFNKSSSQGHADNPVSAGSISGAADSFSGLSLGKEDDSSPMKNSTVQSTAALIECKCGMPLCICEAPKPEPSPTPVKNINTVPPTTQSNPRPKKPANTQQKASATSSSNSSPFLNIGLMNNDSNDKGIVDYEVSGEGLREAIKGGDVKGVKKLLTQGVDSNYCDKQGFTLLHLAALFNQTEIALILMDHGANVESKNGQDPTHVEASDDGSALKLSKKMFNVEPKRREYDKGKSGLSSMLNLVLLRVIIVIYLVTHPILKLK

SEQ ID NO: 191007 - protein, 306 aa, Zea Mays
MGTPPPFQESGHCDVCRCTFNTFRRRHHCRSCGRTLCHEHSSYYMALPQYGIYTDVRVCYGCFNKSSSQGHADNPVSAGSISGAADSFSGLSLGKEDDSSPMKNSTVQSTAALIECKCGMPLCICEAPKPEPSPTPVKNINTVPPTTQSNPRPKKPANTQQKASATSSSNSSPFLNIGLMNNDSNDKGIVDYEVSGEGLREAIKGGDVKGVKKLLTQAALFNQTEIALILMDHGANVESKNGQDPTHVEASDDGSALKLSKKMFNVEPKRREYDKGKSGLSSMLNLVLLRVIIVIYLVTHPILKLK

SEQ ID NO: 191008 - protein, 160 aa, Zea Mays
MGTPPPFQESGHCDVCRCTFNTFRRRALPQYGIYTDVRVCYGCFNKSSSQGHADNPVSAGSISGAADSFSGLSLGKEDDSSPMKNSTVQSTAALIECKCGMPLCICEAPKPEPSPTPVKNINTVPPTTQSNPRPKKPANTQQKASATSSSNSRNAILIPA

SEQ ID NO: 191009 - protein, 180 aa, Zea Mays
MGTPPPFQESGHCDVCRCTFNTFRRRALPQYGIYTDVRVCYGCFNKSSSQGHADNPVSAGSISGAADSFSGLSLGKEDDSSPMKNSTVQSTAALIECKCGMPLCICEAPKPEPSPTPVKNINTVPPTTQSNPRPKKPANTQQKASATSSSNSSPFLNIGLMNNDSNDKGIVDYEVSGEVL

SEQ ID NO: 191010 - protein, 124 aa, Zea Mays
MALTREATDAMKESRVQDILVSLSALQYRRMEFQEFCAAAVSVHQLEALDRWEQHARSAYEHFEKEGNRAIVIDELASELGLSPSVPLHVVLQDWIRHTDGKLSFLGFVKLLHGMSSRSLSKMR

SEQ ID NO: 191011 - protein, 219 aa, Zea Mays
MDFVKRLLCKDPRRRMTAAQALSHPWIRNYNDIKLPLDILIFRLIKAYIRSSSLRKAALRALSKTLTVDELFYLKSQFSLLEPDRNGCITLDNIRMALTREATDAMKESRVQDILVSLSALQYRRMEFQEFCAAAVSVHQLEALDRWEQHARSAYEHFEKEGNRAIVIDELASELGLSPSVPLHVVLQDWIRHTDGKLSFLGFVKLLHGMSSRSLSKMR

SEQ ID NO: 191012 - protein, 374 aa, Zea Mays
MELCEGGELLDRILSRGGKYSEDDAKAVLVQILNVVAFCHIQGVVHRDLKPENFLFTSKDDDSHLKAIDFGLSDFVKPDERLNDIVGSAYYVAPEVLHRCYSTEADVWSIGVIAYILLCGSRPFWARTESGIFRSVLKADPSYNEAPWPSLTPEAMDFVKRLLCKDPRRRMTAAQALSHPWIRNYNDIKLPLDILIFRLIKAYIRSSSLRKAALRALSKTLTVDELFYLKSQFSLLEPDRNGCITLDNIRMALTREATDAMKESRVQDILVSLSALQYRRMEFQEFCAAAVSVHQLEALDRWEQHARSAYEHFEKEGNRAIVIDELASELGLSPSVPLHVVLQDWIRHTDGKLSFLGFVKLLHGMSSRSLSKMR

SEQ ID NO: 191013 - protein, 251 aa, Zea Mays
MLKRFIAIKDALSVMVVSEKWSVYREDNPRQAQFVKEKIVNDLWWDKMWDTMIEKVKSVIYRHEMKETHEESIFYSVVHDILVSRWTKSNTPLHCLAHSLNPKYYTDAWINEVPNRQAPHNDEEISEMRNTCFRRYFSGEELKKIKLQYANFSLFGPGFNSFDSLEDRRLNPGRAEDLVFTHQNLCLLSRKSDEYHCGPSAMWDVGADTFEADFEGGADFLEQADLSLDEPELEERLFEDLEALGLTEDAE

SEQ ID NO: 191014 - protein, 396 aa, Zea Mays
MRMRKNHCGGVKFCRVVTVHVLEQLKAEVAAASAVADRTMPRDIPLPVEGNEKRKRRGVSAIESSFNLDVRRQLDELIARMFYTGGLLFNLARNPYFRKAFMFATNNPIGGYVPPSYKLRTTLLVQERTHVERMLQPVKETWSSKGVSIVSDGWSDAQRRPLLNFLAVTEDGPMFLREINTEGISKTEYIAEKMLQFIAIKDALSVMVVSEKWSVYREDNPRQAQFVKEKIVNDLWWDKMWDTMIEKVKSVIYRHEMKETHEESIFYSVVHDILVSRWTKSNTPLHCLAHSLNPKYYTDAWINEVPNRQAPHNDEEISEMRNTCFRRYFSGEELKKIKLQYANFSLFGPGFNSFDSLEDRRYMEPKMWWRFHGHSAPELKKLALKITWTASIIFLC

SEQ ID NO: 191015 - protein, 1052 aa, Zea Mays
MARSNSWYVLHFCSTSLKSWPSSATDHPHLFPQIRCRLLSLPFLRRGIHSSVPTSVGAATDATLLGRLTRLLLLHRFSAVARLLSSSAPLTPALLHAALRRVRLDADAAVHLFRLAPFPPSLLAHAQLLHILVRARRSADARAILASLLSARPPAPPLFPHLVEVYKEFSFSAASFDLLLRALANAGQLDGALQVFDEMRTLGCRLSMRSCNSILNRLAQTGDLGATVAVFEQMQRAGALPDKFTVAIMAKAYCKVKGVVHALEFVEEMTKMGVEVNLVAYHAVMNGYCEVGQTNDARRMLDSLPGRGFSPNIVTYTLLVKGYCNEKNMEEAEGVVQEIRKNKQLVVDEAVFGAVINGYCQMGRMEDAARLLNEMVDSRLQVNLFVYNIMINGYCKLGRMVEAHNILHEMTGVGVRPDTYSYNSLVDGYCKKGLMNKAFETYNTMLRNGFAATTLTYNALLKGFCSLGSIDDALRLWFLMLKKGIAPNEISCSTLLDGFFKSGKTEKALNLWKETLARGLAKNTTTFNTVINGLCKIERMPEAEELVDKMKQWRCPPDIITYRTLFSGYCKIGDMDRASRILNELENLGFAPTIEFFNSLITGHFIAKQHGKVNDILFEMSNRGLSPNTVAYGALIAGWCKEGDLHTAYNLYLEMIEKGLVPNLFICSSLVSCFYRKGKFDEANLVLQNLVGTDMIPDISAPRLEIGKVANFIDTVAGGNHHSAKIMWNIVIFGLCKLGRIEDAKNLLADLKDKGFVADNFTYSSLIHGCSASGFVDVAFDLRDTMLSVGLTPNIVTYNSLIYGLCKSGELSRAVSLFKKLWTKGISPNAITYNTLIDKHCKDGYITEAFKLKQRMIEEGIHPTVFTYSILINGLCTQGYMEEAIKLLDQMIENNVDPNYVTYWTLIQGYVRCESVDVPIMPLDQSTIVVKASPRRAVRRPGSVSRPARLTPAPKASGRDYVLNMQVSITFQQYNCLIVFCEGAWSYHEKCFQPPSHVSQVVSSNYRLDWLSKCRDLLLVTLPLLSGTRYIPSILQSVSYPRLFFMDQALRW

SEQ ID NO: 191016 - protein, 1078 aa, Zea Mays
MARSNSWYVLHFCSTSLKSWPSSATDHPHLFPQIRCRLLSLPFLRRGIHSSVPTSVGAATDATLLGRLTRLLLLHRFSAVARLLSSSAPLTPALLHAALRRVRLDADAAVHLFRLAPFPPSLLAHAQLLHILVRARRSADARAILASLLSARPPAPPLFPHLVEVYKEFSFSAASFDLLLRALANAGQLDGALQVFDEMRTLGCRLSMRSCNSILNRLAQTGDLGATVAVFEQMQRAGALPDKFTVAIMAKAYCKVKGVVHALEFVEEMTKMGVEVNLVAYHAVMNGYCEVGQTNDARRMLDSLPGRGFSPNIVTYTLLVKGYCNEKNMEEAEGVVQEIRKNKQLVVDEAVFGAVINGYCQMGRMEDAARLLNEMVDSRLQVNLFVYNIMINGYCKLGRMVEAHNILHEMTGVGVRPDTYSYNSLVDGYCKKGLMNKAFETYNTMLRNGFAATTLTYNALLKGFCSLGSIDDALRLWFLMLKKGIAPNEISCSTLLDGFFKSGKTEKALNLWKETLARGLAKNTTTFNTVINGLCKIERMPEAEELVDKMKQWRCPPDIITYRTLFSGYCKIGDMDRASRILNELENLGFAPTIEFFNSLITGHFIAKQHGKVNDILFEMSNRGLSPNTVAYGALIAGWCKEGDLHTAYNLYLEMIEKGLVPNLFICSSLVSCFYRKGKFDEANLVLQNLVGTDMIPDISAPRLEIGKVANFIDTVAGGNHHSAKIMWNIVIFGLCKLGRIEDAKNLLADLKDKGFVADNFTYSSLIHGCSASGFVDVAFDLRDTMLSVGLTPNIVTYNSLIYGLCKSGELSRAVSLFKKLWTKGISPNAITYNTLIDKHCKDGYITEAFKLKQRMIEEGIHPTVFTYSILINGLCTQGYMEEAIKLLDQMIENNVDPNYVTYWTLIQGYVRCESVDVPIMPLDQSTIVVKASPRRAVRRPGSVSRPARLTPAPKASGRDYVLNMQVSITFQQYNCLIVFCEGAWSYHEKCFQPPSHVSQVVSSNYRLDWLSKCRDLLLVTLPLLSGTRYIPSILQSVSYPRLFFMDQALSMVHAQIYGSRVPTEVYDSPRGLPSFYT

SEQ ID NO: 191017 - protein, 1051 aa, Zea Mays
MARSNSWYVLHFCSTSLKSWPSSATDHPHLFPQIRCRLLSLPFLRRGIHSSVPTSVGAATDATLLGRLTRLLLLHRFSAVARLLSSSAPLTPALLHAALRRVRLDADAAVHLFRLAPFPPSLLAHAQLLHILVRARRSADARAILASLLSARPPAPPLFPHLVEVYKEFSFSAASFDLLLRALANAGQLDGALQVFDEMRTLGCRLSMRSCNSILNRLAQTGDLGATVAVFEQMQRAGALPDKFTVAIMAKAYCKVKGVVHALEFVEEMTKMGVEVNLVAYHAVMNGYCEVGQTNDARRMLDSLPGRGFSPNIVTYTLLVKGYCNEKNMEEAEGVVQEIRKNKQLVVDEAVFGAVINGYCQMGRMEDAARLLNEMVDSRLQVNLFVYNIMINGYCKLGRMVEAHNILHEMTGVGVRPDTYSYNSLVDGYCKKGLMNKAFETYNTMLRNGFAATTLTYNALLKGFCSLGSIDDALRLWFLMLKKGIAPNEISCSTLLDGFFKSGKTEKALNLWKETLARGLAKNTTTFNTVINGLCKIERMPEAEELVDKMKQWRCPPDIITYRTLFSGYCKIGDMDRASRILNELENLGFAPTIEFFNSLITGHFIAKQHGKVNDILFEMSNRGLSPNTVAYGALIAGWCKEGDLHTAYNLYLEMIEKGLVPNLFICSSLVSCFYRKGKFDEANLVLQNLVGTDMIPDISAPRLEIGKVANFIDTVAGGNHHSAKIMWNIVIFGLCKLGRIEDAKNLLADLKDKGFVADNFTYSSLIHGCSASGFVDVAFDLRDTMLSVGLTPNIVTYNSLIYGLCKSGELSRAVSLFKKLWTKGISPNAITYNTLIDKHCKDGYITEAFKLKQRMIEEGIHPTVFTYSILINGLCTQGYMEEAIKLLDQMIENNVDPNYVTYWTLIQGYVRCESVDVPIMPLDQSTIVVKASPRRAVRRPGSVSRPARLTPAPKASGRDYVLNMQVSITFQQYNCLIVFCEGAWSYHEKCFQPPSHVSQVVSSNYRLDWLSKCRDLLLVTLPLLSGLRNGNTQLLLGICWVYRLQTVKPS

SEQ ID NO: 191018 - protein, 901 aa, Zea Mays
MNIVLVHYLEIKGAKQSFNHAKEAEETAGLSNADSPACSNSFASQSQVASRSMDAESPISGQISEYEDAETDNSRASSRYHPFTEMQQPVDGTVMGNFFGASSPSVSVNNLGYLGEMQPTGANFTSHFATRNDIASVFNDTGSELGGGPKTSIDSVLLGEPFPEYPGGFMESTLYSSVATLGNSLEDGLQTFMSEALYTNNLTQKEVDALGAAGITSSKTENDGYTDQSVRYPLLKQSSSDLFKMEPDGLKKFDSFSRWMSNELPEVVDLDIKSSSDAFWSTTETVNVADGSSIPINEPLDVFVVSPSLSQDQLFSIIDVSPSWAYNGTKTKVLITGTFLAKKEDVENCSWSCMFGDSEVSAEVLVDGSLRCYTPVHHSGRVPFYVTCSNRVACSEVREFEFRDSETHYMDISDKHTTGINEMHLRIRLDKLLSLEPEDYEKYVLSNGNKSELINTISSLMLDNNLSNLALPSDEKELCTVQDQNLEKQVKEKLYYWLIHKIHDDGKGPNVLGKEGQGAIHLVAALGYDWAIKPIVAAGVNINFRDIRGWTALHWAACCGRERTVGALIASGAASGALTDPTQQYPSGRTPADLASENGHKGIAGFLAESALTSHLSALTLKESPSGNVEEICGLTAAEGFAASSSSQLACVNSQEESLKDSLGAVRKSTQAAARIFQAFRVESFHRKKVIEYGDDDCGLSDERTLSLVSLRNPKSGHGDSHSAAVRIQNKFRGWKGRKEFMLIRQKIVKIQAHVRGHQVRKNYRKVVWSVGIVEKVILRWRRKGRGLRGFQPEKQLEGPSWQIQPAKAEAEDEYDFLKDGRKQATGRLDRALARVRSMNQYPEARDQYRRLQACVNSLRESQAMQDRMLADSAGTDGGDFMTELEELCRDDGDAPMSTIS

SEQ ID NO: 191019 - protein, 903 aa, Zea Mays
MNIVLVHYLEIKGAKQSFNHAKEAEETAGLSNADSPACSNSFASQSQVASRSMDAESPISGQISEYEDAETDNSRASSRYHPFTEMQQPVDGTVMGNFFGASSPSVSVNNLAAGYLGEMQPTGANFTSHFATRNDIASVFNDTGSELGGGPKTSIDSVLLGEPFPEYPGGFMESTLYSSVATLGNSLEDGLQTFMSEALYTNNLTQKEVDALGAAGITSSKTENDGYTDQSVRYPLLKQSSSDLFKMEPDGLKKFDSFSRWMSNELPEVVDLDIKSSSDAFWSTTETVNVADGSSIPINEPLDVFVVSPSLSQDQLFSIIDVSPSWAYNGTKTKVLITGTFLAKKEDVENCSWSCMFGDSEVSAEVLVDGSLRCYTPVHHSGRVPFYVTCSNRVACSEVREFEFRDSETHYMDISDKHTTGINEMHLRIRLDKLLSLEPEDYEKYVLSNGNKSELINTISSLMLDNNLSNLALPSDEKELCTVQDQNLEKQVKEKLYYWLIHKIHDDGKGPNVLGKEGQGAIHLVAALGYDWAIKPIVAAGVNINFRDIRGWTALHWAACCGRERTVGALIASGAASGALTDPTQQYPSGRTPADLASENGHKGIAGFLAESALTSHLSALTLKESPSGNVEEICGLTAAEGFAASSSSQLACVNSQEESLKDSLGAVRKSTQAAARIFQAFRVESFHRKKVIEYGDDDCGLSDERTLSLVSLRNPKSGHGDSHSAAVRIQNKFRGWKGRKEFMLIRQKIVKIQAHVRGHQVRKNYRKVVWSVGIVEKVILRWRRKGRGLRGFQPEKQLEGPSWQIQPAKAEAEDEYDFLKDGRKQATGRLDRALARVRSMNQYPEARDQYRRLQACVNSLRESQAMQDRMLADSAGTDGGDFMTELEELCRDDGDAPMSTIS

SEQ ID NO: 191020 - protein, 657 aa, Zea Mays
MEPDGLKKFDSFSRWMSNELPEVVDLDIKSSSDAFWSTTETVNVADGSSIPINEPLDVFVVSPSLSQDQLFSIIDVSPSWAYNGTKTKVLITGTFLAKKEDVENCSWSCMFGDSEVSAEVLVDGSLRCYTPVHHSGRVPFYVTCSNRVACSEVREFEFRDSETHYMDISDKHTTGINEMHLRIRLDKLLSLEPEDYEKYVLSNGNKSELINTISSLMLDNNLSNLALPSDEKELCTVQDQNLEKQVKEKLYYWLIHKIHDDGKGPNVLGKEGQGAIHLVAALGYDWAIKPIVAAGVNINFRDIRGWTALHWAACCGRERTVGALIASGAASGALTDPTQQYPSGRTPADLASENGHKGIAGFLAESALTSHLSALTLKESPSGNVEEICGLTAAEGFAASSSSQLACVNSQEESLKDSLGAVRKSTQAAARIFQAFRVESFHRKKVIEYGDDDCGLSDERTLSLVSLRNPKSGHGDSHSAAVRIQNKFRGWKGRKEFMLIRQKIVKIQAHVRGHQVRKNYRKVVWSVGIVEKVILRWRRKGRGLRGFQPEKQLEGPSWQIQPAKAEAEDEYDFLKDGRKQATGRLDRALARVRSMNQYPEARDQYRRLQACVNSLRESQAMQDRMLADSAGTDGGDFMTELEELCRDDGDAPMSTIS

SEQ ID NO: 191021 - protein, 1054 aa, Zea Mays
MAEIRKYAMSNQPPDIPQILLEAQSRWLRPTEICQILSNYKKFSIAPEPPNRPQSGSLFLFDRKILRYFRKDGHNWRKKKDGKTVKEAHEKLKVGSVDVLHCYYAHGEENENFQRRTYWLLEEGFMNIVLVHYLEIKGAKQSFNHAKEAEETAGLSNADSPACSNSFASQSQVASRSMDAESPISGQISEYEDAETDNSRASSRYHPFTEMQQPVDGTVMGNFFGASSPSVSVNNLAAGYLGEMQPTGANFTSHFATRNDIASVFNDTGSELGGGPKTSIDSVLLGEPFPEYPGGFMESTLYSSVATLGNSLEDGLQTFMSEALYTNNLTQKEVDALGAAGITSSKYLKNDAVGHWSLPISMSWYDVTLYFQTENDGYTDQSVRYPLLKQSSSDLFKMEPDGLKKFDSFSRWMSNELPEVVDLDIKSSSDAFWSTTETVNVADGSSIPINEPLDVFVVSPSLSQDQLFSIIDVSPSWAYNGTKTKVLITGTFLAKKEDVENCSWSCMFGDSEVSAEVLVDGSLRCYTPVHHSGRVPFYVTCSNRVACSEVREFEFRDSETHYMDISDKHTTGINEMHLRIRLDKLLSLEPEDYEKYVLSNGNKSELINTISSLMLDNNLSNLALPSDEKELCTVQDQNLEKQVKEKLYYWLIHKIHDDGKGPNVLGKEGQGAIHLVAALGYDWAIKPIVAAGVNINFRDIRGWTALHWAACCGRERTVGALIASGAASGALTDPTQQYPSGRTPADLASENGHKGIAGFLAESALTSHLSALTLKESPSGNVEEICGLTAAEGFAASSSSQLACVNSQEESLKDSLGAVRKSTQAAARIFQAFRVESFHRKKVIEYGDDDCGLSDERTLSLVSLRNPKSGHGDSHSAAVRIQNKFRGWKGRKEFMLIRQKIVKIQAHVRGHQVRKNYRKVVWSVGIVEKVILRWRRKGRGLRGFQPEKQLEGPSWQIQPAKAEAEDEYDFLKDGRKQATGRLDRALARVRSMNQYPEARDQYRRLQACVNSLRESQAMQDRMLADSAGTDGGDFMTELEELCRDDGDAPMSTIS

SEQ ID NO: 191022 - protein, 527 aa, Zea Mays
MEPDGLKKFDSFSRWMSNELPEVVDLDIKSSSDAFWSTTETVNVADGSSIPINEPLDVFVVSPSLSQDQLFSIIDVSPSWAYNGTKTKVLITGTFLAKKEDVENCSWSCMFGDSEVSAEVLVDGSLRCYTPVHHSGRVPFYVTCSNRVACSEVREFEFRDSETHYMDISDKHTTGINEMHLRIRLDKLLSLEPEDYEKYVLSNGNKSELINTISSLMLDNNLSNLALPSDEKELCTVQDQNLEKQVKEKLYYWLIHKIHDDGKGPNVLGKEGQGAIHLVAALGYDWAIKPIVAAGVNINFRDIRGWTALHWAACCGRERTVGALIASGAASGALTDPTQQYPSGRTPADLASENGHKGIAGFLAESALTSHLSALTLKESPSGNVEEICGLTAAEGFAASSSSQLACVNSQEESLKDSLGAVRKSTQAAARIFQAFRVESFHRKKVIEYGDDDCGLSDERTLSLVSLRNPKSGHGDSHSAAVRIQNKFRGWKGRKEFMLIRQKIVKIQAKIKVCGGGGRSYLRRTSF

SEQ ID NO: 191023 - protein, 159 aa, Zea Mays
MNQTNPVTKKLQCCLLLVVVLATGKQLQVRRGRRGQRGEDREEDPHQEVHRPRGQYLQGRRRGTRDGGEAPPEHGEAEGDDRQRHLRGRGGPLPGLPGRNPQAARRGEQHRAGLTAGTNNQMDIAAPPLHHSFLPHRRRRRHLRSDLLLGSFFFRSLED

SEQ ID NO: 191024 - protein, 237 aa, Zea Mays
MLEYCKLTVAIKMLPVRKPCSAPKWKEMTGSGIFAAGGEGEEDESANVSATSVRTAPKNYQAISTISHISFAEEESISPKKPTSISEVAKQRELSGTLLSEDDSKMKRQISDLKSKELSGHDIFAPPEDPRPRNSENGSTSQTPGKNVSNFKFGEADEDSAVKTAKKIPTKKFTDLAGNIFKGDDEAPGTAEKHHLSTAKLKEMTGSDIFADGEAPSRDYLGGIRKPPGGESSIALV

SEQ ID NO: 191025 - protein, 212 aa, Zea Mays
MTGSGIFAAGGEGEEDESANVSATSVRTAPKNYQAISTISHISFAEEESISPKKPTSISEVAKQRELSGTLLSEDDSKMKRQISDLKSKELSGHDIFAPPEDPRPRNSENGSTSQTPGKNAHVSNFKFGEADEDSAVKTAKKIPTKKFTDLAGNIFKGDDEAPGTAEKHHLSTAKLKEMTGSDIFADGEAPSRDYLGGIRKPPGGESSIALV

SEQ ID NO: 191026 - protein, 210 aa, Zea Mays
MTGSGIFAAGGEGEEDESANVSATSVRTAPKNYQAISTISHISFAEEESISPKKPTSISEVAKQRELSGTLLSEDDSKMKRQISDLKSKELSGHDIFAPPEDPRPRNSENGSTSQTPGKKVSNFKFGEADEDSAVKTAKKIPTKKFTDLAGNIFKGDDEAPGTAEKHHLSTAKLKEMTGSDIFADGEAPSRDYLGGIRKPPGGESSIALV

SEQ ID NO: 191027 - protein, 324 aa, Zea Mays
MRHPIMDVGTVFTDVKQFRAALKNLIICEGREVMRPKNDPMQVSAKCKIVDCAWYIYASRLPDGRSFKIKKYVKEHTCGKSHTVKQMDAKWIGTEYEHFFRSEKDWRVKSLRDTVLRDTQVGISLTKAYRAKRYAVQKIGGEYHEQYRRIQDYAHTVLSANPGSCIVIKCFVDPTQAINPRFERMYVSFDAQVKGFLAGCRPFFGLDGTHVKLPNGGQILTAQGRDANNNLFPIAFALVGSENANSWTWFLELLVQSIGQGEHCGGWTIMSDRQKGLKDGVRAIFPHAEHRYCLRHLYANFSKAGFKGPRLKELMDRAAYAYKE

SEQ ID NO: 191028 - protein, 194 aa, Zea Mays
MTKHAAYSSEDVVAAVAAPAPAGRHFTSFQALKGAPLDCKKHAAVDLSASGAAVVGGGPWFESMKASSPRRAADAEHGDWMEKHPSALAQFEPLLAAAKGKQIVMFLDYDGTLSPIVEDPDRAVMSEEMREAVRRVAEHFPTAIVSGRCRDKVLNFVKLTELYYAGSHGMDIQGPAACRQPNHVQQANVSLSHA

SEQ ID NO: 191029 - protein, 337 aa, Zea Mays
MTKHAAYSSEDVVAAVAAPAPAGRHFTSFQALKGAPLDCKKHAAVDLSASGAAVVGGGPWFESMKASSPRRAADAEHGDWMEKHPSALAQFEPLLAAAKGKQIVMFLDYDGTLSPIVEDPDRAVMSEEVLNFVKLTELYYAGSHGMDIQGPAACRQPNHVQQAEAAAVHYQAASEFLPVIEEVFRTLTAKMESIAGARVEHNKYCLSVHFRCVREEEWNAVNEEVRSVLREYPNLKLTHGRKVLEIRPSIKWDKGKALEFLLKSLGYAGRNDVFPIYIGDDRTDEDAFKVLRNMGQGIGILVSKLPKETAASYSLSDPAEVKEFLRKLANKKGARQP

SEQ ID NO: 191030 - protein, 325 aa, Zea Mays
MTKHAAYSSEDVVAAVAAPAPAGRHFTSFQALKGAPLDCKKHAAVDLSASGAAVVGGGPWFESMKASSPRRAADAEHGDWMEKHPSALAQFEPLLAAAKGKQIVMFLDYDGTLSPIVEDPDRAVMSEEMREAVRRVAEHFPTAIVSGRCRDKVLNFVKLTELYYAGSHGMDIQGPAACRQPNHVQQVVHTQAEAAAVHYQAASEFLPVIEEVFRTLTAKMESIAGARVEHNKYCLSVHFRCVREEEWNAVNEEVRSVLREYPNLKLTHGRKVLEIRPSIKWDKGKALEFLLKSLGYAGRNDVFPIYIGDDRTDEDAFKVKNKKRS

SEQ ID NO: 191031 - protein, 765 aa, Zea Mays
MYILMFEHASSNFSGSVPTVNSTTLKVLNLSSNVLSGSLPATMGKCTSVDLSGNQFSGELAILRSWDGIVEVIDLSSNKLVGSYPNDVSQFQNLVSLKLRNNSLSGSLPSVLGTYQKLSVLDLSQNAIEGSVLPTFFMSPTLTVLNLSGNKFSGTIPFQSTHSTESILLSSQSALRIVDLSSNSLAGPLPPDISNLQKLEFLILMMNELSGEIPSEISKLQALEYLDLSHNHLTGRIPDMPQNGLKVFNVSYNNLEGTVPKSVEKFPLSCFRPGNDMLVFPDGLPAGNDDYTGVDQGQTSHGHKAGVRVALIIGCIGAVLLVISIALAFYLVRSQELCGRNGFRGQITIRDLKGRISRPNLFRSPKDNVIPSKTSFSNDHLLRAATRSMSAQKELLAEASVEYGYTDPKEVAESTSLGVTETSSAIQAHESPPRSALPAAPHFADSRFLEEPVAFEVYSPDRLVGELIFTDSTLVFTAEDLSRAPAEVLGRSSHGTTYKAVLQSGHVLTVKWLRVGLVKHKKEFTKEIKRIGTIRHPNIVPWRAFYWGPKEQERLIISDYVSGDSLALYLYESTPRRYSRLSVSQRLRIAIDLARCLQFLHHEKGLPHGNLKPTNIFLTGPDLTPKLVDYGLHRFMTPSGAAEQILNLGALGYRAPELANAGKAAPTFKADVYAFGVVVMEMLTRRSAGDIISGQSGAVDLTDWVQMCSREGRGADCFDRDIAGLEERPGVMEELLAVSLRCILPVNERPNMKTVCDDLCSIITA

SEQ ID NO: 191032 - protein, 951 aa, Zea Mays
MAALLALVLLLLSGGAAGDDVAALLEFKKGIADRDRDQLLGSWSPPAATEAGNGGGGCPASWRGVVCDGGAVVGVALDGLGLAGELKLGTLSGMRALQNLSLAGNAFSGRLPPGIGSLSSLRHLDLSGNRFYGPIPGRLANLSSLVHLNLSHNNFTSGFPTDGIQQLQNLRRFDVRSNNFWGNATDLLAKLRNAEHVDLSDNLFTGTIDLDIQSLASIGNTVKYLNLSHNKLDGGFFRNETVAAFKNLAVLDLSNNGLGGIVPRLDAWFSLEFFSVAGNGLFGMMPEALLQNSMRLIEVDLSRNGFSGSVPTVNSTTLKVLNLSSNVLSGSLPATMGKCTSVDLSGNQFSGELAILRSWDGIVEVIDLSSNKLVGSYPNDVSQFQNLVSLKLRNNSLSGSLPSVLGTYQKLSVLDLSQNAIEGSVLPTFFMSPTLTVLNLSGNKFSGTIPFQSTHSTESILLSSQSALRIVDLSSNSLAGPLPPDISNLQKLEFLILMMNELSGEIPSEISKLQALEYLDLSHNHLTGRIPDMPQNGLKVFNVSYNNLEGTVPKSVEKFPLSCFRPGNDMLVFPDGLPAGNDDYTGVDQGQTSHGHKAGVRVALIIGCIGAVLLVISIALAFYLVRSQELCGRNGFRGQITIRDLKGRISRPNLFRSPKDNVIPSKTSFSNDHLLRAATRSMSAQKELLAEASVEYGYTDPKEVAESTSLGVTETSSAIQAHESPPRSALPAAPHFADSRFLEEPVAFEVYSPDRLVGELIFTDSTLVFTAEDLSRAPAEVLGRSSHGTTYKAVLQSGHVLTVKWLRVGLVKHKKEFTKEIKRIGTIRHPNIVPWRAFYWGPKEQERLIISDYVSGDSLALYLYESTPRRYSRLSVSQRLRIAIDLARCLQFLHHEKGLPHGNLKPTNIFLTGPDLTPKLVDYGLHRCILPVNERPNMKTVCDDLCSIITA

SEQ ID NO: 191033 - protein, 915 aa, Zea Mays
MAALLALVLLLLSGGAAGDDVAALLEFKKGIADRDRDQLLGSWSPPAATEAGNGGGGCPASWRGVVCDGGAVVGVALDGLGLAGELKLGTLSGMRALQNLSLAGNAFSGRLPPGIGSLSSLRHLDLSGNRFYGPIPGRLANLSSLVHLNLSHNNFTSGFPTDGIQQLQNLRRFDVRSNNFWGNATDLLAKLRNAEHVDLSDNLFTGTIDLDIQSLASIGNTVKYLNLSHNKLDGGFFRNETVAAFKNLAVLDLSNNGLGGIVPRLDAWFSLEFFSVAGNGLFGMMPEALLQNSMRLIEVDLSRNGFSGSVPTVNSTTLKVLNLSSNVLSGSLPATMGKCTSVDLSGNQFSGELAILRSWDGIVEVIDLSSNKLVGSYPNDVSQFQNLVSLKLRNNSLSGSLPSVLGTYQKLSVLDLSQNAIEGSVLPTFFMSPTLTVLNLSGNKFSGTIPFQSTHSTESILLSSQSALRIVDLSSNSLAGPLPPDISNLQKLEFLILMMNELSGEIPSEISKLQALEYLDLSHNHLTGRIPDMPQNGLKVFNVSYNNLEGTVPKSVEKFPLSCFRPGNDMLVFPDGLPAGNDDYTGVDQGQTSHGHKAGVRVALIIGCIGAVLLVISIALAFYLVRSQELCGRNGFRGQITIRDLKGRISRPNLFRSPKDNVIPSKTSFSNDHLLRAATRSMSAQKELLAEASVEYGYTDPKEVAESTSLGVTETSSAIQAHESPPRSALPAAPHFADSRFLEEPVAFEVYSPDRLVGELIFTDSTLVFTAEDLSRAPAEVLGRSSHGTTYKAVLQSGHVLTVKWLRVGLVKHKKEFTKEIKRIGTIRHPNIVPWRAFYWGPKEQERLIISDYVSGDSLALYLYGKRFRVHGHLRFSQPDYFGLLHCSFSLESFYTYIIPTAVTIVLCMDLMSCP

SEQ ID NO: 191034 - protein, 697 aa, Zea Mays
MEELPVPVDHPIGETAGRPLHDAGRCKRNTPMHVPAPHLLPAPPKPHYHAALRFTVAASAAPASPRKAVIVGGGLAGLAAATHLTSLSVPFTLVEASDRLGGRVATDVVDGYRLDRGFQIFLTAYPECRRLLDFPELRLRPFYPGALVFVGAGEPFYLLSDPFRLPLRSLSAVFSPVGTLTDKVLVGLTRLRAAATPDDVILSAPETTTGEHLARLGFSPSIVERFLRPFLAGIFFDPALDTSSRLFELVFKRLALGDNALPEDGIGAIAAQLAARLPAGSVRLNTRAVGIDQSGVTLDTGETVAGGLGVIVAVEQPQAEKLLPQLPAQGKAKKSERSTVCLYFSTDRAPVQDPILLLNGSGKGIVNNMFFVTNVAPSYAPAGKVLVSVSLVGSFADREDADLADEVVRELGGWFGDGEVASWTHLSTYRIGFAQPDQTPPTTPAGRDPRVGDGLYVCGDHWCSATFDGALVPQSHNEFRTGTSKEQIRKPKGPIQPRRPNPESLTVTSDPLRLRRRMGSMEASTAPENGSAAGGGAGNGAGAASNGGGVERRLRSSAAPASWAAQLPLEVGTRVMCRWRDQKLHPVKVIERRKGSASSSPADYEYYVHYTEFNRRLDEWVKLEQLDLATVETDVDEKVEDKATSLKMTRHQKRKIDETHVEQGHEELDAASLREHEEFTKVKNIAKIELGRYEIDT

SEQ ID NO: 191035 - protein, 680 aa, Zea Mays
MEELPVPVDHPIGETAGRPLHDAGRCKRNTPMHVPAPHLLPAPPKPHYHAALRFTVAASAAPASPRKAVIVGGGLAGLAAATHLTSLSVPFTLVEASDRLGGRVATDVVDGYRLDRGFQIFLTAYPECRRLLDFPELRLRPFYPGALVFVGAGEPFYLLSDPFRLPLRSLSAVFSPVGTLTDKVLVGLTRLRAAATPDDVILSAPETTTGEHLARLGFSPSIVERFLRPFLAGIFFDPALDTSSRLFELVFKRLALGDNALPEDGIGAIAAQLAARLPAGSVRLNTRAVGIDQSGVTLDTGETVAGGLGVIVAVEQPQAEKLLPQLPAQGKAKKSERSTVCLYFSTDRAPVQDPILLLNGSGKGIVNNMFFVTNVAPSYAPAGKVLVSVSLVGSFADREDADLADEVVRELGGWFGDGEVASWTHLSTYRIGFAQPDQTPPTTPAGRDPRVGDGLYVCGDHWCSATFDGALVPQSHNEFRTGTSKEQIRKPKGPIQPRRPNPESLTVTSDPLRLRRRMGSMEASTAPENGSAAGGGAGNGAGAASNGGGVERRLRSSAAPASWAAQLPLEVGTRVMCRWRDQKLHPVKVIERRKGSASSSPADYEYYVHYTEFNRRLDEWVKLEQLDLATVETDVDEKVEDKATSLKMTRHQKRKIDETHVEDTRSLMQPACGNMKNSQK

SEQ ID NO: 191036 - protein, 50 aa, Zea Mays
MLSSQWKKQSIAREGVMQRSIIRHRRIGIQPSQNRSMRANLRLRAINITF

SEQ ID NO: 191037 - protein, 112 aa, Zea Mays
MPEAARLTGAPGFQGSENHISFASPPQTSSNIPTTVLGASTSTKLPAELQLPEGSVVATNAELKTPGPEATPSTLKPSANPEPRVDGDDITDALYGDHGHRRLPIFREICPD

SEQ ID NO: 191038 - protein, 63 aa, Zea Mays
MQSSRRQDQKLRLQLSSHLLIQNHAWMAMTSLMLSTVTMVIAGSLFSGRSVQIECQPQHSQRR

SEQ ID NO: 191039 - protein, 147 aa, Zea Mays
MIRGEISDLQNEMRMRLEDNSIWSHDTSRPNLTAPHPATTVFTLQHSPHPQVIATMTLPLQQPAVVEQSYAAPRRELQLFPEAAPTEDTEPPQNEGTSNHVMRPQARYPPAMTTLPGHVYPVLPRVEDEQRSSGTTGSREEGGVGNR

SEQ ID NO: 191040 - protein, 122 aa, Zea Mays
MDMSSIAANLGLSGSRPVIRKAGELRRLCDVNFDSSVLGIGEVCKAIICLEIAASKLQVIFDRAEAVRMSGMSEKAYIRSFNSLQNGLGVKTTLDVRELGIQFGCVRLIPFVQKGLSLFQHQ

SEQ ID NO: 191041 - protein, 195 aa, Zea Mays
MDMSSIAANLGLSGSRPVIRKAGELRRLCDVNFDSSVLGIGEVCKAIICLEIAASKLQVIFDRAEAVRMSGMSEKAYIRSFNSLQNGLGVKTTLDVRELGIQFGCVRLIPFVQKGLSLYKERFLAALPPSRRASTDFGRPVFTAAAFYLCARRHKLKVDKLKLIDLCGTSSAEFTTRNNRHQNPSRCGLSRFQTL

SEQ ID NO: 191042 - protein, 73 aa, Zea Mays
MDAGGGPRPRLLHPGARPRQLARRPGQNRYVLYCMLISITLSTISISIVFLFSFFELLRKEQELIGGGFFAQG

SEQ ID NO: 191043 - protein, 176 aa, Zea Mays
MGSGGFAAAVAACPSAAEAFLKYYGIVSGGTSAESRQALVELSLAIDGIEGMRDVIFADIPKLIPFIDLEDMSLFSCFYDFVFFICREKGQKSVTIQRAVAAWRIVLSGRFRLLDRWCNFVEYQRHNISEDTWQQLLAFSRCVNEDLEGYDPRGAWPVLIDDFVEQMHRVFNSSLP

SEQ ID NO: 191044 - protein, 245 aa, Zea Mays
MRDVIFADIPKLIPFIDLEDMSLFSCFYDFVFFICREKGQKSVTIQRAVAAWRIVLSGRFRLLDRWCNFVEYQRHNISEDTWQQLLAFSRCVNEDLEGYDPRGAWPVLIDDFVEQMHRIYHSTDCSSAMESQCNISSTLKGLDPQPGSKRKCPHLKSNEEDVELSDSFTRSVHLTPIKRLKESHDARYGAGESAKTTHFSNSSSGGYHEDMNLHNSRGCLQNSPCNVEDALSKGFEGCISMKCPF

SEQ ID NO: 191045 - protein, 318 aa, Zea Mays
MIELLKEHGGLTYGKTGSHFEPKTIPPPLTNKADWEINPLELDFTKATVIGKGSFGEILKANWRGTPIAVKRILPSLSDDRLVIQDFKHEVNLLIKLRHPNVVQFLGAVTETKPLMLITEFLRGGDLHQYLKDKGALNPLTAVNFALDIARGMAYLHNEPNVVIHRDLKPRNILLVNSAANHLKVGDFGLSKIIKAQHANDVYKMTGETGSYRYMAPEVFKHRKYDKKVDIFSFAMILYEMLEGDSPFSNYEPYEAAKYVADGHRPVFRKNHTTELKDLVELCWSGDISLRPSFLEILKRLEKLKEHYSHENHWHLFQ

SEQ ID NO: 191046 - protein, 340 aa, Zea Mays
MIGSFRSLKHPLADAEGAKRQPMIELLKEHGGLTYGKTGSHFEPKTIPPPLTNKADWEINPLELDFTKATVIGKGSFGEILKANWRGTPIAVKRILPSLSDDRLVIQDFKHEVNLLIKLRHPNVVQFLGAVTETKPLMLITEFLRGGDLHQYLKDKGALNPLTAVNFALDIARGMAYLHNEPNVVIHRDLKPRNILLVNSAANHLKVGDFGLSKIIKAQHANDVYKMTGETGSYRYMAPEVFKHRKYDKKVDIFSFAMILYEMLEGDSPFSNYEPYEAAKYVADGHRPVFRKNHTTELKDLVELCWSGDISLRPSFLEILKRLEKLKEHYSHENHWHLFQ

SEQ ID NO: 191047 - protein, 162 aa, Zea Mays
MNFSVIQEDGISLIESAHGIKDFSITSMKGGYRRVLQRPIDFEWDLMTYTDDNTPLVPTDLDVLSETQLSETNEPLSDGTCSCPSSDSRLQVLLDTSGPTIEASSVETKSIGISDLSPEKLAVKLEFTLPASSYATMAIRELTKTSTSVTSCSILFFGFVNT

SEQ ID NO: 191048 - protein, 275 aa, Zea Mays
MWYITFMYVHSYQSYLWNHAASMRVEKYGISQVVEGDLVYKTGSSLGEAITTDTFDDDDSHVNSPEMEMSCETLTEEMIQSVKVVDSEDLLKAVYSFEDVVLPLPGSETLFPGNEVTMIYHEIAKKDGISLIESAHGIKDFSITSMKGGYRRVLQRPIDFEWDLMTYTDDNTPLVPTDLDVLSETQLSETNEPLSDGTCSCPSSDSRLQVLLDTSGPTIEASSVETKSIGISDLSPEKLAVKLEFTLPASSYATMAIRELTKTSTSVACQKTLNG

SEQ ID NO: 191049 - protein, 286 aa, Zea Mays
MPRHLTVERAILQRLKNYPGNYLQALMAIPKALRLMYVHSYQSYLWNHAASMRVEKYGISQVVEGDLVYKTGSSLGEAITTDTFDDDDSHVNSPEMEMSCETLTEEMIQSVKVVDSEDLLKAVYSFEDVVLPLPGSETLFPGNEVTMIYHEIAKKDGISLIESAHGIKDLMTYTDDNTPLVPTDLDVLSETQLSETNEPLSDGTCSCPSSDSRLQVLLDTSGPTIEASSVETKSIGISDLSPEKLAVKLEFTLPASSYATMAIRELTKTSTSVTSCSILFFGFVNT

SEQ ID NO: 191050 - protein, 304 aa, Zea Mays
MPRHLTVERAILQRLKNYPGNYLQALMAIPKALRLMYVHSYQSYLWNHAASMRVEKYGISQVVEGDLVYKTGSSLGEAITTDTFDDDDSHVNSPEMEMSCETLTEEMIQSVKVVDSEDLLKAVYSFEDVVLPLPGSETLFPGNEVTMIYHEIAKKDGISLIESAHGIKDFSITSMKGGYRRVLQRPIDFEWDLMTYTDDNTPLVPTDLDVLSETQLSETNEPLSDGTCSCPSSDSRLQVLLDTSGPTIEASSVETKSIGISDLSPEKLAVKLEFTLPASSYATMAIRELTKTSTSVACQKTLNG

SEQ ID NO: 191051 - protein, 309 aa, Zea Mays
MPRHLTVERAILQRLKNYPGNYLQALMAIPKALRLMYVHSYQSYLWNHAASMRVEKYGISQVVEGDLVYKTGSSLGEAITTDTFDDDDSHVNSPEMEMSCETLTEEMIQSVKVVDSEDLLKAVYSFEDVVLPLPGSETLFPGNEVTMIYHEIAKKDGISLIESAHGIKDFSITSMKGGYRRVLQRPIDFEWDLMTYTDDNTPLVPTDLDVLSETQLSETNEPLSDGTCSCPSSDSRLQVLLDTSGPTIEASSVETKSIGISDLSPEKLAVKLEFTLPASSYATMAIRELTKTSTSVTSCSILFFGFVNT

SEQ ID NO: 191052 - protein, 105 aa, Zea Mays
MIMLAVRGLNSKMLEKRLHGCLLLLVFLLADVSGSGQCVFTGSSMAGGGTPAASAPSGLSPPSSFTPGIGSPSNTLIPLDGAESLVSSVWSAICAPLLALPLFFL

SEQ ID NO: 191053 - protein, 464 aa, Zea Mays
MEVDGEAQHFRLFSKRAKPKLKPEVQPQPEPEPPSRDPAAAEAYLDPAPTIVTETGQADDAADAAGTAPATFADLGLSQWLVDACEALGMRRPTAVQRRCIPRALAGADVLGIAETGSGKTAAFALPILHRLGEDPYGVAALALAPTRELAAQLAEQFRALGAPLGLRCLAAIGGFDSLAQAKGLSRRPHVVVATPGRIATLVKNDPDLAKVFSRTKFLVLDEADRILDVNFEEELRVIFGCLPKKRQTFLFSATMSDNLRSLLELSGNKSYFFEAYEGFKTVETLKQQYIHVPPQGKELHLWHLLSVMKGKTEDPIRSAIVFVSTCKDCQYLDLLLEELRYPAVALNSHKSQAQRLSALNRFKSGQVPVLLATDVGSRGLDIQTVDLVINYDMPMSPRDYIHRVGRTARASRGGLAISFVTQFFRSSLSVKEEQQLWEMAGAKEGYMSFTRDRRCCGKAVGGL

SEQ ID NO: 191054 - protein, 303 aa, Zea Mays
MRAKPWACGAPRRCSAGAFRARSRGRTCSGSPRRGAARRPRSRCPSCTASGRTPMAWPRSRSPPRASSRRSSPSSSARSGRRSASGASRPSEDSTRSRRPKGSRAAPTSSSPPQDALRRSSKTILTSPKYSPAQRDCQYLDLLLEELRYPAVALNSHKSQAQRLSALNRFKSGQVPVLLATDVGSRGLDIQTVDLVINYDMPMSPRDYIHRVGRTARASRGGLAISFVTQKDICLLHEIEDVVEKQLEAYECSDKEVTKDITKVFKAIRLSKMRRRDEGHDEKVEARKEQKRRDRARKRKHED

SEQ ID NO: 191055 - protein, 232 aa, Zea Mays
MGRGRNRKPRNFATFRLCPRPGAADASERVFVRVDDNPYSVPGFADDDGLSSSTAVRGDGGEPDPSSSTSTDEGGSPLPEHVRREIMELGLPDDGYDYLAHLRELRPSLSSTGGGGSSAVFLPSRRLARSGLPVDVKAYDFTSTPLGSGEVAVVAASRAEEAIDLDVTRLLDGSDSTAVESGDEDLEEDFVILANEPDEKQESEEENVAGSKEKALQLPGDQFVSVSSASAS

SEQ ID NO: 191056 - protein, 172 aa, Zea Mays
MDLAFEEYADSGVGCCVQDAKHELSQEVTDKLKPPHSETFDADKRCRAPTPQYVAHRILESNEQIDASSNAISEHVQYAETYEVSEEEQAILAPESSKGSAVMYSTATVSGSYLDVKLKFPKHSPGETSMKKSIIRKGIEKLPAGYSPQRNTPTGETKQGPYKGTRQEGTES

SEQ ID NO: 191057 - protein, 241 aa, Zea Mays
MGRGRNRKPRNFATFRLCPRPGAADASERVFVRVDDNPYSVPGFADDDGLSSSTAVRGDGGEPDPSSSTSTDEGGSPLPEHVRREIMELGLPDDGYDYLAHLRELRPSLSSTGGGGSSAVFLPSRRLARSGLPVDVKVHPYLLPSASRAVSCAFRGCLTGAIRRPLSRGMRIWRRTLLSLRMSQMRSRRARKRMLLEARRKLCSCLAISLFRLLSKNMRTVELVVVFKMQSMNCPRRLQIN

SEQ ID NO: 191058 - protein, 314 aa, Zea Mays
MSRVLATGDERGMGEVAGVERAACKRPRGALDGGGSGSAAAWPACRVARAAAGGKDRHSKVVTARGLRDRRVRLSVPTAIQFYDIQDRLGVDQPSKAIEWLIRAAAAAIDGLPSLDCSFVFPHAAASPPGGAADDAELSTSETSKSSVLSLANAPVDNTAAHSQQDSHAYNNNAAAGGGAFADLILHCSANNSSKPVQQQPTLAYYATQPPNAHSASAISFETMLPHFSFLQEQPHHAIAFDRGTLQSNAAVAAPLWPTSQHACLLQRFAASPADATGLPSFFLGSGAAGASPVVPANAEPRLQLWDFKQERKT

SEQ ID NO: 191059 - protein, 129 aa, Zea Mays
MLTGSLPFDDQNMVVLYQKILKGNAHIPKWLSQGAQDLLRKILDPNPITRVDVDGIRAHDWFKQGYAPSAPFNDDEEDINVDEEDSLNMTENGIQDKIAINQINAFQLIGMSSCLDLSGFFEKEFVGCF

SEQ ID NO: 191060 - protein, 196 aa, Zea Mays
MLTGSLPFDDQNMVVLYQKILKGNAHIPKWLSQGAQDLLRKILDPNPITRVDVDGIRAHDWFKQGYAPSAPFNDDEEDINVDEEDSLNMTEQNGIQDKIAINQINAFQLIGMSSCLDLSGFFEKEDASERKIRFASNYPPAYLFEKIESIVRKMGFQVHKSNGKVSDHLSCVFMSTDFQLCAFGIRVLRVIVTSCS

SEQ ID NO: 191061 - protein, 461 aa, Zea Mays
MGKYEMGRTLGEGHFGKVRLARDAGTGRSFAIKILDRQRILAMKIDEQIKREIATLKLLKHPNVVRLYEVSASKTKIYMVLEYVNGGELFDKIVTTLPLLNCGPPAIRPHALKGKLTEKEGRKLFQQLIDAVGYCHEKGVCHRDLKPENVLVDAKGNIKVSDFGLSALPQNQRKDGLLHTTCGSPNYIAPEVLLNKGYDGSVSDVWSCGVILYVMLTGSLPFDDQNMVVLYQKILKGNAHIPKWLSQGAQDLLRKILDPNPITRVDVDGIRAHDWFKQGYAPSAPFNDDEEDINVDEEDSLNMTEQNGIQDKIAINQINAFQLIGMSSCLDLSGFFEKEDASERKIRFASNYPPAYLFEKIESIVRKMGFQVHKSNGKLKVIQDCKGLANLRGKESLLISAEVFEINESLYVVELKKSSGDCSLYRKLCETLSEDLGTCKSQQFLKQDSIRQEIGRHNSSF

SEQ ID NO: 191062 - protein, 245 aa, Zea Mays
MTLFFFFQKDGLLHTTCGSPNYIAPEVLLNKGYDGSVSDVWSCGVILYVMLTGSLPFDDQNMVVLYQKILKGNAHIPKWLSQGAQDLLRKILDPNPITRVDVDGIRAHDWFKQGYAPSAPFNDDEEDINVDEEDSLNMTEQNGIQDKIAINQINAFQLIGMSSCLDLSGFFEKEDASERKIRFASNYPPAYLFEKIESIVRKMGFQVHKSNGKVSDHLSCVFMSTDFQLCAFGIRVLRVIVTSCS

SEQ ID NO: 191063 - protein, 184 aa, Zea Mays
MVVLYQKILKGNAHIPKWLSQGAQDLLRKILDPNPITRVDVDGIRAHDWFKQGYAPSAPFNDDEEDINVDEEDSLNMTEQNGIQDKIAINQINAFQLIGMSSCLDLSGFFEKEDASERKIRFASNYPPAYLFEKIESIVRKMGFQVHKSNGKVSDHLSCVFMSTDFQLCAFGIRVLRVIVTSCS

SEQ ID NO: 191064 - protein, 326 aa, Zea Mays
MGKYEMGRTLGEGHFGKVRLARDAGTGRSFAIKILDRQRILAMKIDEQIKREIATLKLLKHPNVVRLYEVSASKTKIYMVLEYVNGGELFDKIALKGKLTEKEGRKLFQQLIDAVGYCHEKGVCHRDLKPENVLVDAKGNIKVSDFGLSALPQNQRKDGLLHTTCGSPNYIAPEVLLNKGYDGSVSDVWSCGVILYVMLTGSLPFDDQNMVVLYQKILKGNAHIPKWLSQGAQDLLRKILDPNPITRVDVDGIRAHDWFKQGYAPSAPFNDDEEDINVDEEDSLNMTENGIQDKIAINQINAFQLIGMSSCLDLSGFFEKEFVGCF

SEQ ID NO: 191065 - protein, 805 aa, Zea Mays
MHLVEDKSNKVLALFSNFEAAHETMEEAELMLSALLKANEGLKLERDNCRQAVELLLSEKSSLIGELKELEASSSCTSQKYDKLHQQINECVTEMTKLAATIRKSFQQIQSVSTVELFALCSEIITFGQDLKRYIIDSRSYIANMVSLIEEKSRSIEQFHHLSTHACGSARQQVESNSCQWGSRKLSQSDYSTDYASLRREFNRKSNVVEGLSFDLKLLQESASNAKDMKDKADEISIALSNTQRELDMKTSTMETMLKKQKVLEEELAENGARLINLRLELEQSQSLSSALLKENKGLRVMLEDETMKNSETKVLLEEKVKVIEGLESQILFLNRCEVGQLMSDIEELNNSIKIMSSDRDNLQAEIFKLRDKLEMALALAEENEAAAIEVRQTAEISKIYAEEKEEEVKILERSVEELEGTVTVLEEEVCNLKEEVRNYQIHKQSEAQFQAINDMLAEEKASKCDAAEESCQAKCHLEKRLQAEILAHQGVRKKIEGLKLEAKRKDDEIGQYKEHIAELVLHSEAQSLLFQEKYNEMEHMVSRQRFGPHESYSETVPKTEKPSGRARGSSSPFRCISSIIQQMNSERDQEILVARQRIEELEGLVSCKQKEICLLTSRLAAVDTMTHDIIRELLGVKLDMTNYANLVDQEELQKLLIASQQQIEQSKAKDTELEALKEQLGHLILERDSLLDDMDQRKTDLLEAQLLVEQLEQREQMLEAQIEMLQLEKDSLQQKTLEMDETIELLARSNQPDINPRMGDNHHRGSSEFSRRLAQSDMLLSHARHEHSRRHAAGSSRTHHGRHR

SEQ ID NO: 191066 - protein, 1207 aa, Zea Mays
MYIGEVNKLRCELIQYQKACTNQVAPEEKENVVATSTNAMQHDQAGKNFSYLSTDDVNRQFMQAEITTNISESFQLELPYEIDSEDPDSPHLHDPETHDFRDPRTASEYDGVLSQCLNLAMASSHDVLNKSTILTDLNFLEKDDTYHVHEKPPFRGIHLHDETLSCQEIETVNSSKHLSQDELENLKRTNEELKEKLFIMAEESNKLSEIIVAKDVEIASLSEEWEAAIFDLTSFLTDGCRSLDDAYQNIDNMISSFPHSNSSVSEHVEKAMKISIEKEKMIFKLQTELQTAQKIGREVKEKLHILKGATLAITEAQQLDNEENSQEELQLVGLLHQKDCIIQELRNNLKPEKFVFAERAKGHSRDDLLLPGSSVDMIEDHDENQPAASQASPDYQSKLDSVMHLVEDKSNKVLALFSNFEAAHETMEEAELMLSALLKANEGLKLERDNCRQAVELLLSEKSSLIGELKELEASSSCTSQKYDKLHQQINECVTEMTKLAATIRKSFQQIQSVSTVELFALCSEIITFGQDLKRYIIDSRSYIANMVSLIEEKSRSIEQFHHLSTHACGSARQQVESNSCQWGSRKLSQSDYSTDYASLRREFNRKSNVVEGLSFDLKLLQESASNAKDMKDKADEISIALSNTQRELDMKTSTMETMLKKQKVLEEELAENGARLINLRLELEQSQSLSSALLKENKGLRVMLEDETMKNSETKVLLEEKVKVIEGLESQILFLNRCEVGQLMSDIEELNNSIKIMSSDRDNLQAEIFKLRDKLEMALALAEENEAAAIEVRQTAEISKIYAEEKEEEVKILERSVEELEGTVTVLEEEVCNLKEEVRNYQIHKQSEAQFQAINDMLAEEKASKCDAAEESCQAKCHLEKRLQAEILAHQGVRKKIEGLKLEAKRKDDEIGQYKEHIAELVLHSEAQSLLFQEKYNEMEHMVSRQRFGPHESYSETVPKTEKPSGRARGSSSPFRCISSIIQQMNSERDQEILVARQRIEELEGLVSCKQKEICLLTSRLAAVDTMTHDIIRELLGVKLDMTNYANLVDQEELQKLLIASQQQIEQSKAKDTELEALKEQLGHLILERDSLLDDMDQRKTDLLEAQLLVEQLEQREQMLEAQIEMLQLEKDSLQQKTLEMDETIELLARSNQPDINPRMGDNHHRGSSEFSRRLAQSDMLLSHARHEHSRRHAAGSSRTHHGRHR

SEQ ID NO: 191067 - protein, 1573 aa, Zea Mays
MMLCCYCYRQKSSGAEGERLKEAANINRSLSTLGLVIMTLVDVANGRSRHVPYRDSRLTFLLQDSLGGNSKTTIVSNVSPSICSSSETLSTLKFAQRAKLIQNNAKVNEDASGDVIALQRQIEELKDQLTCLKKQKDCPGSPSLLLNSYFANEFKTSCGVDEQLDCDLNILKQKVSHLEDVLVRSLRREKSAETKIGKLEAEIQHLNRLVNLMESDAHRLRKRLELRGEKQRLHSIGENAALSMEIQLLQEQINENPQLTHFALENKRLIEELTTLHNFYKQGERDMLLTEISLLRNHFLHILEQKYTTTRKEVEPQGDELIKELDSCRKELDACLENNVLLAREVNKLRCELIQYQKACTNQVAPEEKENVVATSTNAMQHDQAGKNFSYLSTDDVNRQFMQAEITTNISESFQLELPYEIDSEDPDSPHLHDPETHDFRDPRTASEYDGVLSQCLNLAMASSHDVLNKSTILTDLNFLEKDDTYHVHEKPPFRGIHLHDETLSCQEIETVNSSKHLSQDELENLKRTNEELKEKLFIMAEESNKLSEIIVAKDVEIASLSEEWEAAIFDLTSFLTDGCRSLDDAYQNIDNMISSFPHSNSSVSEHVEKAMKISIEKEKMIFKLQTELQTAQKIGREVKEKLHILKGATLAITEAQQLDNEENSQEELQLVGLLHQKDCIIQELRNNLKPEKFVFAERAKGHSRDDLLLPGSSVDMIEDHDENQPAASQASPDYQSKLDSVMHLVEDKSNKVLALFSNFEAAHETMEEAELMLSALLKANEGLKLERDNCRQAVELLLSEKSSLIGELKELEASSSCTSQKYDKLHQQINECVTEMTKLAATIRKSFQQIQSVSTVELFALCSEIITFGQDLKRYIIDSRSYIANMVSLIEEKSRSIEQFHHLSTHACGSARQQVESNSCQWGSRKLSQSDYSTDYASLRREFNRKSNVVEGLSFDLKLLQESASNAKDMKDKADEISIALSNTQRELDMKTSTMETMLKKQKVLEEELAENGARLINLRLELEQSQSLSSALLKENKGLRVMLEDETMKNSETKVLLEEKVKVIEGLESQILFLNRCEVGQLMSDIEELNNSIKIMSSDRDNLQAEIFKLRDKLEMALALAEENEAAAIEVRQTAEISKIYAEEKEEEVKILERSVEELEGTVTVLEEEVCNLKEEVRNYQIHKQSEAQFQAINDMLAEEKASKCDAAEESCQAKCHLEKRLQAEILAHQGVRKKIEGLKLEAKRKDDEIGQYKEHIAELVLHSEAQSLLFQEKVWYATYIVLFCVSISAVYVLINLAVQYNEMEHMVSRQRFGPHESYSETVPKTEKPSGRARGSSSPFRCISSIIQQMNSERDQEILVARQRIEELEGLVSCKQKEICLLTSRLAAVDTMTHDIIRELLGVKLDMTNYANLVDQEELQKLLIASQQQIEQSKAKDTELEALKEQLGHLILERDSLLDDMDQRKTDLLEAQLLVEQLEQREQMLEAQIEMLQLEKDSLQQKTLEMDETIELLARSNQPDINPRMGDNHHRGSSEFSRRLAQSDMLLSHARHEHSRRHAAGSSRTHHGRHR

SEQ ID NO: 191068 - protein, 1896 aa, Zea Mays
MAAPGAGAGGRRASTSRTRRASTAAAESNENEDNAAAPSSSSSAFALPSAPHFSLPPRSPLSAIADPGRNPRSAPATPKSLAGTPRASAAGSGAKDRTCSVGAAKRVFDQRDVAAAEVPLEVPHFELDEDPAFWKDRNVQVLIRIRPISDAENATHGQKRCLLQDSSKTLSWTGHPETMFTFDHVACETISQEKLFRVVGLPMVENCMSGYNGCLFAYGQTGSGKTYTMMGELSKLGNELSKDAGLTPRIFEYLFRRINEEEERRREEKLKYICKCSFLEIYNEQITDLLEPSSTNLQIREDIKKGVYVENLMECYVSSVNDVMLLLLQGVANRKMAATNMNSESSRSHSVFTCVIESRWESDSMTHLRFGRLNLVDLAGSERLVIMTLVDVANGRSRHVPYRDSRLTFLLQDSLGGNSKTTIVSNVSPSICSSSETLSTLKFAQRAKLIQNNAKVNEDASGDVIALQRQIEELKDQLTCLKKQKDCPGSPSLLLNSYFANEFKTSCGVDEQLDCDLNILKQKVSHLEDVLVRSLRREKSAETKIGKLEAEIQHLNRLVNLMESDAHRLRKRLELRGEKQRLHSIGENAALSMEIQLLQEQINENPQLTHFALENKRLIEELTTLHNFYKQGERDMLLTEISLLRNHFLHILEQKYTTTRKEVEPQGDELIKELDSCRKELDACLENNVLLAREVNKLRCELIQYQKACTNQVAPEEKENVVATSTNAMQHDQAGKNFSYLSTDDVNRQFMQAEITTNISESFQLELPYEIDSEDPDSPHLHDPETHDFRDPRTASEYDGVLSQCLNLAMASSHDVLNKSTILTDLNFLEKDDTYHVHEKPPFRGIHLHDETLSCQEIETVNSSKHLSQDELENLKRTNEELKEKLFIMAEESNKLSEIIVAKDVEIASLSEEWEAAIFDLTSFLTDGCRSLDDAYQNIDNMISSFPHSNSSVSEHVEKAMKISIEKEKMIFKLQTELQTAQKIGREVKEKLHILKGATLAITEAQQLDNEENSQEELQLVGLLHQKDCIIQELRNNLKPEKFVFAERAKGHSRDDLLLPGSSVDMIEDHDENQPAASQASPDYQSKLDSVMHLVEDKSNKVLALFSNFEAAHETMEEAELMLSALLKANEGLKLERDNCRQAVELLLSEKSSLIGELKELEASSSCTSQKYDKLHQQINECVTEMTKLAATIRKSFQQIQSVSTVELFALCSEIITFGQDLKRYIIDSRSYIANMVSLIEEKSRSIEQFHHLSTHACGSARQQVESNSCQWGSRKLSQSDYSTDYASLRREFNRKSNVVEGLSFDLKLLQESASNAKDMKDKADEISIALSNTQRELDMKTSTMETMLKKQKVLEEELAENGARLINLRLELEQSQSLSSALLKENKGLRVMLEDETMKNSETKVLLEEKVKVIEGLESQILFLNRCEVGQLMSDIEELNNSIKIMSSDRDNLQAEIFKLRDKLEMALALAEENEAAAIEVRQTAEISKIYAEEKEEEVKILERSVEELEGTVTVLEEEVCNLKEEVRNYQIHKQSEAQFQAINDMLAEEKASKCDAAEESCQAKCHLEKRLQAEILAHQGVRKKIEGLKLEAKRKDDEIGQYKEHIAELVLHSEAQSLLFQEKYNEMEHMVSRQRFGPHESYSETVPKTEKPSGRARGSSSPFRCISSIIQQMNSERDQEILVARQRIEELEGLVSCKQKEICLLTSRLAAVDTMTHDIIRELLGVKLDMTNYANLVDQEELQKLLIASQQQIEQSKAKDTELEALKEQLGHLILERDSLLDDMDQRKTDLLEAQLLVEQLEQREQMLEAQIEMLQLEKDSLQQKTLEMDETIELLARSNQPDINPRMGDNHHRGSSEFSRRLAQSDMLLSHARHEHSRRHAAGSSRTHHGRHR

SEQ ID NO: 191069 - protein, 1929 aa, Zea Mays
MAAPGAGAGGRRASTSRTRRASTAAAESNENEDNAAAPSSSSSAFALPSAPHFSLPPRSPLSAIADPGRNPRSAPATPKSLAGTPRASAAGSGAKDRTCSVGAAKRVFDQRDVAAAEVPLEVPHFELDEDPAFWKDRNVQVLIRIRPISDAENATHGQKRCLLQDSSKTLSWTGHPETMFTFDHVACETISQEKLFRVVGLPMVENCMSGYNGCLFAYGQTGSGKTYTMMGELSKLGNELSKDAGLTPRIFEYLFRRINEEEERRREEKLKYICKCSFLEIYNEQITDLLEPSSTNLQIREDIKKGVYVENLMECYVSSVNDVMLLLLQGVANRKMAATNMNSESSRSHSVFTCVIESRWESDSMTHLRFGRLNLVDLAGSERQKSSGAEGERLKEAANINRSLSTLGLVIMTLVDVANGRSRHVPYRDSRLTFLLQDSLGGNSKTTIVSNVSPSICSSSETLSTLKFAQRAKLIQNNAKVNEDASGDVIALQRQIEELKDQLTCLKKQKDCPGSPSLLLNSYFANEFKTSCGVDEQLDCDLNILKQKVSHLEDVLVRSLRREKSAETKIGKLEAEIQHLNRLVNLMESDAHRLRKRLELRGEKQRLHSIGENAALSMEIQLLQEQINENPQLTHFALENKRLIEELTTLHNFYKQGERDMLLTEISLLRNHFLHILEQKYTTTRKEVEPQGDELIKELDSCRKELDACLENNVLLAREVNKLRCELIQYQKACTNQVAPEEKENVVATSTNAMQHVGFLLFHCDQAGKNFSYLSTDDVNRQFMQAEITTNISESFQLELPYEIDSEDPDSPHLHDPETHDFRDPRTASEYDGVLSQCLNLAMASSHDVLNKSTILTDLNFLEKDDTYHVHEKPPFRGIHLHDETLSCQEIETVNSSKHLSQDELENLKRTNEELKEKLFIMAEESNKLSEIIVAKDVEIASLSEEWEAAIFDLTSFLTDGCRSLDDAYQNIDNMISSFPHSNSSVSEHVEKAMKISIEKEKMIFKLQTELQTAQKIGREVKEKLHILKGATLAITEAQQLDNEENSQEELQLVGLLHQKDCIIQELRNNLKPEKFVFAERAKGHSRDDLLLPGSSVDMIEDHDENQPAASQASPDYQSKLDSVMHLVEDKSNKVLALFSNFEAAHETMEEAELMLSALLKANEGLKLERDNCRQAVELLLSEKSSLIGELKELEASSSCTSQKYDKLHQQINECVTEMTKLAATIRKSFQQIQSVSTVELFALCSEIITFGQDLKRYIIDSRSYIANMVSLIEEKSRSIEQFHHLSTHACGSARQQVESNSCQWGSRKLSQSDYSTDYASLRREFNRKSNVVEGLSFDLKLLQESASNAKDMKDKADEISIALSNTQRELDMKTSTMETMLKKQKVLEEELAENGARLINLRLELEQSQSLSSALLKENKGLRVMLEDETMKNSETKVLLEEKVKVIEGLESQILFLNRCEVGQLMSDIEELNNSIKIMSSDRDNLQAEIFKLRDKLEMALALAEENEAAAIEVRQTAEISKIYAEEKEEEVKILERSVEELEGTVTVLEEEVCNLKEEVRNYQIHKQSEAQFQAINDMLAEEKASKCDAAEESCQAKCHLEKRLQAEILAHQGVRKKIEGLKLEAKRKDDEIGQYKEHIAELVLHSEAQSLLFQEKYNEMEHMVSRQRFGPHESYSETVPKTEKPSGRARGSSSPFRCISSIIQQMNSERDQEILVARQRIEELEGLVSCKQKEICLLTSRLAAVDTMTHDIIRELLGVKLDMTNYANLVDQEELQKLLIASQQQIEQSKAKDTELEALKEQLGHLILERDSLLDDMDQRKTDLLEAQLLVEQLEQREQMLEAQIEMLQLEKDSLQQKTLEMDETIELLARSNQPDINPRMGDNHHRGSSEFSRRLAQSDMLLSHARHEHSRRHAAGSSRTHHGRHR

SEQ ID NO: 191070 - protein, 130 aa, Zea Mays
MSFIAAAAWLPPMAACQAPGPHASGQLARRHHPTPFPSQSREPVEPCRPGAVRHCGQAVGHRAARRNCGPRRDAGSRQPAAPLLDASSAVARRLVGLLAVVADCLCPWSAAPLGHSETAAGVSKPVALIF

SEQ ID NO: 191071 - protein, 88 aa, Zea Mays
MFVDVRLMIEAWVLAFRRWLVELEGSIGEEGERMKTTALVHWSSTTSRGSGKSDVERIFKKVFEDLSDKNTGLLDINSRHVATLMVYK

SEQ ID NO: 191072 - protein, 99 aa, Zea Mays
MAELGSRPHRGLRRPASPIVARGTTSGTQSKRQGFPMRDPARGDFKGLGNPAIAVGYPTPEPAPPPTPPPSSPATKLVAGFIGNYNQVYIRFRRYNVQL

SEQ ID NO: 191073 - protein, 203 aa, Zea Mays
MAPDLVNGVLNWVGTPAMVASLLLFYPPYYLFKTCYSFLSWLFPEDLAGKVVLITGASSGIGEQLAYQYALNRASLALVARRESSLRHVADRALELGARDVVVLPGDVSTPDDCDRFVRTAISHYDRLDHLVCNAGVASVGAFEEIPDVTSYSSQLDVNFWGSVQTTFAALPHLKRSRGRIVVTASATGWNPVPRMSIYNVRS

SEQ ID NO: 191074 - protein, 557 aa, Zea Mays
MGLCHGKPTQIPEAEAEEDPHVASGAGDGGDGATSPSAAAPAAKPGTPKQPKFPFYLPSPLPPSSYKGSPANSSVSSTPARGGLKRPFPPPSPAKHIRALLARRHGSVKPNEVSIPEGGEPELGLDKSFGFSKHFFAKYDLGEEIGRGHFGYTCSAKAKKGEHKGQDVAVKVIPKAKMTTAIAIEDVRREVRILSSLTGHSNLVQFYDAFEDEDNVYIVMELCKGGELLDRILARGGKYSEEDAKVVMVQILGVVSFCHLQGVVHRDLKPENFLFSSKDENSPLKVIDFGLSDFVKPDERLNDIVGSAYYVAPEVLHRSYGTEADMWSIGVIAYILLCGSRPFWARTESGIFRAVLKAEPSFDEAPWPTLTAEAKDFVKRLLNKDYRKRMTAAQALSHPWIRNAQQVKVPLDMIIYKLMRAYISSSSLRKSALRALAKTLTTNQLFYVREQFELLGPNKNGYISLQNLKSALVKNSTDAMKDSRVVDFVNTVCTLQYRKLDFEEFAASAISVYQMEALETWEQHARRAYELFDKEGNRPIVIEELASRTGSGTPTGS

SEQ ID NO: 191075 - protein, 116 aa, Zea Mays
MVLPAWMFPGGGCRRRSSWAAPASQPAPGSEMGAASSPSPPSSCYPSSCAVSQKEEKKNSKLPLASTPTDQPEVLGFYGQTPAQRKNYEPAPLRSFAAPTQRAPASRVPSRTFLVN

SEQ ID NO: 191076 - protein, 152 aa, Zea Mays
MLFSVSRHRTIMNIFEKEPRIHRDVFVAPSAAVIGDVEIGHGSSIWYGSILRGDVNSIHIGSGTNIQDNSLVHVSKANISGKVLPTIIGSNVTVVLYYMHVPLRMKLLLVWVPLCLMEWWLKSTAWLVQDLLLSRIQGFLLERSGSVILPSS

SEQ ID NO: 191077 - protein, 209 aa, Zea Mays
MCLLLPVQQSLGMLRLVMDRQSGDVNSIHIGSGTNIQDNSLVHVSKANISGKVLPTIIGSNVTVGHSAVLHACTIEDEAFVGMGATLLDGVVVEKHSMVGAGSLVKQNTRIPSGEVWVGNPAKFLRKLTEEEIAFIAQSATNYINLAQVHAAENAKSFDEIELEKMLRKKYAHKDEEYDSMLGVVREIPPQLILPDNILPHNAQKAVAR

SEQ ID NO: 191078 - protein, 197 aa, Zea Mays
MLFSVSRHRTIMNIFEKEPRIHRDVFVAPSAAVIGDVEIGHGSSIWYGSILRGHSAVLHACTIEDEAFVGMGATLLDGVVVEKHSMVGAGSLVKQNTRIPSGEVWVGNPAKFLRKLTEEEIAFIAQSATNYINLAQVHAAENAKSFDEIELEKMLRKKYAHKDEEYDSMLGVVREIPPQLILPDNILPHNAQKAVAR

SEQ ID NO: 191079 - protein, 267 aa, Zea Mays
MTMRHRRSSRSHFCCPLPTPVNFVCLHAVKPHLRPLAMAVSTVSIHIFGDVPSSPLVGLLQDKINNWRETSLILTSILFAAVVFWFIGVSEAAQDALDHLFNQGHNLVTENEISDTFTRLVERLPQVVLGSEETTTLSHARMLLALTFYAGHSSQFSGSMDKLIVSKPLSIGYLYSVAELKSGAYSKDTTNISLHATSTFAASKISVIHDNALPNSLLGTVEYELPHVPPWFIHAGIQKLYGVLAGIIRLVGLSTVSVGWCGLLSSR

SEQ ID NO: 191080 - protein, 231 aa, Zea Mays
MDDASIGGHWWPLTPPQTSPSLRRQRRFGQRPPTGSQVLLTVRHRVEPDITTMTMRHRRSSRSHFCCPLPTPVNFVCLHAVKPHLRPLAMAVSTVSIHIFGDVPSSPLVGLLQDKINNWRETSLILTSILFAAVVFWFIGVSEAAQDALDHLFNQGHNLVTENEISDTFTRLVERLPQVVLGSEETTTLSHARMLLALTFYAGHSSQFSGSMDKLIVSKPLSIGLQNICYP

SEQ ID NO: 191081 - protein, 341 aa, Zea Mays
MEAGAGEAAPSAPRRLTLPWKVRLLLLCLDVVAGLSMRRDGTINRSIFNLFDLRATASTRPDRQGVRSADVDASRGLWARVFWPSPESSAAPLPVVVYFHGGAFTLLSAASYVYDAMCRRFCRELGAVVVSVNYRLAPEHRWPAAYEDGVAMLRYLASAGLPDSVDVPVDLSRCFLAGDSAGANIAHHVAQRWTTASSPPRSIPVHLAGAILVQPYFGGEERTEAEVRLDGNVPVVTVRGSDWMWRAFLPEGADRNHSAAHVTDDNADLADGFPPVMVVIGGFDPLQEWQRRYADVLRRRGKEVRVVEFPDAIHTFFLFPELTDHGTLVEAMKAFIREQRI

SEQ ID NO: 191082 - protein, 145 aa, Zea Mays
MQSIICESVFDIFGMFEVLHQLEVSLLNEKVIGDGRRICLLIIDSISSLLAPIIGGKYPQGRSMMISLAMILKKLAYEHNLAVLVTNHMVSAGNGAVKPALGESWKSVPHVRLMISREHSSNICTGTVLKHTLLASGRTAKFVLP

SEQ ID NO: 191083 - protein, 230 aa, Zea Mays
MAAAGGGREATTSGCGLKRRYAPHDQEVCLHSASHAPVKHTGVVMYLDTSNSFSPSRIATIIDGTNDLSDQKGFDLLSKERLKTVMQSIICESVFDIFGMFEVLHQLEVSLLNEKVIGDGRRICLLIIDSISSLLAPIIGGKYPQGRSMMISLAMILKKLAYEHNLAVLVTNHMVSAGNGAVKPALGESWKSVPHVRLMISREHSSNICTGTVLKHTLLASGRTAKFVLP

SEQ ID NO: 191084 - protein, 246 aa, Zea Mays
MSYLLDLKACGLSIDSIDRLLGGGLRQGQLTEVTGPSSSGKTQVCLHSASHAPVKHTGVVMYLDTSNSFSPSRIATIIDGTNDLSDQKGFDLLSKERLKTVMQSIICESVFDIFGMFEVLHQLEVSLLNEKVIGDGRRICLLIIDSISSLLAPIIGGKYPQGRSMMISLAMILKKLAYEHNLAVLVTNHMVSAGNGAVKPALGESWKSVPHVRLMISREHSSNICTGTVLKHTLLASGRTAKFVLP

SEQ ID NO: 191085 - protein, 161 aa, Zea Mays
MELTTYLIKKERLKTVMQSIICESVFDIFGMFEVLHQLEVSLLNEKVIGDGRRICLLIIDSISSLLAPIIGGKYPQGRSMMISLAMILKKLAYEHNLAVLVTNHMVSAGNGAVKPALGESWKSVPHVRLMISREHSSNICTGTVLKHTLLASGRTAKFVLP

SEQ ID NO: 191086 - protein, 160 aa, Zea Mays
MAAAGGGREATTSGCGLKRRYAPHDQEEETMNQDQPSKEDRCGRIWSGIDLLKDVTENKHVLPTGLEGIDRLLGGGLRQGQLTEVTGPSSSGKTQVCLHSASHAPVKHTGVVMYLDTSNSFSPSRIATIIDGTNDLSDQKGRQSTICLAYSCLLSFFEFS

SEQ ID NO: 191087 - protein, 2106 aa, Zea Mays
MLAIMEARDIMDMFSFCMSDLFDSMITNNQLLHIFSTLLQAPKVLRPFTDVLINFLVSSKLEALKQPDSPAAKLVLQLFRFLFIAAAKAPESCERTLQPHVPVIMEVCMRSATEVEKPLGYMHLLRNMFRALNSAKFDSLMRDLIPSLQPCLNMLLSMLDEVILALWSHLRPPPYTWGTKSLELLGKLGGRNRRFLREPLALESKENPEHGLRLVLTFEPATPFLVPLDRCIHQAVGAVMQGNGLEAFYRKKALQFIRVCLDSLLNLRENVPGEGVSPGVLGTLLISNLDPSRRRNDASDMKGDLGVKTKTQLLAEKSVFKTLLVAIIAANADTSLHDEKDDYVVDICRHFAMLFHVDSPSSSQSGFMHPIGSSLPSIIMGSRSRCNTSSNLRELDPLIFLDALVEVLSSENRQHAKAALSALNIFAETLIFLARMKHTGMLRGGPSTPMLVSSPSLNPVYSPPPSVRVAVFEELLPRLLHCCYSSTWQAQMGGVMGLGALVGKVSVDTLCIFQVRVVRGLLFVLKRLPVHANKEQEETNHVLTQVLRVVNNADEANSEPRRQSFQGVVEFLAQELFNPNASMVVRKNVQACLSLLASRTGSEVSELLEPLYLPLLQPLISRPLRSKNIEQQVGTVTALNFCLALRPPLLKLSPELVNFLQEALQIAEADETIWVTRMMNAKVVLTWNKLRTACIELLCTAMAWGDLKAQNHTELRAKIISMFFKSLTCRTTEIVNVAKEGLRQVVQQQRMPKDLLQSSLRPILVNLANTKSLSMPLLQGLARLLELLSNWFNVTLGAKLLDHLKKWLEPEKLVQTQKSWKAGDEPKIAAAMIELFHLLPPAASKFLDDLVTLVIDLERALPEDQFYSEINSPYRAPLAKFLNRYVLEAVDYFLARLSHPKYFRRFMYIICSDTGDLRDALARSPQKILASAFSQFYSQSEASAAQLSSVKDEALTGAVSESITVQSSSNMVTTSESYFNGLELVSALVKLMPEWLRNNRVVFDTLLLAWKSPARLARLQNEQDLSLPQVMESKRLIKCFLNYLRHDRTEVGALFDMLSVFLYRSRIDYSFLKEFYVIEVAEGYSPNLKKTILNHFLNIFQSKQYGQDHLVVTMQILILPMLAHSFQNGQSWEVVDPTIIKTIVEKLLDPPEEVSAEYDEPLRIELLQLATLLLKYLQTDLVHHRKELIKFGWNHLKREDNSSKQWAFVNVCHFLEAYQAPEKIILQVFIALLRTCQPENKLLVKQALDILMPALPRRLPPEKNDSRMPIWIRYTKKVLVEEGHSIPNMIHIFQLIVRHADLFYSCRAHFVPQMVNSLSRLGLPYNTTAENRRLAIELAGLVVAWERQRQSEMKVAQESESQNQLGDMLNPSVIGGDPKRSSDVPSFADDLSLPDEEYKPNAAMEEMIITFLIRVSLVIEPKDKESSSMYKQALDLLTQALEVWPNANVKFNYLEKLLGNLSPTPQSKDPASALAQGLDVMNKVLEKQPRLFIRNNINHISQILEPCFGNKMLDAGKSLCSLLKMVFSAFPLEAATTPQDIKLLHQRVQELIHKNLAAVTTQQIALELNNAHSIISFSLFVLNALAEVQKNFIDPFIGLLFRVLQRLARDMGSSAGSHIRQGQRPELDSSVNSRSTIDSTVISNMKTVLKLISERVMSSSDHRKSMGQILQALLSEKGTDSSILLCMLDMIKTWIEEDCRLASSTGSVSSLNPKEIITYLHKLSLVDRKSFPPAAQEEWDAKYLQLLYSLCADSTKYPLSFRQEFFHKIERQYMLGLRAKDPEMRKRFFKLYHDTVGKTLFSRLQFIIQLQDWEAVSDVFWLKQGLDLVLAILVENEPITLAANSARVPTLMIAGPVPDRITMPQQVPDAQESMDGTTLSFDSLAARHAQFLNDANKLVVADIMAPLKELAFADPNVAYHLWVLVFPIVWVTLHKEEQVALAKPIIALLSKDYHKRQQGCRPNVAQALLEGLHLSHPQPRMPSELIKYIGKTCNVWYIAIALLESHIVHMNEAKCSESLAELYRLLNEDDMRCGLWKRKSITAETRAGLSLAQHGYWQQAQNLFYQAMIKATQGTYNNTVPKAEMCLWEEQWLSCASHLGQWEVLA

SEQ ID NO: 191088 - protein, 1461 aa, Zea Mays
MMNAKVVLTWNKLRTACIELLCTAMAWGDLKAQNHTELRAKIISMFFKSLTCRTTEIVNVAKEGLRQVVQQQRMPKDLLQSSLRPILVNLANTKSLSMPLLQGLARLLELLSNWFNVTLGAKLLDHLKKWLEPEKLVQTQKSWKAGDEPKIAAAMIELFHLLPPAASKFLDDLVTLVIDLERALPEDQFYSEINSPYRAPLAKFLNRYVLEAVDYFLARLSHPKYFRRFMYIICSDTGDLRDALARSPQKILASAFSQFYSQSEASAAQLSSVKDEALTGAVSESITVQSSSNMVTTSESYFNGLELVSALVKLMPEWLRNNRVVFDTLLLAWKSPARLARLQNEQDLSLPQVMESKRLIKCFLNYLRHDRTEVGALFDMLSVFLYRSRIDYSFLKEFYVIEVAEGYSPNLKKTILNHFLNIFQSKQYGQDHLVVTMQILILPMLAHSFQNGQSWEVVDPTIIKTIVEKLLDPPEEVSAEYDEPLRIELLQLATLLLKYLQTDLVHHRKELIKFGWNHLKREDNSSKQWAFVNVCHFLEAYQAPEKIILQVFIALLRTCQPENKLLVKQALDILMPALPRRLPPEKNDSRMPIWIRYTKKVLVEEGHSIPNMIHIFQLIVRHADLFYSCRAHFVPQMVNSLSRLGLPYNTTAENRRLAIELAGLVVAWERQRQSEMKVAQESESQNQLGDMLNPSVIGGDPKRSSDVPSFADDLSKRVKVEPGLQPLCVMSPGGASIPNIETPGSSGLPDEEYKPNAAMEEMIITFLIRVSLVIEPKDKESSSMYKQALDLLTQALEVWPNANVKFNYLEKLLGNLSPTPQSKDPASALAQGLDVMNKVLEKQPRLFIRNNINHISQILEPCFGNKMLDAGKSLCSLLKMVFSAFPLEAATTPQDIKLLHQRVQELIHKNLAAVTTQQIALELNNAHSIISFSLFVLNALAEVQKNFIDPFIGLLFRVLQRLARDMGSSAGSHIRQGQRPELDSSVNSRSTIDSTVISNMKTVLKLISERVMSSSDHRKSMGQILQALLSEKGTDSSILLCMLDMIKTWIEEDCRLASSTGSVSSLNPKEIITYLHKLSLVDRKSFPPAAQEEWDAKYLQLLYSLCADSTKYPLSFRQEFFHKIERQYMLGLRAKDPEMRKRFFKLYHDTVGKTLFSRLQFIIQLQDWEAVSDVFWLKQGLDLVLAILVENEPITLAANSARVPTLMIAGPVPDRITMPQQVPDAQESMDGTTLSFDSLAARHAQFLNDANKLVVADIMAPLKELAFADPNVAYHLWVLVFPIVWVTLHKEEQVALAKPIIALLSKDYHKRQQGCRPNVAQALLEGLHLSHPQPRMPSELIKYIGKTCNVWYIAIALLESHIVHMNEAKCSESLAELYRLLNEDDMRCGLWKRKSITAETRAGLSLAQHGYWQQAQNLFYQAMIKATQGTYNNTVPKAEMCLWEEQWLSCASHLGQWEVLA

SEQ ID NO: 191089 - protein, 1161 aa, Zea Mays
MAPINSGNMEQHSQRLLEPDLPVQVRLQLAMEVRDSLEMTHTPDYLNFLRCYFRAFSAILTAYTKPQATENAEHKLRNVVIEILNRLPHSEVLRPFVQDLLKLSLRVLTQDNEDNALLAIRIVFDLLRNFRPTVEAEVQPFLDFVVNIYHKFPTTVSYFFDNPNTSASMAASMPMQHLDPTADASVMMQVPGGGQLNPSARSFKIVTESPLVVMFLFQLYAKLVQTNIPHLLPLMVAAISIKGPDKVPPHLKTPFNDLKGAQVKTLSFLTYLLKSNADYIKSYEESICKSIVNLLVTCPPDSVSIRKELLVGLKQVLNTEYKRGLFPLIDTLLDERVLIGTGRVCIETLRPLAYTLLAELVHYVREDISLPQVEPIYQKGVDQQSMDEARVLLGRILDAFVGKFRTLKRTIPQLLEEGEEGKEQPNLRMKLEVPLQTVLNLQQPLEYTKEINDYKSLIKTLAVGMKTIIWSITHAHWPRPQVRKTSGVLKSGVHCLALFKEKDDDREILQSFSQMLAIMEARDIMDMFSFCMSDLFDSMITNNQLLHIFSTLLQAPKVLRPFTDVLINFLVSSKLEALKQPDSPAAKLVLQLFRFLFIAAAKAPESCERTLQPHVPVIMEVCMRSATEVEKPLGYMHLLRNMFRALNSAKFDSLMRDLIPSLQPCLNMLLSMLDEVILALWSHLRPPPYTWGTKSLELLGKLGGRNRRFLREPLALESKENPEHGLRLVLTFEPATPFLVPLDRCIHQAVGAVMQGNGLEAFYRKKALQFIRVCLDSLLNLRENVPGEGVSPGVLGTLLISNLDPSRRRNDASDMKGDLGVKTKTQLLAEKSVFKTLLVAIIAANADTSLHDEKDDYVVDICRHFAMLFHVDSPSSSQSGFMHPIGSSLPSIIMGSRSRCNTSSNLRELDPLIFLDALVEVLSSENRQHAKAALSALNIFAETLIFLARMKHTGMLRGGPSTPMLVSSPSLNPVYSPPPSVRVAVFEELLPRLLHCCYSSTWQAQMGGVMGLGALVGKVSVDTLCIFQVRVVRGLLFVLKRLPVHANKEQEETNHVLTQVLRVVNNADEANSEPRRQSFQGVVEFLAQELFNPNASMVVRKNVQACLSLLASRTGSEVSELLEPLYLPLLQPLISRPLRSKNIEQQHYKLPRLMKLYGSLG

SEQ ID NO: 191090 - protein, 1942 aa, Zea Mays
MAPINSGNMEQHSQRLLEPDLPVQVRLQLAMEVRDSLEMTHTPDYLNFLRCYFRAFSAILTAYTKPQATENAEHKLRNVVIEILNRLPHSEVLRPFVQDLLKLSLRVLTQDNEDNALLAIRIVFDLLRNFRPTVEAEVQPFLDFVVNIYHKFPTTVSYFFDNPNTSASMAASMPMQHLDPTADASVMMQVPGGGQLNPSARSFKIVTESPLVVMFLFQLYAKLVQTNIPHLLPLMVAAISIKGPDKVPPHLKTPFNDLKGAQVKTLSFLTYLLKSNADYIKSYEESICKSIVNLLVTCPPDSVSIRKARYDLELLVGLKQVLNTEYKRGLFPLIDTLLDERVLIGTGRVCIETLRPLAYTLLAELVHYVREDISLPQLSRIIYLFSRNMHDSSLTLIIHTTSARLMLNLVEPIYQKGVDQQSMDEARVLLGRILDAFVGKFRTLKRTIPQLLEEGEEGKEQPNLRMKLEVPLQTVLNLQQPLEYTKEINDYKSLIKTLAVGMKTIIWSITHAHWPRPQQQNQQSSNLSLQHFRGLREDEVRKTSGVLKSGVHCLALFKEKDDDREILQSFSQMLAIMEARDIMDMFSFCMSDLFDSMITNNQLLHIFSTLLQAPKVLRPFTDVLINFLVSSKLEALKQPDSPAAKLVLQLFRFLFIAAAKAPESCERTLQPHVPVIMEVCMRSATEVEKPLGYMHLLRNMFRALNSAKFDSLMRDLIPSLQPCLNMLLSMLDEVILALWSHLRPPPYTWGTKSLELLGKLGGRNRRFLREPLALESKENPEHGLRLVLTFEPATPFLVPLDRCIHQAVGAVMQGNGLEAFYRKKALQFIRVCLDSLLNLRENVPGEGVSPGVLGTLLISNLDPSRRRNDASDMKGDLGVKTKTQLLAEKSVFKTLLVAIIAANADTSLHDEKDDYVVDICRHFAMLFHVDSPSSSQSGFMHPIGSSLPSIIMGSRSRCNTSSNLRELDPLIFLDALVEVLSSENRQHAKAALSALNIFAETLIFLARMKHTGMLRGGPSTPMLVSSPSLNPVYSPPPSVRVAVFEELLPRLLHCCYSSTWQAQMGGVMGLGALVGKVSVDTLCIFQVRVVRGLLFVLKRLPVHANKEQEETNHVLTQVLRVVNNADEANSEPRRQSFQGVVEFLAQELFNPNASMVVRKNVQACLSLLASRTGSEVSELLEPLYLPLLQPLISRPLRSKNIEQQVGTVTALNFCLALRPPLLKLSPELVNFLQEALQIAEADETIWVTRMMNAKVVLTWNKLRTACIELLCTAMAWGDLKAQNHTELRAKIISMFFKSLTCRTTEIVNVAKEGLRQVVQQQRMPKDLLQSSLRPILVNLANTKSLSMPLLQGLARLLELLSNWFNVTLGAKLLDHLKKWLEPEKLVQTQKSWKAGDEPKIAAAMIELFHLLPPAASKFLDDLVTLVIDLERALPEDQFYSEINSPYRAPLAKFLNRYVLEAVDYFLARLSHPKYFRRFMYIICSDTGDLRDALARSPQKILASAFSQFYSQSEASAAQLSSVKDEALTGAVSESITVQSSSNMVTTSESYFNGLELVSALVKLMPEWLRNNRVVFDTLLLAWKSPARLARLQNEQDLSLPQVMESKRLIKCFLNYLRHDRTEVGALFDMLSVFLYRSRIDYSFLKEFYVIEVAEGYSPNLKKTILNHFLNIFQSKQYGQDHLVVTMQILILPMLAHSFQNGQSWEVVDPTIIKTIVEKLLDPPEEVSAEYDEPLRIELLQLATLLLKYLQTDLVHHRKELIKFGWNHLKREDNSSKQWAFVNVCHFLEAYQAPEKIILQVFIALLRTCQPENKLLVKQALDILMPALPRRLPPEKNDSRMPIWIRYTKKVLVEEGHSIPNMIHIFQLIVRHADLFYSCRAHFVPQMVNSLSRLGLPYNTTAENRRLAIELAGLVVAWERQRQSEMKVAQESESQNQLGITCD

SEQ ID NO: 191091 - protein, 2778 aa, Zea Mays
MAPINSGNMEQHSQRLLEPDLPVQVRLQLAMEVRDSLEMTHTPDYLNFLRCYFRAFSAILTAYTKPQATENAEHKLRNVVIEILNRLPHSEVLRPFVQDLLKLSLRVLTQDNEDNALLAIRIVFDLLRNFRPTVEAEVQPFLDFVVNIYHKFPTTVSYFFDNPNTSASMAASMPMQHLDPTADASVMMQVPGGGQLNPSARSFKIVTESPLVVMFLFQLYAKLVQTNIPHLLPLMVAAISIKGPDKVPPHLKTPFNDLKGAQTLSFLTYLLKSNADYIKSYEESICKSIVNLLVTCPPDSVSIRKELLVGLKQVLNTEYKRGLFPLIDTLLDERVLIGTGRVCIETLRPLAYTLLAELVHYVREDISLPQLSRIIYLFSRNMHDSSLTLIIHTTSARLMLNLVEPIYQKGVDQQSMDEARVLLGRILDAFVGKFRTLKRTIPQLLEEGEEGKEQPNLRMKLEVPLQTVLNLQQPLEYTKEINDYKSLIKTLAVGMKTIIWSITHAHWPRPQQQNQQSSNLSLQHFRGLREDEVRKTSGVLKSGVHCLALFKEKDDDREILQSFSQMLAIMEARDIMDMFSFCMSDLFDSMITNNQLLHIFSTLLQAPKVLRPFTDVLINFLVSSKLEALKQPDSPAAKLVLQLFRFLFIAAAKAPESCERTLQPHVPVIMEVCMRSATEVEKPLGYMHLLRNMFRALNSAKFDSLMRDLIPSLQPCLNMLLSMLDGPISEDMRDLILELCLILPARLSSLLPHIPRLMKPLVLALKGSDDLVSLALRTLEFWIDSLNPDFLEPSMANLMSEVILALWSHLRPPPYTWGTKSLELLGKLGGRNRRFLREPLALESKENPEHGLRLVLTFEPATPFLVPLDRCIHQAVGAVMQGNGLEAFYRKKALQFIRVCLDSLLNLRENVPGEGVSPGVLGTLLISNLDPSRRRNDASDMKGDLGVKTKTQLLAEKSVFKTLLVAIIAANADTSLHDEKDDYVVDICRHFAMLFHVDSPSSSQSGFMHPIGSSLPSIIMGSRSRCNTSSNLRELDPLIFLDALVEVLSSENRQHAKAALSALNIFAETLIFLARMKHTGMLRGGPSTPMLVSSPSLNPVYSPPPSVRVAVFEELLPRLLHCCYSSTWQAQMGGVMGLGALVGKVSVDTLCIFQVRVVRGLLFVLKRLPVHANKEQEETNHVLTQVLRVVNNADEANSEPRRQSFQGVVEFLAQELFNPNASMVVRKNVQACLSLLASRTGSEVSELLEPLYLPLLQPLISRPLRSKNIEQQVGTVTALNFCLALRPPLLKLSPELVNFLQEALQIAEADETIWVTRMMNAKVVLTWNKLRTACIELLCTAMAWGDLKAQNHTELRAKIISMFFKSLTCRTTEIVNVAKEGLRQVVQQQRMPKDLLQSSLRPILVNLANTKSLSMPLLQGLARLLELLSNWFNVTLGAKLLDHLKKWLEPEKLVQTQKSWKAGDEPKIAAAMIELFHLLPPAASKFLDDLVTLVIDLERALPEDQFYSEINSPYRAPLAKFLNRYVLEAVDYFLARLSHPKYFRRFMYIICSDTGDLRDALARSPQKILASAFSQFYSQSEASAAQLSSVKDEALTGAVSESITVQSSSNMVTTSESYFNGLELVSALVKLMPEWLRNNRVVFDTLLLAWKSPARLARLQNEQDLSLPQVMESKRLIKCFLNYLRHDRTEVGALFDMLSVFLYRSRIDYSFLKEFYVIEVAEGYSPNLKKTILNHFLNIFQSKQYGQDHLVVTMQILILPMLAHSFQNGQSWEVVDPTIIKTIVEKLLDPPEEVSAEYDEPLRIELLQLATLLLKYLQTDLVHHRKELIKFGWNHLKREDNSSKQWAFVNVCHFLEAYQAPEKIILQVFIALLRTCQPENKLLVKQALDILMPALPRRLPPEKNDSRMPIWIRYTKKVLVEEGHSIPNMIHIFQLIVRHADLFYSCRAHFVPQMVNSLSRLGLPYNTTAENRRLAIELAGLVVAWERQRQSEMKVAQESESQNQLGDMLNPSVIGGDPKRSSDVPSFADDLSKRVKVEPGLQPLCVMSPGGASIPNIETPGSSGLPDEEYKPNAAMEEMIITFLIRVSLVIEPKDKESSSMYKQALDLLTQALEVWPNANVKFNYLEKLLGNLSPTPQSKDPASALAQGLDVMNKVLEKQPRLFIRNNINHISQILEPCFGNKMLDAGKSLCSLLKMVFSAFPLEAATTPQDIKLLHQRVQELIHKNLAAVTTQQIALELNNAHSIISFSLFVLNALAEVQKNFIDPFIGLLFRVLQRLARDMGSSAGSHIRQGQRPELDSSVNSRSTIDSTVISNMKTVLKLISERVMSSSDHRKSMGQILQALLSEKGTDSSILLCMLDMIKTWIEEDCRLASSTGSVSSLNPKEIITYLHKLSLVDRKSFPPAAQEEWDAKYLQLLYSLCADSTKYPLSFRQEFFHKIERQYMLGLRAKDPEMRKRFFKLYHDTVGKTLFSRLQFIIQLQDWEAVSDVFWLKQGLDLVLAILVENEPITLAANSARVPTLMIAGPVPDRITMPQQVPDAQESMDGTTLSFDSLAARHAQFLNDANKLVVADIMAPLKELAFADPNVAYHLWVLVFPIVWVTLHKEEQVALAKPIIALLSKDYHKRQQGCRPNVAQALLEGLHLSHPQPRMPSELIKYIGKTCNVWYIAIALLESHIVHMNEAKCSESLAELYRLLNEDDMRCGLWKRKSITAETRAGLSLAQHGYWQQAQNLFYQAMIKATQGTYNNTVPKAEMCLWEEQWLSCASHLGQWEVLA

SEQ ID NO: 191092 - protein, 2683 aa, Zea Mays
MAPINSGNMEQHSQRLLEPDLPVQVRLQLAMEVRDSLEMTHTPDYLNFLRCYFRAFSAILTAYTKPQATENAEHKLRNVVIEILNRLPHSEVLRPFVQDLLKLSLRVLTQDNEDNALLAIRIVFDLLRNFRPTVEAEVQPFLDFVVNIYHKFPTTVSYFFDNPNTSASMAASMPMQHLDPTADASVMMQVPGGGQLNPSARSFKIVTESPLVVMFLFQLYAKLVQTNIPHLLPLMVAAISIKGPDKVPPHLKTPFNDLKGAQVKTLSFLTYLLKSNADYIKSYEESICKSIVNLLVTCPPDSVSIRKELLVGLKQVLNTEYKRGLFPLIDTLLDERVLIGTGRVCIETLRPLAYTLLAELVHYVREDISLPQVEPIYQKGVDQQSMDEARVLLGRILDAFVGKFRTLKRTIPQLLEEGEEGKEQPNLRMKLEVPLQTVLNLQQPLEYTKEINDYKSLIKTLAVGMKTIIWSITHAHWPRPQQQNQQSSNLSLQHFRGLREDEVRKTSGVLKSGVHCLALFKEKDDDREILQSFSQMLAIMEARDIMDMFSFCMSDLFDSMITNNQLLHIFSTLLQAPKVLRPFTDVLINFLVSSKLEALKQPDSPAAKLVLQLFRFLFIAAAKAPESCERTLQPHVPVIMEVCMRSATEVEKPLGYMHLLRNMFRALNSAKFDSLMRDLIPSLQPCLNMLLSMLDGPISEDMRDLILELCLILPARLSSLLPHIPRLMKPLVLALKGSDDLVSLALRTLEFWIDSLNPDFLEPSMANLMSEVILALWSHLRPPPYTWGTKSLELLGKLGGRNRRFLREPLALESKENPEHGLRLVLTFEPATPFLVPLDRCIHQAVGAVMQGNGLEAFYRKKALQFIRVCLDSLLNLRENVPGEGVSPGVLGTLLISNLDPSRRRNDASDMKGDLGVKTKTQLLAEKSVFKTLLVAIIAANADTSLHDEKDDYVVDICRHFAMLFHVDSPSSSQSGFMHPIGSSLPSIIMGSRSRCNTSSNLRELDPLIFLDALVEVLSSENRQHAKAALSALNIFAETLIFLARMKHTGMLRGGPSTPMLVSSPSLNPVYSPPPSVRVAVFEELLPRLLHCCYSSTWQAQMGGVMGLGALVGKVSVDTLCIFQVRVVRGLLFVLKRLPVHANKEQEETNHVLTQVLRVVNNADEANSEPRRQSFQGVVEFLAQELFNPNASMVVRKNVQACLSLLASRTGSEVSELLEPLYLPLLQPLISRPLRSKNIEQQVGTVTALNFCLALRPPLLKLSPELVNFLQEALQIAEADETIWVTRMMNAKVVLTWNKLRTACIELLCTAMAWGDLKAQNHTELRAKIISMFFKSLTCRTTEIVNVAKEGLRQVVQQQRMPKDLLQSSLRPILVNLANTKSLSMPLLQGLARLLELLSNWFNVTLGAKLLDHLKKWLEPEKLVQTQKSWKAGDEPKIAAAMIELFHLLPPAASKFLDDLVTLVIDLERALPEDQFYSEINSPYRAPLAKFLNRYVLEAVDYFLARLSHPKYFRRFMYIICSDTGDLRDALARSPQKILASAFSQFYSQSEASAAQLSSVKDEALTGAVSESITVQSSSNMVTTSESYFNGLELVSALVKLMPEWLRNNRVVFDTLLLAWKSPARLARLQNEQDLSLPQVMESKRLIKCFLNYLRHDRTEVGALFDMLSVFLYRSRIDYSFLKEFYVIEVAEGYSPNLKKTILNHFLNIFQSKQYGQDHLVVTMQILILPMLAHSFQNGQSWEVVDPTIIKTIVEKLLDPPEEVSAEYDEPLRIELLQLATLLLKYLQTDLVHHRKELIKFGWNHLKREDNSSKQWAFVNVCHFLEAYQAPEKIILQLKLIVRHADLFYSCRAHFVPQMVNSLSRLGLPYNTTAENRRLAIELAGLVVAWERQRQSEMKVAQESESQNQLGDMLNPSVIGGDPKRSSDVPSFADDLSKRVKVEPGLQPLCVMSPGGASIPNIETPGSSGLPDEEYKPNAAMEEMIITFLIRVSLVIEPKDKESSSMYKQALDLLTQALEVWPNANVKFNYLEKLLGNLSPTPQSKDPASALAQGLDVMNKVLEKQPRLFIRNNINHISQILEPCFGNKMLDAGKSLCSLLKMVFSAFPLEAATTPQDIKLLHQRVQELIHKNLAAVTTQQIALELNNAHSIISFSLFVLNALAEVQKNFIDPFIGLLFRVLQRLARDMGSSAGSHIRQGQRPELDSSVNSRSTIDSTVISNMKTVLKLISERVMSSSDHRKSMGQILQALLSEKGTDSSILLCMLDMIKTWIEEDCRLASSTGSVSSLNPKEIITYLHKLSLVDRKSFPPAAQEEWDAKYLQLLYSLCADSTKYPLSFRQEFFHKIERQYMLGLRAKDPEMRKRFFKLYHDTVGKTLFSRLQFIIQLQDWEAVSDVFWLKQGLDLVLAILVENEPITLAANSARVPTLMIAGPVPDRITMPQQVPDAQESMDGTTLSFDSLAARHAQFLNDANKLVVADIMAPLKELAFADPNVAYHLWVLVFPIVWVTLHKEEQVALAKPIIALLSKDYHKRQQGCRPNVAQALLEGLHLSHPQPRMPSELIKYIGKTCNVWYIAIALLESHIVHMNEAKCSESLAELYRLLNEDDMRCGLWKRKSITAETRAGLSLAQHGYWQQAQNLFYQAMIKATQGTYNNTVPKAEMCLWEEQWLSCASHLGQWEVLA

SEQ ID NO: 191093 - protein, 2785 aa, Zea Mays
MAPINSGNMEQHSQRLLEPDLPVQVRLQLAMEVRDSLEMTHTPDYLNFLRCYFRAFSAILTAYTKPQATENAEHKLRNVVIEILNRLPHSEVLRPFVQDLLKLSLRVLTQDNEDNALLAIRIVFDLLRNFRPTVEAEVQPFLDFVVNIYHKFPTTVSYFFDNPNTSASMAASMPMQHLDPTADASVMMQVPGGGQLNPSARSFKIVTESPLVVMFLFQLYAKLVQTNIPHLLPLMVAAISIKGPDKVPPHLKTPFNDLKGAQVKTLSFLTYLLKSNADYIKSYEESICKSIVNLLVTCPPDSVSIRKARYDLELLVGLKQVLNTEYKRGLFPLIDTLLDERVLIGTGRVCIETLRPLAYTLLAELVHYVREDISLPQLSRIIYLFSRNMHDSSLTLIIHTTSARLMLNLVEPIYQKGVDQQSMDEARVLLGRILDAFVGKFRTLKRTIPQLLEEGEEGKEQPNLRMKLEVPLQTVLNLQQPLEYTKEINDYKSLIKTLAVGMKTIIWSITHAHWPRPQQQNQQSSNLSLQHFRGLREDEVRKTSGVLKSGVHCLALFKEKDDDREILQSFSQMLAIMEARDIMDMFSFCMSDLFDSMITNNQLLHIFSTLLQAPKVLRPFTDVLINFLVSSKLEALKQPDSPAAKLVLQLFRFLFIAAAKAPESCERTLQPHVPVIMEVCMRSATEVEKPLGYMHLLRNMFRALNSAKFDSLMRDLIPSLQPCLNMLLSMLDGPISEDMRDLILELCLILPARLSSLLPHIPRLMKPLVLALKGSDDLVSLALRTLEFWIDSLNPDFLEPSMANLMSEVILALWSHLRPPPYTWGTKSLELLGKLGGRNRRFLREPLALESKENPEHGLRLVLTFEPATPFLVPLDRCIHQAVGAVMQGNGLEAFYRKKALQFIRVCLDSLLNLRENVPGEGVSPGVLGTLLISNLDPSRRRNDASDMKGDLGVKTKTQLLAEKSVFKTLLVAIIAANADTSLHDEKDDYVVDICRHFAMLFHVDSPSSSQSGFMHPIGSSLPSIIMGSRSRCNTSSNLRELDPLIFLDALVEVLSSENRQHAKAALSALNIFAETLIFLARMKHTGMLRGGPSTPMLVSSPSLNPVYSPPPSVRVAVFEELLPRLLHCCYSSTWQAQMGGVMGLGALVGKVSVDTLCIFQVRVVRGLLFVLKRLPVHANKEQEETNHVLTQVLRVVNNADEANSEPRRQSFQGVVEFLAQELFNPNASMVVRKNVQACLSLLASRTGSEVSELLEPLYLPLLQPLISRPLRSKNIEQQVGTVTALNFCLALRPPLLKLSPELVNFLQEALQIAEADETIWVTRMMNAKVVLTWNKLRTACIELLCTAMAWGDLKAQNHTELRAKIISMFFKSLTCRTTEIVNVAKEGLRQVVQQQRMPKDLLQSSLRPILVNLANTKSLSMPLLQGLARLLELLSNWFNVTLGAKLLDHLKKWLEPEKLVQTQKSWKAGDEPKIAAAMIELFHLLPPAASKFLDDLVTLVIDLERALPEDQFYSEINSPYRAPLAKFLNRYVLEAVDYFLARLSHPKYFRRFMYIICSDTGDLRDALARSPQKILASAFSQFYSQSEASAAQLSSVKDEALTGAVSESITVQSSSNMVTTSESYFNGLELVSALVKLMPEWLRNNRVVFDTLLLAWKSPARLARLQNEQDLSLPQVMESKRLIKCFLNYLRHDRTEVGALFDMLSVFLYRSRIDYSFLKEFYVIEVAEGYSPNLKKTILNHFLNIFQSKQYGQDHLVVTMQILILPMLAHSFQNGQSWEVVDPTIIKTIVEKLLDPPEEVSAEYDEPLRIELLQLATLLLKYLQTDLVHHRKELIKFGWNHLKREDNSSKQWAFVNVCHFLEAYQAPEKIILQVFIALLRTCQPENKLLVKQALDILMPALPRRLPPEKNDSRMPIWIRYTKKVLVEEGHSIPNMIHIFQLIVRHADLFYSCRAHFVPQMVNSLSRLGLPYNTTAENRRLAIELAGLVVAWERQRQSEMKVAQESESQNQLGDMLNPSVIGGDPKRSSDVPSFADDLSKRVKVEPGLQPLCVMSPGGASIPNIETPGSSGLPDEEYKPNAAMEEMIITFLIRVSLVIEPKDKESSSMYKQALDLLTQALEVWPNANVKFNYLEKLLGNLSPTPQSKDPASALAQGLDVMNKVLEKQPRLFIRNNINHISQILEPCFGNKMLDAGKSLCSLLKMVFSAFPLEAATTPQDIKLLHQRVQELIHKNLAAVTTQQIALELNNAHSIISFSLFVLNALAEVQKNFIDPFIGLLFRVLQRLARDMGSSAGSHIRQGQRPELDSSVNSRSTIDSTVISNMKTVLKLISERVMSSSDHRKSMGQILQALLSEKGTDSSILLCMLDMIKTWIEEDCRLASSTGSVSSLNPKEIITYLHKLSLVDRKSFPPAAQEEWDAKYLQLLYSLCADSTKYPLSFRQEFFHKIERQYMLGLRAKDPEMRKRFFKLYHDTVGKTLFSRLQFIIQLQDWEAVSDVFWLKQGLDLVLAILVENEPITLAANSARVPTLMIAGPVPDRITMPQQVPDAQESMDGTTLSFDSLAARHAQFLNDANKLVVADIMAPLKELAFADPNVAYHLWVLVFPIVWVTLHKEEQVALAKPIIALLSKDYHKRQQGCRPNVAQALLEGLHLSHPQPRMPSELIKYIGKTCNVWYIAIALLESHIVHMNEAKCSESLAELYRLLNEDDMRCGLWKRKSITAETRAGLSLAQHGYWQQAQNLFYQAMIKATQGTYNNTVPKAEMCLWEEQWLSCASHLGQWEVLA

SEQ ID NO: 191094 - protein, 2732 aa, Zea Mays
MAPINSGNMEQHSQRLLEPDLPVQVRLQLAMEVRDSLEMTHTPDYLNFLRCYFRAFSAILTAYTKPQATENAEHKLRNVVIEILNRLPHSEVLRPFVQDLLKLSLRVLTQDNEDNALLAIRIVFDLLRNFRPTVEAEVQPFLDFVVNIYHKFPTTVSYFFDNPNTSASMAASMPMQHLDPTADASVMMQVPGGGQLNPSARSFKIVTESPLVVMFLFQLYAKLVQTNIPHLLPLMVAAISIKGPDKVPPHLKTPFNDLKGAQVKTLSFLTYLLKSNADYIKSYEESICKSIVNLLVTCPPDSVSIRKARYDLELLVGLKQVLNTEYKRGLFPLIDTLLDERVLIGTGRVCIETLRPLAYTLLAELVHYVREDISLPQVEPIYQKGVDQQSMDEARVLLGRILDAFVGKFRTLKRTIPQLLEEGEEGKEQPNLRMKLEVPLQTVLNLQQPLEYTKEINDYKSLIKTLAVGMKTIIWSITHAHWPRPQVRKTSGVLKSGVHCLALFKEKDDDREILQSFSQMLAIMEARDIMDMFSFCMSDLFDSMITNNQLLHIFSTLLQAPKVLRPFTDVLINFLVSSKLEALKQPDSPAAKLVLQLFRFLFIAAAKAPESCERTLQPHVPVIMEVCMRSATEVEKPLGYMHLLRNMFRALNSAKFDSLMRDLIPSLQPCLNMLLSMLDGPISEDMRDLILELCLILPARLSSLLPHIPRLMKPLVLALKGSDDLVSLALRTLEFWIDSLNPDFLEPSMANLMSEVILALWSHLRPPPYTWGTKSLELLGKLGGRNRRFLREPLALESKENPEHGLRLVLTFEPATPFLVPLDRCIHQAVGAVMQGNGLEAFYRKKALQFIRVCLDSLLNLRENVPGEGVSPGVLGTLLISNLDPSRRRNDASDMKGDLGVKTKTQLLAEKSVFKTLLVAIIAANADTSLHDEKDDYVVDICRHFAMLFHVDSPSSSQSGFMHPIGSSLPSIIMGSRSRCNTSSNLRELDPLIFLDALVEVLSSENRQHAKAALSALNIFAETLIFLARMKHTGMLRGGPSTPMLVSSPSLNPVYSPPPSVRVAVFEELLPRLLHCCYSSTWQAQMGGVMGLGALVGKVSVDTLCIFQVRVVRGLLFVLKRLPVHANKEQEETNHVLTQVLRVVNNADEANSEPRRQSFQGVVEFLAQELFNPNASMVVRKNVQACLSLLASRTGSEVSELLEPLYLPLLQPLISRPLRSKNIEQQVGTVTALNFCLALRPPLLKLSPELVNFLQEALQIAEADETIWVTRMMNAKVVLTWNKLRTACIELLCTAMAWGDLKAQNHTELRAKIISMFFKSLTCRTTEIVNVAKEGLRQVVQQQRMPKDLLQSSLRPILVNLANTKSLSMPLLQGLARLLELLSNWFNVTLGAKLLDHLKKWLEPEKLVQTQKSWKAGDEPKIAAAMIELFHLLPPAASKFLDDLVTLVIDLERALPEDQFYSEINSPYRAPLAKFLNRYVLEAVDYFLARLSHPKYFRRFMYIICSDTGDLRDALARSPQKILASAFSQFYSQSEASAAQLSSVKDEALTGAVSESITVQSSSNMVTTSESYFNGLELVSALVKLMPEWLRNNRVVFDTLLLAWKSPARLARLQNEQDLSLPQVMESKRLIKCFLNYLRHDRTEVGALFDMLSVFLYRSRIDYSFLKEFYVIEVAEGYSPNLKKTILNHFLNIFQSKQYGQDHLVVTMQILILPMLAHSFQNGQSWEVVDPTIIKTIVEKLLDPPEEVSAEYDEPLRIELLQLATLLLKYLQTDLVHHRKELIKFGWNHLKREDNSSKQWAFVNVCHFLEAYQAPEKIILQVFIALLRTCQPENKLLVKQALDILMPALPRRLPPEKNDSRMPIWIRYTKKVLVEEGHSIPNMIHIFQLIVRHADLFYSCRAHFVPQMVNSLSRLGLPYNTTAENRRLAIELAGLVVAWERQRQSEMKVAQESESQNQLGDMLNPSVIGGDPKRSSDVPSFADDLSKRVKVEPGLQPLCVMSPGGASIPNIETPGSSGLPDEEYKPNAAMEEMIITFLIRVSLVIEPKDKESSSMYKQALDLLTQALEVWPNANVKFNYLEKLLGNLSPTPQSKDPASALAQGLDVMNKVLEKQPRLFIRNNINHISQILEPCFGNKMLDAGKSLCSLLKMVFSAFPLEAATTPQDIKLLHQRVQELIHKNLAAVTTQQIALELNNAHSIISFSLFVLNALAEVQKNFIDPFIGLLFRVLQRLARDMGSSAGSHIRQGQRPELDSSVNSRSTIDSTVISNMKTVLKLISERVMSSSDHRKSMGQILQALLSEKGTDSSILLCMLDMIKTWIEEDCRLASSTGSVSSLNPKEIITYLHKLSLVDRKSFPPAAQEEWDAKYLQLLYSLCADSTKYPLSFRQEFFHKIERQYMLGLRAKDPEMRKRFFKLYHDTVGKTLFSRLQFIIQLQDWEAVSDVFWLKQGLDLVLAILVENEPITLAANSARVPTLMIAGPVPDRITMPQQVPDAQESMDGTTLSFDSLAARHAQFLNDANKLVVADIMAPLKELAFADPNVAYHLWVLVFPIVWVTLHKEEQVALAKPIIALLSKDYHKRQQGCRPNVAQALLEGLHLSHPQPRMPSELIKYIGKTCNVWYIAIALLESHIVHMNEAKCSESLAELYRLLNEDDMRCGLWKRKSITAETRAGLSLAQHGYWQQAQNLFYQAMIKATQGTYNNTVPKAEMCLWEEQWLSCASHLGQWEVLA

SEQ ID NO: 191095 - protein, 2684 aa, Zea Mays
MAPINSGNMEQHSQRLLEPDLPVQVRLQLAMEVRDSLEMTHTPDYLNFLRCYFRAFSAILTAYTKPQATENAEHKLRNVVIEILNRLPHSEVLRPFVQDLLKLSLRVLTQDNEDNALLAIRIVFDLLRNFRPTVEAEVQPFLDFVVNIYHKFPTTVSYFFDNPNTSASMAASMPMQHLDPTADASVMMQVPGGGQLNPSARSFKIVTESPLVVMFLFQLYAKLVQTNIPHLLPLMVAAISIKGPDKVPPHLKTPFNDLKGAQVKSNADYIKSYEESICKSIVNLLVTCPPDSVSIRKELLVGLKQVLNTEYKRGLFPLIDTLLDERVLIGTGRVCIETLRPLAYTLLAELVHYVREDISLPQLSRIIYLFSRNMHDSSLTLIIHTTSARLMLNLVEPIYQKGVDQQSMDEARVLLGRILDAFVGKFRTLKRTIPQLLEEGEEGKEQPNLRMKLEVPLQTVLNLQQPLEYTKEINDYKSLIKTLAVGMKTIIWSITHAHWPRPQVRKTSGVLKSGVHCLALFKEKDDDREILQSFSQMLAIMEARDIMDMFSFCMSDLFDSMITNNQLLHIFSTLLQAPKVLRPFTDVLINFLVSSKLEALKQPDSPAAKLVLQLFRFLFIAAAKAPESCERTLQPHVPVIMEVCMRSATEVEKPLGYMHLLRNMFRALNSAKFDSLMRDLIPSLQPCLNMLLSMLDGPISEDMRDLILELCLILPARLSSLLPHIPRLMKPLVLALKGSDDLVSLALRTLEFWIDSLNPDFLEPSMANLMSEVILALWSHLRPPPYTWGTKSLELLGKLGGRNRRFLREPLALESKENPEHGLRLVLTFEPATPFLVPLDRCIHQAVGAVMQGNGLEAFYRKKALQFIRVCLDSLLNLRENVPGEGVSPGVLGTLLISNLDPSRRRNDASDMKGDLGVKTKTQLLAEKSVFKTLLVAIIAANADTSLHDEKDDYVVDICRHFAMLFHVDSPSSSQSGFMHPIGSSLPSIIMGSRSRCNTSSNLRELDPLIFLDALVEVLSSENRQHAKAALSALNIFAETLIFLARMKHTGMLRGGPSTPMLVSSPSLNPVYSPPPSVRVAVFEELLPRLLHCCYSSTWQAQMGGVMGLGALVGKVSVDTLCIFQVRVVRGLLFVLKRLPVHANKEQEETNHVLTQVLRVVNNADEANSEPRRQSFQGVVEFLAQELFNPNASMVVRKNVQACLSLLASRTGSEVSELLEPLYLPLLQPLISRPLRSKNIEQQVGTVTALNFCLALRPPLLKLSPELVNFLQEALQIAEADETIWVTRMMNAKVVLTWNKLRTACIELLCTAMAWGDLKAQNHTELRAKIISMFFKSLTCRTTEIVNVAKEGLRQVVQQQRMPKDLLQSSLRPILVNLANTKSLSMPLLQGLARLLELLSNWFNVTLGAKLLDHLKKWLEPEKLVQTQKSWKAGDEPKIAAAMIELFHLLPPAASKFLDDLVTLVIDLERALPEDQFYSEINSPYRAPLAKFLNRYVLEAVDYFLARLSHPKYFRRFMYIICSDTGDLRDALARSPQKILASAFSQFYSQSEASAAQLSSVKDEALTGAVSESITVQSSSNMVTTSESYFNGLELVSALVKLMPEWLRNNRVVFDTLLLAWKSPARLARLQNEQDLSLPQVMESKRLIKCFLNYLRHDRTEVGALFDMLSVFLYRSRIDYSFLKEFYVIEVAEGYSPNLKKTILNHFLNIFQSKQYGQDHLVVTMQILILPMLAHSFQNGQSWEVVDPTIIKTIVEKLLDPPEEVSAEYDEPLRIELLQLATLLLKYLQTDLVHHRKELIKFGWNHLKREDNSSKQWAFVNVCHFLEAYQAPEKIILQLKLIVRHADLFYSCRAHFVPQMVNSLSRLGLPYNTTAENRRLAIELAGLVVAWERQRQSEMKVAQESESQNQLGDMLNPSVIGGDPKRSSDVPSFADDLSKRVKVEPGLQPLCVMSPGGASIPNIETPGSSGLPDEEYKPNAAMEEMIITFLIRVSLVIEPKDKESSSMYKQALDLLTQALEVWPNANVKFNYLEKLLGNLSPTPQSKDPASALAQGLDVMNKVLEKQPRLFIRNNINHISQILEPCFGNKMLDAGKSLCSLLKMVFSAFPLEAATTPQDIKLLHQRVQELIHKNLAAVTTQQIALELNNAHSIISFSLFVLNALAEVQKNFIDPFIGLLFRVLQRLARDMGSSAGSHIRQGQRPELDSSVNSRSTIDSTVISNMKTVLKLISERVMSSSDHRKSMGQILQALLSEKGTDSSILLCMLDMIKTWIEEDCRLASSTGSVSSLNPKEIITYLHKLSLVDRKSFPPAAQEEWDAKYLQLLYSLCADSTKYPLSFRQEFFHKIERQYMLGLRAKDPEMRKRFFKLYHDTVGKTLFSRLQFIIQLQDWEAVSDVFWLKQGLDLVLAILVENEPITLAANSARVPTLMIAGPVPDRITMPQQVPDAQESMDGTTLSFDSLAARHAQFLNDANKLVVADIMAPLKELAFADPNVAYHLWVLVFPIVWVTLHKEEQVALAKPIIALLSKDYHKRQQGCRPNVAQALLEGLHLSHPQPRMPSELIKYIGKTCNVWYIAIALLESHIVHMNEAKCSESLAELYRLLNEDDMRCGLWKRKSITAETRAGLSLAQHGYWQQAQNLFYQAMIKATQGTYNNTVPKAEMCLWEEQWLSCASHLGQWEVLA

SEQ ID NO: 191096 - protein, 2376 aa, Zea Mays
MHDSSLTLIIHTTSARLMLNLVEPIYQKGVDQQSMDEARVLLGRILDAFVGKFRTLKRTIPQLLEEGEEGKEQPNLRMKLEVPLQTVLNLQQPLEYTKEINDYKSLIKTLAVGMKTIIWSITHAHWPRPQVRKTSGVLKSGVHCLALFKEKDDDREILQSFSQMLAIMEARDIMDMFSFCMSDLFDSMITNNQLLHIFSTLLQAPKVLRPFTDVLINFLVSSKLEALKQPDSPAAKLVLQLFRFLFIAAAKAPESCERTLQPHVPVIMEVCMRSATEVEKPLGYMHLLRNMFRALNSAKFDSLMRDLIPSLQPCLNMLLSMLDGPISEDMRDLILELCLILPARLSSLLPHIPRLMKPLVLALKGSDDLVSLALRTLEFWIDSLNPDFLEPSMANLMSEVILALWSHLRPPPYTWGTKSLELLGKLGGRNRRFLREPLALESKENPEHGLRLVLTFEPATPFLVPLDRCIHQAVGAVMQGNGLEAFYRKKALQFIRVCLDSLLNLRENVPGEGVSPGVLGTLLISNLDPSRRRNDASDMKGDLGVKTKTQLLAEKSVFKTLLVAIIAANADTSLHDEKDDYVVDICRHFAMLFHVDSPSSSQSGFMHPIGSSLPSIIMGSRSRCNTSSNLRELDPLIFLDALVEVLSSENRQHAKAALSALNIFAETLIFLARMKHTGMLRGGPSTPMLVSSPSLNPVYSPPPSVRVAVFEELLPRLLHCCYSSTWQAQMGGVMGLGALVGKVSVDTLCIFQVRVVRGLLFVLKRLPVHANKEQEETNHVLTQVLRVVNNADEANSEPRRQSFQGVVEFLAQELFNPNASMVVRKNVQACLSLLASRTGSEVSELLEPLYLPLLQPLISRPLRSKNIEQQVGTVTALNFCLALRPPLLKLSPELVNFLQEALQIAEADETIWVTRMMNAKVVLTWNKLRTACIELLCTAMAWGDLKAQNHTELRAKIISMFFKSLTCRTTEIVNVAKEGLRQVVQQQRMPKDLLQSSLRPILVNLANTKSLSMPLLQGLARLLELLSNWFNVTLGAKLLDHLKKWLEPEKLVQTQKSWKAGDEPKIAAAMIELFHLLPPAASKFLDDLVTLVIDLERALPEDQFYSEINSPYRAPLAKFLNRYVLEAVDYFLARLSHPKYFRRFMYIICSDTGDLRDALARSPQKILASAFSQFYSQSEASAAQLSSVKDEALTGAVSESITVQSSSNMVTTSESYFNGLELVSALVKLMPEWLRNNRVVFDTLLLAWKSPARLARLQNEQDLSLPQVMESKRLIKCFLNYLRHDRTEVGALFDMLSVFLYRSRIDYSFLKEFYVIEVAEGYSPNLKKTILNHFLNIFQSKQYGQDHLVVTMQILILPMLAHSFQNGQSWEVVDPTIIKTIVEKLLDPPEEVSAEYDEPLRIELLQLATLLLKYLQTDLVHHRKELIKFGWNHLKREDNSSKQWAFVNVCHFLEAYQAPEKIILQVFIALLRTCQPENKLLVKQALDILMPALPRRLPPEKNDSRMPIWIRYTKKVLVEEGHSIPNMIHIFQLIVRHADLFYSCRAHFVPQMVNSLSRLGLPYNTTAENRRLAIELAGLVVAWERQRQSEMKVAQESESQNQLGDMLNPSVIGGDPKRSSDVPSFADDLSKRVKVEPGLQPLCVMSPGGASIPNIETPGSSGLPDEEYKPNAAMEEMIITFLIRVSLVIEPKDKESSSMYKQALDLLTQALEVWPNANVKFNYLEKLLGNLSPTPQSKDPASALAQGLDVMNKVLEKQPRLFIRNNINHISQILEPCFGNKMLDAGKSLCSLLKMVFSAFPLEAATTPQDIKLLHQRVQELIHKNLAAVTTQQIALELNNAHSIISFSLFVLNALAEVQKNFIDPFIGLLFRVLQRLARDMGSSAGSHIRQGQRPELDSSVNSRSTIDSTVISNMKTVLKLISERVMSSSDHRKSMGQILQALLSEKGTDSSILLCMLDMIKTWIEEDCRLASSTGSVSSLNPKEIITYLHKLSLVDRKSFPPAAQEEWDAKYLQLLYSLCADSTKYPLSFRQEFFHKIERQYMLGLRAKDPEMRKRFFKLYHDTVGKTLFSRLQFIIQLQDWEAVSDVFWLKQGLDLVLAILVENEPITLAANSARVPTLMIAGPVPDRITMPQQVPDAQESMDGTTLSFDSLAARHAQFLNDANKLVVADIMAPLKELAFADPNVAYHLWVLVFPIVWVTLHKEEQVALAKPIIALLSKDYHKRQQGCRPNVAQALLEGLHLSHPQPRMPSELIKYIGKTCNVWYIAIALLESHIVHMNEAKCSESLAELYRLLNEDDMRCGLWKRKSITAETRAGLSLAQHGYWQQAQNLFYQAMIKATQGTYNNTVPKAEMCLWEEQWLSCASHLGQWEVLA

SEQ ID NO: 191097 - protein, 2759 aa, Zea Mays
MAPINSGNMEQHSQRLLEPDLPVQVRLQLAMEVRDSLEMTHTPDYLNFLRCYFRAFSAILTAYTKPQATENAEHKLRNVVIEILNRLPHSEVLRPFVQDLLKLSLRVLTQDNEDNALLAIRIVFDLLRNFRPTVEAEVQPFLDFVVNIYHKFPTTVSYFFDNPNTSASMAASMPMQHLDPTADASVMMQVPGGGQLNPSARSFKIVTESPLVVMFLFQLYAKLVQTNIPHLLPLMVAAISIKGPDKVPPHLKTPFNDLKGAQVKTLSFLTYLLKSNADYIKSYEESICKSIVNLLVTCPPDSVSIRKELLVGLKQVLNTEYKRGLFPLIDTLLDERVLIGTGRVCIETLRPLAYTLLAELVHYVREDISLPQLSRIIYLFSRNMHDSSLTLIIHTTSARLMLNLVEPIYQKGVDQQSMDEARVLLGRILDAFVGKFRTLKRTIPQLLEEGEEGKEQPNLRMKLEVPLQTVLNLQQPLEYTKEINDYKSLIKTLAVGMKTIIWSITHAHWPRPQVRKTSGVLKSGVHCLALFKEKDDDREILQSFSQMLAIMEARDIMDMFSFCMSDLFDSMITNNQLLHIFSTLLQAPKVLRPFTDVLINFLVSSKLEALKQPDSPAAKLVLQLFRFLFIAAAKAPESCERTLQPHVPVIMEVCMRSATEVEKPLGYMHLLRNMFRALNSAKFDSLMRDLIPSLQPCLNMLLSMLDGPISEDMRDLILELCLILPARLSSLLPHIPRLMKPLVLALKGSDDLVSLALRTLEFWIDSLNPDFLEPSMANLMSEVILALWSHLRPPPYTWGTKSLELLGKLGGRNRRFLREPLALESKENPEHGLRLVLTFEPATPFLVPLDRCIHQAVGAVMQGNGLEAFYRKKALQFIRVCLDSLLNLRENVPGEGVSPGVLGTLLISNLDPSRRRNDASDMKGDLGVKTKTQLLAEKSVFKTLLVAIIAANADTSLHDEKDDYVVDICRHFAMLFHVDSPSSSQSGFMHPIGSSLPSIIMGSRSRCNTSSNLRELDPLIFLDALVEVLSSENRQHAKAALSALNIFAETLIFLARMKHTGMLRGGPSTPMLVSSPSLNPVYSPPPSVRVAVFEELLPRLLHCCYSSTWQAQMGGVMGLGALVGKVSVDTLCIFQVRVVRGLLFVLKRLPVHANKEQEETNHVLTQVLRVVNNADEANSEPRRQSFQGVVEFLAQELFNPNASMVVRKNVQACLSLLASRTGSEVSELLEPLYLPLLQPLISRPLRSKNIEQQVGTVTALNFCLALRPPLLKLSPELVNFLQEALQIAEADETIWVTRMMNAKVVLTWNKLRTACIELLCTAMAWGDLKAQNHTELRAKIISMFFKSLTCRTTEIVNVAKEGLRQVVQQQRMPKDLLQSSLRPILVNLANTKSLSMPLLQGLARLLELLSNWFNVTLGAKLLDHLKKWLEPEKLVQTQKSWKAGDEPKIAAAMIELFHLLPPAASKFLDDLVTLVIDLERALPEDQFYSEINSPYRAPLAKFLNRYVLEAVDYFLARLSHPKYFRRFMYIICSDTGDLRDALARSPQKILASAFSQFYSQSEASAAQLSSVKDEALTGAVSESITVQSSSNMVTTSESYFNGLELVSALVKLMPEWLRNNRVVFDTLLLAWKSPARLARLQNEQDLSLPQVMESKRLIKCFLNYLRHDRTEVGALFDMLSVFLYRSRIDYSFLKEFYVIEVAEGYSPNLKKTILNHFLNIFQSKQYGQDHLVVTMQILILPMLAHSFQNGQSWEVVDPTIIKTIVEKLLDPPEEVSAEYDEPLRIELLQLATLLLKYLQTDLVHHRKELIKFGWNHLKREDNSSKQWAFVNVCHFLEAYQAPEKIILQVFIALLRTCQPENKLLVKQALDILMPALPRRLPPEKNDSRMPIWIRYTKKVLVEEGHSIPNMIHIFQLIVRHADLFYSCRAHFVPQMVNSLSRLGLPYNTTAENRRLAIELAGLVVAWERQRQSEMKVAQESESQNQLGDMLNPSVIGGDPKRSSDVPSFADDLSKRVKVEPGLQPLCVMSPGGASIPNIETPGSSGLPDEEYKPNAAMEEMIITFLIRVSLVIEPKDKESSSMYKQALDLLTQALEVWPNANVKFNYLEKLLGNLSPTPQSKDPASALAQGLDVMNKVLEKQPRLFIRNNINHISQILEPCFGNKMLDAGKSLCSLLKMVFSAFPLEAATTPQDIKLLHQRVQELIHKNLAAVTTQQIALELNNAHSIISFSLFVLNALAEVQKNFIDPFIGLLFRVLQRLARDMGSSAGSHIRQGQRPELDSSVNSRSTIDSTVISNMKTVLKLISERVMSSSDHRKSMGQILQALLSEKGTDSSILLCMLDMIKTWIEEDCRLASSTGSVSSLNPKEIITYLHKLSLVDRKSFPPAAQEEWDAKYLQLLYSLCADSTKYPLSFRQEFFHKIERQYMLGLRAKDPEMRKRFFKLYHDTVGKTLFSRLQFIIQLQDWEAVSDVFWLKQGLDLVLAILVENEPITLAANSARVPTLMIAGPVPDRITMPQQVPDAQESMDGTTLSFDSLAARHAQFLNDANKLVVADIMAPLKELAFADPNVAYHLWVLVFPIVWVTLHKEEQVALAKPIIALLSKDYHKRQQGCRPNVAQALLEGLHLSHPQPRMPSELIKYIGKTCNVWYIAIALLESHIVHMNEAKCSESLAELYRLLNEDDMRCGLWKRKSITAETRAGLSLAQHGYWQQAQNLFYQAMIKATQGTYNNTVPKAEMCLWEEQWLSCASHLGQWEVLA

SEQ ID NO: 191098 - protein, 2673 aa, Zea Mays
MAPINSGNMEQHSQRLLEPDLPVQVRLQLAMEVRDSLEMTHTPDYLNFLRCYFRAFSAILTAYTKPQATENAEHKLRNVVIEILNRLPHSEVLRPFVQDLLKLSLRVLTQDNEDNALLAIRIVFDLLRNFRPTVEAEVQPFLDFVVNIYHKFPTTVSYFFDNPNTSASMAASMPMQHLDPTADASVMMQVPGGGQLNPSARSFKIVTESPLVVMFLFQLYAKLVQTNIPHLLPLMVAAISIKGPDKVPPHLKTPFNDLKGAQVKTLSFLTYLLKSNADYIKSYEESICKSIVNLLVTCPPDSVSIRKELLVGLKQVLNTEYKRGLFPLIDTLLDERVLIGTGRVCIETLRPLAYTLLAELVHYVREDISLPQLSRIIYLFSRNMHDSSLTLIIHTTSARLMLNLVEPIYQKGVDQQSMDEARVLLGRILDAFVGKFRTLKRTIPQLLEEGEEGKEQPNLRMKLEVPLQTVLNLQQPLEYTKEINDYKSLIKTLAVGMKTIIWSITHAHWPRPQQQNQQSSNLSLQHFRGLREDEVRKTSGVLKSGVHCLALFKEKDDDREILQSFSQMLAIMEARDIMDMFSFCMSDLFDSMITNNQLLHIFSTLLQAPKVLRPFTDVLINFLVSSKLEALKQPDSPAAKLVLQLFRFLFIAAAKAPESCERTLQPHVPVIMEVCMRSATEVEKPLGYMHLLRNMFRALNSAKFDSLMRDLIPSLQPCLNMLLSMLDEVILALWSHLRPPPYTWGTKSLELLGKLGGRNRRFLREPLALESKENPEHGLRLVLTFEPATPFLVPLDRCIHQAVGAVMQGNGLEAFYRKKALQFIRVCLDSLLNLRENVPGEGVSPGVLGTLLISNLDPSRRRNDASDMKGDLGVKTKTQLLAEKSVFKTLLVAIIAANADTSLHDEKDDYVVDICRHFAMLFHVDSPSSSQSGFMHPIGSSLPSIIMGSRSRCNTSSNLRELDPLIFLDALVEVLSSENRQHAKAALSALNIFAETLIFLARMKHTGMLRGGPSTPMLVSSPSLNPVYSPPPSVRVAVFEELLPRLLHCCYSSTWQAQMGGVMGLGALVGKVSVDTLCIFQVRVVRGLLFVLKRLPVHANKEQEETNHVLTQVLRVVNNADEANSEPRRQSFQGVVEFLAQELFNPNASMVVRKNVQACLSLLASRTGSEVSELLEPLYLPLLQPLISRPLRSKNIEQQVGTVTALNFCLALRPPLLKLSPELVNFLQEALQIAEADETIWVTRMMNAKVVLTWNKLRTACIELLCTAMAWGDLKAQNHTELRAKIISMFFKSLTCRTTEIVNVAKEGLRQVVQQQRMPKDLLQSSLRPILVNLANTKSLSMPLLQGLARLLELLSNWFNVTLGAKLLDHLKKWLEPEKLVQTQKSWKAGDEPKIAAAMIELFHLLPPAASKFLDDLVTLVIDLERALPEDQFYSEINSPYRAPLAKFLNRYVLEAVDYFLARLSHPKYFRRFMYIICSDTGDLRDALARSPQKILASAFSQFYSQSEASAAQLSSVKDEALTGAVSESITVQSSSNMVTTSESYFNGLELVSALVKLMPEWLRNNRVVFDTLLLAWKSPARLARLQNEQDLSLPQVMESKRLIKCFLNYLRHDRTEVGALFDMLSVFLYRSRIDYSFLKEFYVIEVAEGYSPNLKKTILNHFLNIFQSKQYGQDHLVVTMQILILPMLAHSFQNGQSWEVVDPTIIKTIVEKLLDPPEEVSAEYDEPLRIELLQLATLLLKYLQTDLVHHRKELIKFGWNHLKREDNSSKQWAFVNVCHFLEAYQAPEKIILQVFIALLRTCQPENKLLVKQALDILMPALPRRLPPEKNDSRMPIWIRYTKKVLVEEGHSIPNMIHIFQLIVRHADLFYSCRAHFVPQMVNSLSRLGLPYNTTAENRRLAIELAGLVVAWERQRQSEMKVAQESESQNQLGDMLNPSVIGGDPKRSSDVPSFADDLSLPDEEYKPNAAMEEMIITFLIRVSLVIEPKDKESSSMYKQALDLLTQALEVWPNANVKFNYLEKLLGNLSPTPQSKDPASALAQGLDVMNKVLEKQPRLFIRNNINHISQILEPCFGNKMLDAGKSLCSLLKMVFSAFPLEAATTPQDIKLLHQRVQELIHKNLAAVTTQQIALELNNAHSIISFSLFVLNALAEVQKNFIDPFIGLLFRVLQRLARDMGSSAGSHIRQGQRPELDSSVNSRSTIDSTVISNMKTVLKLISERVMSSSDHRKSMGQILQALLSEKGTDSSILLCMLDMIKTWIEEDCRLASSTGSVSSLNPKEIITYLHKLSLVDRKSFPPAAQEEWDAKYLQLLYSLCADSTKYPLSFRQEFFHKIERQYMLGLRAKDPEMRKRFFKLYHDTVGKTLFSRLQFIIQLQDWEAVSDVFWLKQGLDLVLAILVENEPITLAANSARVPTLMIAGPVPDRITMPQQVPDAQESMDGTTLSFDSLAARHAQFLNDANKLVVADIMAPLKELAFADPNVAYHLWVLVFPIVWVTLHKEEQVALAKPIIALLSKDYHKRQQGCRPNVAQALLEGLHLSHPQPRMPSELIKYIGKTCNVWYIAIALLESHIVHMNEAKCSESLAELYRLLNEDDMRCGLWKRKSITAETRAGLSLAQHGYWQQAQNLFYQAMIKATQGTYNNTVPKAEMCLWEEQWLSCASHLGQWEVLA

SEQ ID NO: 191099 - protein, 1991 aa, Zea Mays
MAPINSGNMEQHSQRLLEPDLPVQVRLQLAMEVRDSLEMTHTPDYLNFLRCYFRAFSAILTAYTKPQATENAEHKLRNVVIEILNRLPHSEVLRPFVQDLLKLSLRVLTQDNEDNALLAIRIVFDLLRNFRPTVEAEVQPFLDFVVNIYHKFPTTVSYFFDNPNTSASMAASMPMQHLDPTADASVMMQVPGGGQLNPSARSFKIVTESPLVVMFLFQLYAKLVQTNIPHLLPLMVAAISIKGPDKVPPHLKTPFNDLKGAQVKTLSFLTYLLKSNADYIKSYEESICKSIVNLLVTCPPDSVSIRKELLVGLKQVLNTEYKRGLFPLIDTLLDERVLIGTGRVCIETLRPLAYTLLAELVHYVREDISLPQLSRIIYLFSRNMHDSSLTLIIHTTSARLMLNLVEPIYQKGVDQQSMDEARVLLGRILDAFVGKFRTLKRTIPQLLEEGEEGKEQPNLRMKLEVPLQTVLNLQQPLEYTKEINDYKSLIKTLAVGMKTIIWSITHAHWPRPQVRKTSGVLKSGVHCLALFKEKDDDREILQSFSQMLAIMEARDIMDMFSFCMSDLFDSMITNNQLLHIFSTLLQAPKVLRPFTDVLINFLVSSKLEALKQPDSPAAKLVLQLFRFLFIAAAKAPESCERTLQPHVPVIMEVCMRSATEVEKPLGYMHLLRNMFRALNSAKFDSLMRDLIPSLQPCLNMLLSMLDGPISEDMRDLILELCLILPARLSSLLPHIPRLMKPLVLALKGSDDLVSLALRTLEFWIDSLNPDFLEPSMANLMSEVILALWSHLRPPPYTWGTKSLELLGKLGGRNRRFLREPLALESKENPEHGLRLVLTFEPATPFLVPLDRCIHQAVGAVMQGNGLEAFYRKKALQFIRVCLDSLLNLRENVPGEGVSPGVLGTLLISNLDPSRRRNDASDMKGDLGVKTKTQLLAEKSVFKTLLVAIIAANADTSLHDEKDDYVVDICRHFAMLFHVDSPSSSQSGFMHPIGSSLPSIIMGSRSRCNTSSNLRELDPLIFLDALVEVLSSENRQHAKAALSALNIFAETLIFLARMKHTGMLRGGPSTPMLVSSPSLNPVYSPPPSVRVAVFEELLPRLLHCCYSSTWQAQMGGVMGLGALVGKVSVDTLCIFQVRVVRGLLFVLKRLPVHANKEQEETNHVLTQVLRVVNNADEANSEPRRQSFQGVVEFLAQELFNPNASMVVRKNVQACLSLLASRTGSEVSELLEPLYLPLLQPLISRPLRSKNIEQQVGTVTALNFCLALRPPLLKLSPELVNFLQEALQIAEADETIWVTRMMNAKVVLTWNKLRTACIELLCTAMAWGDLKAQNHTELRAKIISMFFKSLTCRTTEIVNVAKEGLRQVVQQQRMPKDLLQSSLRPILVNLANTKSLSMPLLQGLARLLELLSNWFNVTLGAKLLDHLKKWLEPEKLVQTQKSWKAGDEPKIAAAMIELFHLLPPAASKFLDDLVTLVIDLERALPEDQFYSEINSPYRAPLAKFLNRYVLEAVDYFLARLSHPKYFRRFMYIICSDTGDLRDALARSPQKILASAFSQFYSQSEASAAQLSSVKDEALTGAVSESITVQSSSNMVTTSESYFNGLELVSALVKLMPEWLRNNRVVFDTLLLAWKSPARLARLQNEQDLSLPQVMESKRLIKCFLNYLRHDRTEVGALFDMLSVFLYRSRIDYSFLKEFYVIEVAEGYSPNLKKTILNHFLNIFQSKQYGQDHLVVTMQILILPMLAHSFQNGQSWEVVDPTIIKTIVEKLLDPPEEVSAEYDEPLRIELLQLATLLLKYLQTDLVHHRKELIKFGWNHLKREDNSSKQWAFVNVCHFLEAYQAPEKIILQVFIALLRTCQPENKLLVKQALDILMPALPRRLPPEKNDSRMPIWIRYTKKVLVEEGHSIPNMIHIFQLIVRHADLFYSCRAHFVPQMVNSLSRLGLPYNTTAENRRLAIELAGLVVAWERQRQSEMKVAQESESQNQLGITCD

SEQ ID NO: 191100 - protein, 85 aa, Zea Mays
MEQEHLHLAMVHSLYSSLSQLDSTNGCSCCWMENDNPSLHHALFCLSKIFLFAPSGLNPYKCTWHWLPICRFITSHEKDTCWTTR

SEQ ID NO: 191101 - protein, 99 aa, Zea Mays
MRGCEGCARRWPKLGLSWGCAQSRRRRQGESLHHAMHVTKARPPNLEPRLFNEGYGFGSRGTPRDCASWKRLLSCQLSYFNFGLTIIVRVPLFSIFYLL

SEQ ID NO: 191102 - protein, 254 aa, Zea Mays
MADRLVPDAVPREVFWPRYFYRVHKLKQQEDARAKLVQRVIAQEEDEDLSWEVDDDEEEEEEQQKDSTEELAEQRQEPIKEEVRQDMAEKENVERIVEESGVETVEEAPGLVKEEKNAAEPQPIVLGSSLVVVDKEEEREKAVLGSSFGVVGEGENAEPSKSNVEESGAKKEGAKHETSDSSKDSDYSIVSRQRTAEEEDLEWDEIEDLGEHEEKKGGIQTSSPALKEELRKRLSIAEDDEDLSWDIEDDDDNA

SEQ ID NO: 191103 - protein, 168 aa, Zea Mays
MLGVKRTERVLPTGTSLTVVGERPHKGPFYASSKSIDQLIVNLGKWAKLYRIASMGFATFGVFLLAKRALQHFLERRRRHELQKRVLNAAAQRQAREAEGSKGTSDAEPNSKKDQLVLDICVICLEQEYNAVFVPCGHMCCCVACSSHLTNCPLCRRRIDQAVRTFRH

SEQ ID NO: 191104 - protein, 267 aa, Zea Mays
MRGVIVEETAEQHFLKHNDAGSWIQDSAVMLSVSKEVPWYLDDGTGRVYVVGARSAAGLILTVASEVFEESGRTLVRGTLDYLQGLKMLGVKRTERVLPTGTSLTVVGEAIKDDVGTIRIQRPHKGPFYASSKSIDQLIVNLGKWAKLYRIASMGFATFGVFLLAKRALQHFLERRRRHELQKRVLNAAAQRQAREAEGSKGTSDAEPNSKKDQLVLDICVICLEQEYNAVFVPCGHMCCCVACSSHLTNCPLCRRRIDQAVRTFRH

SEQ ID NO: 191105 - protein, 114 aa, Zea Mays
MGFATFGVFLLAKRALQHFLERRRRHELQKRVLNAAAQRQAREAEGSKGTSDAEPNSKKDQLVLDICVICLEQEYNAVFVPCGHMCCCVACSSHLTNCPLCRRRIDQAVRTFRH

SEQ ID NO: 191106 - protein, 194 aa, Zea Mays
MMIPWGGVGCCLSAAALYLLGRSSGSDAEVLRSVARAGSMKDLAAILDTASKVLPLVVAISGRVGSDTPLICQQSGMRGVIVEETAEQHFLKHNDAGSWIQDSAVMLSVSKEVPWYLDDGTGRVYVVGARSAAGLILTVASEVFEESGRTLVRGTLDYLQGLKMLGVKRTERVLPTGTSLTVVGEVLFLLSIGH

SEQ ID NO: 191107 - protein, 294 aa, Zea Mays
MEMASARRRAKPPQAVGGGGDQLALWAACVLLSSLSLLVAAAFSTGFGGAARLTLEAGPDRDREAAGALVTRATGAGSGRYCDEDDDLIDSMSVDGEWVLLRGAAERLYGPGQCPFVDEGFRCRENGRPDGDYAEWAWRPRRCALPRFDARRLLEMLRNRRLVFVGDSIGRNQWESMLCMLASAVADDRDKQASPGGASIYEENGSPITKRKGFLSFRFRDYNCTVEHYRSPYLVRRGRPPRHSPKRVATALRLGSMDAMAPRWKDADVLVFNTGHWWNHERLQQLTARRCGST

SEQ ID NO: 191108 - protein, 320 aa, Zea Mays
MAAEALRAAEIRREEAAGDAPEPAAGVRGRLHRAEPVGVHAVHAGLGRRRRQGQAGEPGRRQHIRGEREPHHQAQGLPLLPVPRLQLHRGALPVAVPGPPRPPAAPLAEARRHGAPAGLHGRHGAPVEGRGRPGVQHGTLVEPREAAAVDGKTLRLNMSVEDAYERALNTLQKWVQKEVNTTKTLVVLRTYSPAHVRASNGGGGGCVRETAPELNTSRIALHRWPGLLNPSPALIEAAKKRQLATMHVLNVTLMTAQRRDGHPSVYNVRLPSPAAAQEQVTTRAADCSHWCLPGVPDAWNELLYALILHRTRTTSLGGSD

SEQ ID NO: 191109 - protein, 402 aa, Zea Mays
MEMASARRRAKPPQAVGGGGDQLALWAACVLLSSLSLLVAAAFSTGFGGAARLTLEAGPDRDREAAGALVTRATGAGSGRYCDEDDDLIDSMSVDGEWVLLRGAAERLYGPGQCPFVDEGFRCRENGRPDGDYAEWAWRPRRCALPRFLTAKWSWSSPKHMHASYIFDVCMRIRFDARRLLEMLRNRRLVFVGDSIGRNQWESMLCMLASAVADDRDKQASPGGASIYEENGSPITKRKGFLSFRFRDYNCTVEHYRSPYLVRRGRPPRHSPKRVATALRLGSMDAMAPRWKDADVLVFNTGHWWNHERLQQLGCYFQDGKTLRLNMSVEDAYERALNTLQKWVQKEVNTTKTLVVLRTYSPAHGVKRWWRWVCQGDGAGAEHVEDRAAPVAGPAQPEPGFN

SEQ ID NO: 191110 - protein, 205 aa, Zea Mays
MALSWPSAVRLAVAAVLLAAVVVALFTLPVEKILKDFLLWIKENLGAWGPLVLALAYIPLTVLAVPASILTLGGGYLFGLPVGFVADSIGATIGATAAFLLGRTIGRPYVLSKCKDYPKFQAVAIAIQRSGFKIVLLLRLVPLLPFNMLNYLLSVTPVGVGEYMLASWFGMMPITLALVYVGTTLKDLSDVTHGWSEISTTRWWS

SEQ ID NO: 191111 - protein, 231 aa, Zea Mays
MGTEYPTFADVSGARALLFLADSTPRLAPPSRPPALSEEFYCYSGSSSSYSGASTRSCVSDSAQRGRPVDPLRVLSVVASLRRIDPKVLAEATSALFHTDAEKKRKGVWIEIDSGGDDGQSERSSAVASEGSTVTAAASAGSTATSGRCRGAPRVGCAAGGKGPRRAEVIMQWFSQTQAGPATENDIRAAVGDNSGTSKAIRWLLKQEGGLRRAGNGGALDPYVYMLHEKG

SEQ ID NO: 191112 - protein, 56 aa, Zea Mays
MEEGRTKTNQTLSRCFVFYRQPDELKKKAILDQTNSIRNGSPKAIALISFTKSISF

SEQ ID NO: 191113 - protein, 97 aa, Zea Mays
MSTDIFFGSWLLYQYFMMVGNHLSLSLLPTLPNSFMGTLRNNRFFVSSIRDYISLLLETLSLLIQWSLLDIIKVFSPFIGFIHFQVTTNQPSKHINA

SEQ ID NO: 191114 - protein, 357 aa, Zea Mays
MKPTTSSTLLLAAAVLCLALPLLPGATAKAARARQGDYLARLRGSSPWPAESASLAVAATDRASRHAASPGVGRKEDDRVDRLPGQPSGVDFEQYAGYVTVDAAAGRALFYYLAEAVGGGSASAAKPLLLWLNGGPGCSSLGYGAMEELGPFRVKSDGKTLYRNPYAWNNAANVLFLESPAGVGFSYSNTTADYSRSGDNKTAEDALRFLLNWMEKFPEYKGRDLYLAGESYAGHYVPQLAHAILGHAAAGKPSSSSPLNLRGIMIGNAVINDWTDTKGMYDFFWTHALISDATADAIGRHCNFSAAADADAAASNDKCNEATSEADEALQDIDIYNIYAPNCQSPGLVSPPITPSV

SEQ ID NO: 191115 - protein, 257 aa, Zea Mays
MSLSPADGAAYWLRWQVLVCGALIALPTVAAAALLPRLRSSAPPLRAADLWVPCWARLHPGWLLAYRAVALAAAVALLARLVVARGITVFYFYTQWTFLLVTIYFAFATAISAHGCLVYSRKSLRKADESRGLLNADVENRDVSNSVSGERKTDETNMMMSYYEQIVNERRAGFWGRCMEIIYQTSAGATMLTDVTYWGLLVPFFYRDKFGLALFTDGMHSLNAVFLLIDTLLNNMWIFSPFPGTECLSLFSGAAPM

SEQ ID NO: 191116 - protein, 59 aa, Zea Mays
MLLTLSPKHIMCYLHAIVVRTSVDGVCLSPESSGLPSIAMTFQDVVDIIYENCWKSSSR

SEQ ID NO: 191117 - protein, 713 aa, Zea Mays
MSKLLHKAIREKRDNAYTVYQQHLASRPVNVLRDLLELKSDRAPIPIGKVESATSIVERFCTGGMSLGAISRETHEAIAIAMNRIGGKSNSGEGGEDPIRWNPLTDVVDGYSPTLPHLKGLQNGDTATSAIKQVASGRFGVTPTFLVNADQIEIKIAQGAKPGEGGQLPGKKVSAYIARLRNSKPGVPLISPPPHHDIYSIEDLAQLIYDLHQINPKAKVSVKLVSEAGIGTVASGVSKANADIIQISGHDGGTGASPISSIKHAGGPWELGLTETNQTLIQNGLRERVVLRVDGGFRSGQDVLIAAAMGADEYGFGSVAMIATGCVMARICHTNNCPVGVASQREELRARFPGVPGDLVNYFLFVAEEVRAALAQLGYEKLDDIIGRTDLLKPKHISLVKTQHIDLGYLLSNAGLPEWSSSQIRSQDVHTNGPVLDETILADPEIADAIENEKEVSKAFQIYNVDRAVCGRVAGVIAKKYGDTGFAGQLNITFNGSAGQSFGCFLTPGMNIRLVGEANDYVGKGMAGGELVVVPVDKTGFVPEDATIVGNTCLYGATGGQVFVRGKAGERFAVRNSLCQAVVEGTGDHCCEYMTGGCVVVLGKAGRNVAAGMTGGLAYILDEDDTLVPKVNKEIVKMQRVNAPAGQMQLKGLIEAYVDKTGSEKGIAILREWEAYLPLFWQLVPPSEEDSPEACAEFERVLAKQATTQLSAK

SEQ ID NO: 191118 - protein, 1000 aa, Zea Mays
MSLEVNIGKRGNILEVGPENADQVALSSPVLNEGELETLLNDSKLKPKVLSTYFDIRKGLDGSLDKTIQALCEEADAAVRSGSQLLVLSDRSEAPEPTRPAIPILLAVGAIHQHLIQNGLRMSASIVADTAQCFSTHHFACLIGYGASAVCPYLALETCRQWRLSNKTLNLMRNGKMPTVTIEQAQRNFIKAVKSGLLKILSKMGISLLSSYCGAQIFEIYGLGQEVVDLAFCGSVSKIGGLTLDELGRETLSFWVKAFSEDTAKRLENFGFIQSRPGGEYHANNPEMSKLLHKAIREKRDNAYTVYQQHLASRPVNVLRDLLELKSDRAPIPIGKVESATSIVERFCTGGMSLGAISRETHEAIAIAMNRIGGKSNSGEGGEDPIRWNPLTDVVDGYSPTLPHLKGLQNGDTATSAIKQVASGRFGVTPTFLVNADQIEIKIAQGAKPGEGGQLPGKKVSAYIARLRNSKPGVPLISPPPHHDIYSIEDLAQLIYDLHQINPKAKVSVKLVSEAGIGTVASGVSKANADIIQISGHDGGTGASPISSIKHAGGPWELGLTETNQTLIQNGLRERVVLRVDGGFRSGQDVLIAAAMGADEYGFGSVAMIATGCVMARICHTNNCPVGVASQREELRARFPGVPGDLVNYFLFVAEEVRAALAQLGYEKLDDIIGRTDLLKPKHISLVKTQHIDLGYLLSNAGLPEWSSSQIRSQDVHTNGPVLDETILADPEIADAIENEKEVSKAFQIYNVDRAVCGRVAGVIAKKYGDTGFAGQLNITFNGSAGQSFGCFLTPGMNIRLVGEANDYVGKGMAGGELVVVPVDKTGFVPEDATIVGNTCLYGATGGQVFVRGKAGERFAVRNSLCQAVVEGTGDHCCEYMTGGCVVVLGKAGRNVAAGMTGGLAYILDEDDTLVPKVNKEIVKMQRVNAPAGQMQLKGLIEAYVDKTGSEKGIAILREWEAYLPLFWQLVPPSEEDSPEACAEFERVLAKQATTQLSAK

SEQ ID NO: 191119 - protein, 395 aa, Zea Mays
MDESKVVMKGRLGPGMMITVDLQTGQVLENTEVKKTVASASPYGTWLQECTRLIKPVNFLSSTIMDNETVLRHQQAFGYSSEDVQMVIESMASQGKEPTFCMGDDIPLAVLSQRPHLLYDYFKQRFAQVTNPAIDPLREGLVMSLEVNIGKRGNILEVGPENADQVALSSPVLNEGELETLLNDSKLKPKVLSTYFDIRKGLDGSLDKTIQALCEEADAAVRSGSQLLVLSDRSEAPEPTRPAIPILLAVGAIHQHLIQNGLRMSASIVADTAQCFSTHHFACLIGYGASAVCPYLALETCRQWRLSNKTLNLMRNGKMPTVTIEQAQRNFIKAVKSGLLKILSKMGISLLSSYCGAQIFEIYGLGQEVVDLAFCGSVSKIGGLTLDEGRPYHSG

SEQ ID NO: 191120 - protein, 1473 aa, Zea Mays
MSAVPWDLFDDWASKQGLALFDRRNTGVGMVFLPQDEKSMEEAKAATEKVFVDEGLEVLGWRPVPFNVSVVGRNAKETMPNIQQIFVKVAKEDNADDIERELYISRKLIERAAKSFSWADELYFCSLSSRTIVYKGMLRSEVLGQFYLDLQNELYKSPFAIYHRRFSTNTSPRWPLAQPMRLLGHNGEINTIQGNLNWMRSRETTLKSPVWRGREHEICPFGDPKASDSANLDSTAELLLRSGRSPAEALMILVPEAYKNHPTLSIKYPEVTDFYDYYKGQMEAWDGPALLLFSDGRTVGATLDRNGLRPARYWRTSDDFVYVASEVGVIPMDESKVVMKGRLGPGMMITVDLQTGQVLENTEVKKTVASASPYGTWLQECTRLIKPVNFLSSTIMDNETVLRHQQAFGYSSEDVQMVIESMASQGKEPTFCMGDDIPLAVLSQRPHLLYDYFKQRFAQVTNPAIDPLREGLVMSLEVNIGKRGNILEVGPENADQVALSSPVLNEGELETLLNDSKLKPKVLSTYFDIRKGLDGSLDKTIQALCEEADAAVRSGSQLLVLSDRSEAPEPTRPAIPILLAVGAIHQHLIQNGLRMSASIVADTAQCFSTHHFACLIGYGASAVCPYLALETCRQWRLSNKTLNLMRNGKMPTVTIEQAQRNFIKAVKSGLLKILSKMGISLLSSYCGAQIFEIYGLGQEVVDLAFCGSVSKIGGLTLDELGRETLSFWVKAFSEDTAKRLENFGFIQSRPGGEYHANNPEMSKLLHKAIREKRDNAYTVYQQHLASRPVNVLRDLLELKSDRAPIPIGKVESATSIVERFCTGGMSLGAISRETHEAIAIAMNRIGGKSNSGEGGEDPIRWNPLTDVVDGYSPTLPHLKGLQNGDTATSAIKQVASGRFGVTPTFLVNADQIEIKIAQGAKPGEGGQLPGKKVSAYIARLRNSKPGVPLISPPPHHDIYSIEDLAQLIYDLHQINPKAKVSVKLVSEAGIGTVASGVSKANADIIQISGHDGGTGASPISSIKHAGGPWELGLTETNQTLIQNGLRERVVLRVDGGFRSGQDVLIAAAMGADEYGFGSVAMIATGCVMARICHTNNCPVGVASQREELRARFPGVPGDLVNYFLFVAEEVRAALAQLGYEKLDDIIGRTDLLKPKHISLVKTQHIDLGYLLSNAGLPEWSSSQIRSQDVHTNGPVLDETILADPEIADAIENEKEVSKAFQIYNVDRAVCGRVAGVIAKKYGDTGFAGQLNITFNGSAGQSFGCFLTPGMNIRLVGEANDYVGKGMAGGELVVVPVDKTGFVPEDATIVGNTCLYGATGGQVFVRGKAGERFAVRNSLCQAVVEGTGDHCCEYMTGGCVVVLGKAGRNVAAGMTGGLAYILDEDDTLVPKVNKEIVKMQRVNAPAGQMQLKGLIEAYVDKTGSEKGIAILREWEAYLPLFWQLVPPSEEDSPEACAEFERVLAKQATTQLSAK

SEQ ID NO: 191121 - protein, 1290 aa, Zea Mays
MRSQWKKPKLGNLNWMRSRETTLKSPVWRGREHEICPFGDPKASDSANLDSTAELLLRSGRSPAEALMILVPEAYKNHPTLSIKYPEVTDFYDYYKGQMEAWDGPALLLFSDGRTVGATLDRNGLRPARYWRTSDDFVYVASEVGVIPMDESKVVMKGRLGPGMMITVDLQTGQVLENTEVKKTVASASPYGTWLQECTRLIKPVNFLSSTIMDNETVLRHQQAFGYSSEDVQMVIESMASQGKEPTFCMGDDIPLAVLSQRPHLLYDYFKQRFAQVTNPAIDPLREGLVMSLEVNIGKRGNILEVGPENADQVALSSPVLNEGELETLLNDSKLKPKVLSTYFDIRKGLDGSLDKTIQALCEEADAAVRSGSQLLVLSDRSEAPEPTRPAIPILLAVGAIHQHLIQNGLRMSASIVADTAQCFSTHHFACLIGYGASAVCPYLALETCRQWRLSNKTLNLMRNGKMPTVTIEQAQRNFIKAVKSGLLKILSKMGISLLSSYCGAQIFEIYGLGQEVVDLAFCGSVSKIGGLTLDELGRETLSFWVKAFSEDTAKRLENFGFIQSRPGGEYHANNPEMSKLLHKAIREKRDNAYTVYQQHLASRPVNVLRDLLELKSDRAPIPIGKVESATSIVERFCTGGMSLGAISRETHEAIAIAMNRIGGKSNSGEGGEDPIRWNPLTDVVDGYSPTLPHLKGLQNGDTATSAIKQVASGRFGVTPTFLVNADQIEIKIAQGAKPGEGGQLPGKKVSAYIARLRNSKPGVPLISPPPHHDIYSIEDLAQLIYDLHQINPKAKVSVKLVSEAGIGTVASGVSKANADIIQISGHDGGTGASPISSIKHAGGPWELGLTETNQTLIQNGLRERVVLRVDGGFRSGQDVLIAAAMGADEYGFGSVAMIATGCVMARICHTNNCPVGVASQREELRARFPGVPGDLVNYFLFVAEEVRAALAQLGYEKLDDIIGRTDLLKPKHISLVKTQHIDLGYLLSNAGLPEWSSSQIRSQDVHTNGPVLDETILADPEIADAIENEKEVSKAFQIYNVDRAVCGRVAGVIAKKYGDTGFAGQLNITFNGSAGQSFGCFLTPGMNIRLVGEANDYVGKGMAGGELVVVPVDKTGFVPEDATIVGNTCLYGATGGQVFVRGKAGERFAVRNSLCQAVVEGTGDHCCEYMTGGCVVVLGKAGRNVAAGMTGGLAYILDEDDTLVPKVNKEIVKMQRVNAPAGQMQLKGLIEAYVDKTGSEKGIAILREWEAYLPLFWQLVPPSEEDSPEACAEFERVLAKQATTQLSAK

SEQ ID NO: 191122 - protein, 909 aa, Zea Mays
MATLPRAAPPTPAALLPLPRAAPPLLLAGRAAAARRSRLRARGPSAAARRSWVVASAASSSSRAVVGGVARREAPPAPQKPTQQAADLNHILSERGACGVGFVANLKNMSSFDIVRDALMALGCMEHRGGCGADSDSGDGAGLMSAVPWDLFDDWASKQGLALFDRRNTGVGMVFLPQDEKSMEEAKAATEKVFVDEGLEVLGWRPVPFNVSVVGRNAKETMPNIQQIFVKVAKEDNADDIERELYISRKLIERAAKSFSWADELYFCSLSSRTIVYKGMLRSEVLGQFYLDLQNELYKSPFAIYHRRFSTNTSPRWPLAQPMRLLGHNGEINTIQGNLNWMRSRETTLKSPVWRGREHEICPFGDPKASDSANLDSTAELLLRSGRSPAEALMILVPEAYKNHPTLSIKYPEVTDFYDYYKGQMEAWDGPALLLFSDGRTVGATLDRNGLRPARYWRTSDDFVYVASEVGVIPMDESKVVMKGRLGPGMMITVDLQTGQVLENTEVKKTVASASPYGTWLQECTRLIKPVNFLSSTIMDNETVLRHQQAFGYSSEDVQMVIESMASQGKEPTFCMGDDIPLAVLSQRPHLLYDYFKQRFAQVTNPAIDPLREGLVMSLEVNIGKRGNILEVGPENADQVALSSPVLNEGELETLLNDSKLKPKVLSTYFDIRKGLDGSLDKTIQALCEEADAAVRSGSQLLVLSDRSEAPEPTRPAIPILLAVGAIHQHLIQNGLRMSASIVADTAQCFSTHHFACLIGYGASAVCPYLALETCRQWRLSNKTLNLMRNGKMPTVTIEQAQRNFIKAVKSGLLKILSKMGISLLSSYCGAQIFEIYGLGQEVVDLAFCGSVSKIGGLTLDELGRETLSFWVKAFSEDTAKRLENFGFIQSRPGAYLFYLWISVSSSTA

SEQ ID NO: 191123 - protein, 761 aa, Zea Mays
MHEHTRAWAWEATVRKVQHPQPVGRRRVSPMSAADDYETASSSSSAAGDVCEHVHGYMERGLPNGDFYTGQWRDGAPHGAGKYLWTDGCMYEGEWRHGKATGRGKFSWPSGATYEGEFKDGFMDGSGTYTGAAGDTYRGSWSMNLKHGSGKKSYANGDEYDGEWRAGLQDGSGRYTWRNGTEYTGQWCAGLIHGRGALVWSNGNRYDGGWEDGCPRGQGTFRWADGSVYVGRWTRDTPTGIVQQKGVYYPSPAASSPTARDPRDVFARDLPGFMGARPDSPSPRKSRASSVRAANGRASSASGLSNSSGGDRKYEKICIWESDGDITCDIVDGPALGDEAGTARRSVRTDDGGDDRGLPPPSPAPHVTQWVPPREVKRQGETIAKGHKHYELMLKLQLGIRHAVGKQGPIVLDLKSSAFDPKEKVTLRKLFKVDAGDYMLSLCGNEALRELSSPGKSGSFFYLTNDDRYMIKTMKKSEVKMLLKMLPAYYNHVRAFENTLVTKFFGLHCVKLAGANQKKVRFVIMGNLFCSEYPIHRRFDLKGSSLGRTTDKPHTEIDQYTTLKDLDLNFIFRLKKQWFHEFQRQVDRDCEFLEQEKIMDYSLLVGVHFRDNTEKLLTEGSIDFDIINNVPTPRLSKGNTDRFLAGPNRSPKIKLGANMPSRAELTARKSDCEPRMIGEPTGECYDVILYFGIIDILQDYDISKRLEHAYKSFQHDPTSMSAVDPRQYSRRFKEFVYRVFQEDGCAAADALRLWRCRSLHV

SEQ ID NO: 191124 - protein, 680 aa, Zea Mays
MHEHTRAWAWEATVRKVQHPQPVGRRRVSPMSAADDYETASSSSSAAGDVCEHVHGYMERGLPNGDFYTGQWRDGAPHGAGKYLWTDGCMYEGEWRHGKATGRGKFSWPSGATYEGEFKDGFMDGSGTYTGAAGDTYRGSWSMNLKHGSGKKSYANGDEYDGEWRAGLQDGSGRYTWRNGTEYTGQWCAGLIHGRGALVWSNGNRYDGGWEDGCPRGQGTFRWADGSVYVGRWTRDTPTGIVQQKGVYYPSPAASSPTARDPRDVFARDLPGFMGARPDSPSPRKSRASSVRAANGRASSASGLSNSSGGDRKYEKICIWESDGDITCDIVDGPALGDEAGTARRSVRTDDGGDDRGLPPPSPAPHVTQWVPPREVKRQGETIAKGHKHYELMLKLQLGIRHAVGKQGPIVLDLKSSAFDPKEKVWTKFPPQGSKYTPPHNSCDFRWKDYCPQVFRTLRKLFKVDAGDYMLSLCGNEALRELSSPGKSGSFFYLTNDDRYMIKTMKKSEVKMLLKMLPAYYNHVRAFENTLVTKFFGLHCVKLAGANQKKVRFVIMGNLFCSEYPIHRRFDLKGSSLGRTTDKPHTEIDQYTTLKDLDLNFIFRLKKQWFHEFQRQVDRDCEFLEQEKIMDYSLLVGVHFRDNTEKLLTEGSIDFDIINNVPTPRLSKGNTDRFLAGPNR

SEQ ID NO: 191125 - protein, 845 aa, Zea Mays
MQTVSDRRIRSSTQENVTSGNIPKTLSGICACFVFVNCSLALWIFQVFSQDKSIYEAVESAFITLYTRKSPIETAKSLLDLAIDCSIGDLAALESLISSLVSKAEISSSMVSALWDYFCFNINGVRPVQSRGALSILCMAAKSSPSILGNHLQDIIDIGFGRWAKEEPLLARTACLALQRLSEEDKDKLISNNSRVFAALQGLVTSFSIPEKIWYGAADKAISTIYTLHPAPELFATETAKKSLSSVFSVLGTNDVSNGDEAQNGASLSSVSPSKLGRFLFVISHIALNHLVYIENSVRKIQKQKRKNEKSQPTTEDLQPDVSKSLEAQGINAELGLSATIDIAIESLAERAEKEIVCCSSEKNLIGHCGPFLSKLCRNLALLQKFPDLQASAMLALCRLMIIDAEFCEANLQILFTVAESAPSETVRSNCTIALGDLAVRFPNLLDPWTEYIYARLRDPSVSVRKNAVLVISHLILNDMMKVKGYINEMAVRIEDKDERISSLAKLFFHELSKKGSNPIYNLLPDILGRLCNQHLKEETFCNIMQFLINSIKKDKQMEALVDKLCNRFAGVNDVRQWEYISYCLSQLTFTEKGLKKLIDNFKMFEHALSEDSVMNHFRSVISKCKKFAKPELKICIEEFEEKLSKVHQEKKEQEETTKNAEAHRQRIDSLDEFLVTKEVSENSGNSAEDETSEVVDPSVDSSTEHMENTPECSVNTSAENSQTTAPLTESEGGGEEIQSAQPVSKGMSRLRAKKTRDPVVDPSVDRSTEYKGNTPEHSADTSTENSQTSVPLTGTEGGSEEIQSTQPVGKGVSRSRARKTRDPVVEDSAAPVRRATRSTRRQGS

SEQ ID NO: 191126 - protein, 122 aa, Zea Mays
MSKRHSRWRHSSMTRRSLATVSSTSRSSPTWSHAPLCTTSSREAAAWTRSRAAAPRCPSLSREPHGCRQRRRLSGCSGHRIRQRRHHVVQLIVHRKPNLPRKSLLTEHEFLCAGTMDVVDVV

SEQ ID NO: 191127 - protein, 102 aa, Zea Mays
MSKRHSRWRHSSMTRRSLATVSSTSRSSPTWSHAPLCTTSSREAAAWTRSRAAAPRCPSLSREPHGCRQRRRLSGCSGHRIRQRRHHVVQLIVHRKPNLPLE

SEQ ID NO: 191128 - protein, 449 aa, Zea Mays
MVVRKAVKENTDIKGTVLDFFGVAVKAYELLARVEELQLLSKRIARYKDPIKQYRIQLPYKKPQWSASCGWTETDDARLMVGIHWYGYGNWEKIRLDPKLGLTTKIAPATLGERETFLPRAPNLDNRASALLQKEYAKFSGNSSKVKGNARQTVNNDSNSGARSMRGRQKDAPDKEDNKPNKDDIQKRKVMMEAEAREEGEISESEAETKYRLDKEEKWLEWCSEVLNEEQETLKRLDRLQNTSVNLPKEKVLSRIRKYLLIIGDKIGEVVRQHSESYRQSRKCSRTSRMTMRLWNYVATFSNMSGEQLHDLYLKLSQDQLEGGVGPSHGANFTSIPSSKGGNSNQLHPTRNHRPTRSLQYNSESLHNNESSGSSEAWKRRRRADPDNQFDTQPLYQPPIMTNGNRLQESSSSAGILGWGPVEMRRYGNERPKRGVHPSHFPTGHGPLL

SEQ ID NO: 191129 - protein, 724 aa, Zea Mays
MVKMLDILAEYLSLRGFQFQRLDGSTRADLRHQAMEHFNAPGSDDFCFLLSTRAGGLGINLATADTVIIFDSDWNPQNDLQVLPLILFLLQVLDHLVIQKLNAEGRLEKKESKKGGSIFDKNELSAILRFGAEELFKEDKTDEEAKRNLESLDIDEILERAEKVETKGGEGEEGNELLSAFKVANFSSGEDDATFWSRLIQPDPADIIQETLAPRAARNKKSYVEDPQFDKNNNRKRRAVEAQEKPRRRSGRTVETVNSVPLVDGAVAQVREWSFGNIPKKDASRFVRAGTVLDFFGVAVKAYELLARVEELQLLSKRIARYKDPIKQYRIQLPYKKPQWSASCGWTETDDARLMVGIHWYGYGNWEKIRLDPKLGLTTKIAPATLGERETFLPRAPNLDNRASALLQKEYAKFSGNSSKVKGNARQTVNNDSNSGARSMRGRQKDAPDKEDNKPNKDDIQKRKVMMEAEAREEGEISESEAETKYRLDKEEKWLEWCSEVLNEEQETLKRLDRLQNTSVNLPKEKVLSRIRKYLLIIGDKIGEVVRQHSESYRQSRKCSRTSRMTMRLWNYVATFSNMSGEQLHDLYLKLSQDQLEGGVGPSHGANFTSIPSSKGGNSNQLHPTRNHRPTRSLQYNSESLHNNESSGSSEAWKRRRRADPDNQFDTQPLYQPPIMTNGNRLQESSSSAGILGWGPVEMRRYGNERPKRGVHPSHFPTGHGPLL

SEQ ID NO: 191130 - protein, 1153 aa, Zea Mays
MELDLIKQYSQVERIFADRVSKADGDDLVPEYLVKWQGLPYAESTWEKDTDIDFAQDAIDEYKAREAATSILGKTVDFQRKKSKASLRRLDDQPEWLKAGKLRDYQLEGLNFLVNGWRNDTNVILADEMGLGKTIQSVSMLGFLHNAQEINGPFLVVVPLSTLSNWAKEFRKWLPNMNVVIYVGNRASREMCQKHEFFSDKKGGRHVKFHTLITTYEVILKDKAVLSKIKWNYLMVDEAHRLKNCEASLYTTLLEFSTKNKLLITGTPLQNSVEELWALLHFLDPVKFNSKDSFVERYKNLSSFNETELANLHKELRPHILRRVIKDVEKSLPPKIERILRVEMSPLQKQYYKWILERNFQNLNKGVRGNQVSLLNIVVELKKCCNHPFLFESADHGYGGDSIGDRNKVERIVMSSGKLVLLDKLLMVKMLDILAEYLSLRGFQFQRLDGSTRADLRHQAMEHFNAPGSDDFCFLLSTRAGGLGINLATADTVIIFDSDWNPQNDLQVLPLILFLLQVLDHLVIQKLNAEGRLEKKESKKGGSIFDKNELSAILRFGAEELFKEDKTDEEAKRNLESLDIDEILERAEKVETKGGEGEEGNELLSAFKACDVANFSSGEDDATFWSRLIQPDPADIIQETLAPRAARNKKSYVEDPQFDKNNNRKRRAVEAQEKPRRRSGRTVETVNSVPLVDGAVAQVREWSFGNIPKKDASRFVRAGTVLDFFGVAVKAYELLARVEELQLLSKRIARYKDPIKQYRIQLPYKKPQWSASCGWTETDDARLMVGIHWYGYGNWEKIRLDPKLGLTTKIAPATLGERETFLPRAPNLDNRASALLQKEYAKFSGNSSKVKGNARQTVNNDSNSGARSMRGRQKDAPDKEDNKPNKDDIQKRKVMMEAEAREEGEISESEAETKYRLDKEEKWLEWCSEVLNEEQETLKRLDRLQNTSVNLPKEKVLSRIRKYLLIIGDKIGEVVRQHSESYRQSRKCSRTSRMTMRLWNYVATFSNMSGEQLHDLYLKLSQDQLEGGVGPSHGANFTSIPSSKGGNSNQLHPTRNHRPTRSLQYNSESLHNNESSGSSEAWKRRRRADPDNQFDTQPLYQPPIMTNGNRLQESSSSAGILGWGPVEMRRYGNERPKRGVHPSHFPTGHGPLL

SEQ ID NO: 191131 - protein, 1003 aa, Zea Mays
MPAQRKRGVSHSDEEYSSGKDSDLPSDADFKHRSKRPDRLHQKSVGRSDVAPINSHNELRTSGRRTVKKISYVESEESDDSEEKSTKQQKEELEEEDGETIEKVLWHQPKGVAEEAIKNHQSAQPTVVSLTSDFDQQWDELEFYIKWKGQSYLHCQWKTLSELQSVSGFKKVINYTKRVAEEQRYKRALSREEVEVHDVGKEMELDLIKQYSQVERIFADRVSKADGDDLVPEYLVKWQGLPYAESTWEKDTDIDFAQDAIDEYKAREAATSILGKTVDFQRKKSKASLRRLDDQPEWLKAGKLRDYQLEGLNFLVNGWRNDTNVILADEMGLGKTIQSVSMLGFLHNAQEINGPFLVVVPLSTLSNWAKEFRKWLPNMNVVIYVGNRASREMCQKHEFFSDKKGGRHVKFHTLITTYEVILKDKAVLSKIKWNYLMVDEAHRLKNCEASLYTTLLEFSTKNKLLITGTPLQNSVEELWALLHFLDPVKFNSKDSFVERYKNLSSFNETELANLHKELRPHILRRVIKDVEKSLPPKIERILRVEMSPLQKQYYKWILERNFQNLNKGVRGNQVSLLNIVVELKKCCNHPFLFESADHGYGGDSIGDRNKVERIVMSSGKLVLLDKLLVRLRETNHRVLIFSQMVKMLDILAEYLSLRGFQFQRLDGSTRADLRHQAMEHFNAPGSDDFCFLLSTRAGGLGINLATADTVIIFDSDWNPQNDLQAMSRAHRIGQQETVNIYRFVTCKSVEEDILERAKKKMVLDHLVIQKLNAEGRLEKKESKKGGSIFDKNELSAILRFGAEELFKEDKTDEEAKRNLESLDIDEILERAEKVETKGGEGEEGNELLSAFKVANFSSGEDDATFWSRLIQPDPADIIQETLAPRAARNKKSYVEDPQFDKNNNRKRRAVEAQEKPRRRSGRTVETVNSVPLVDGAVAQVREWSFGNIPKKDASRFVRAVKKFGNATQIDLIVDDVGGVLEKAPHEAQIELFDLLIDGCQKSC

SEQ ID NO: 191132 - protein, 1595 aa, Zea Mays
MAFFSNSGSKADSGGYNLNEKAEDEGIYESVQDGNVDLSSRQWNLNEKADDAYHCEAEQYEAGQSGLYSSEKASGQHIQKGGRSSGGPWGTNFLKDSRSKQMAEDVPSNSGRGMNAASLHDGLDDSGEDDELNRANGEVPAEEMLSDDYYEQDGEEQIESLHRGGTKQSSCSTSGGAAKSGSRQMKASKYNAYDDDDDDDYNDENDDDNDADEDDPADVDFEPDSETDKATDKDKFMDSENSDGDDDDGLELSDDDDDFVENRRQPKRLKIVATKTSKGRKLPMPAQRKRGVSHSDEEYSSGKDSDLPSDADFKHRSKRPDRLHQKSVGRSDVAPINSHNELRTSGRRTVKKISYVESEESDDSEEKSTKQQKVSGFKKVINYTKRVAEEQRYKRALSREEVEVHDVGKEMELDLIKQYSQVERIFADRVSKADGDDLVPEYLVKWQGLPYAESTWEKDTDIDFAQDAIDEYKAREAATSILGKTVDFQRKKSKASLRRLDDQPEWLKAGKLRDYQLEGLNFLVNGWRNDTNVILADEMGLGKTIQSVSMLGFLHNAQEINGPFLVVVPLSTLSNWAKEFRKWLPNMNVVIYVGNRASREMCQKHEFFSDKKGGRHVKFHTLITTYEVILKDKAVLSKIKWNYLMVDEAHRLKNCEASLYTTLLEFSTKNKLLITGTPLQNSVEELWALLHFLDPVKFNSKDSFVERYKNLSSFNETELANLHKELRPHILRRVIKDVEKSLPPKIERILRVEMSPLQKQYYKWILERNFQNLNKGVRGNQVSLLNIVVELKKCCNHPFLFESADHGYGGDSIGDRNKVERIVMSSGKLVLLDKLLVRLRETNHRVLIFSQMVKMLDILAEYLSLRGFQFQRLDGSTRADLRHQAMEHFNAPGSDDFCFLLSTRAGGLGINLATADTVIIFDSDWNPQNDLQAMSRAHRIGQQETVNIYRFVTCKSVEEDILERAKKKMVLDHLVIQKLNAEGRLEKKESKKGGSIFDKNELSAILRFGAEELFKEDKTDEEAKRNLESLDIDEILERAEKVETKGGEGEEGNELLSAFKVANFSSGEDDATFWSRLIQPDPADIIQETLAPRAARNKKSYVEDPQFDKNNNRKRRAVEAQEKPRRRSGRTVETVNSVPLVDGAVAQVREWSFGNIPKKDASRFVRAGTVLDFFGVAVKAYELLARVEELQLLSKRIARYKDPIKQYRIQLPYKKPQWSASCGWTETDDARLMVGIHWYGYGNWEKIRLDPKLGLTTKIAPATLGERETFLPRAPNLDNRASALLQKEYAKFSGNSSKVKGNARQTVNNDSNSGARSMRGRQKDAPDKEDNKPNKDDIQKRKVMMEAEAREEGEISESEAETKYRLDKEEKWLEWCSEVLNEEQETLKRLDRLQNTSVNLPKEKVLSRIRKYLLIIGDKIGEVVRQHSESYRQSRMTMRLWNYVATFSNMSGEQLHDLYLKLSQDQLEGGVGPSHGANFTSIPSSKGGNSNQLHPTRNHRPTRSLQYNSESLHNNESSGSSEAWKRRRRADPDNQFDTQPLYQPPIMTNGNRLQESSSSAGILGWGPVEMRRYGNERPKRGVHPSHFPTGHGPLL

SEQ ID NO: 191133 - protein, 1248 aa, Zea Mays
MAFFSNSGSKADSGGYNLNEKAEDEGIYESVQDGNVDLSSRQWNLNEKADDAYHCEAEQYEAGQSGLYSSEKASGQHIQKGGRSSGGPWGTNFLKDSRSKQMAEDVPSNSGRGMNAASLHDGLDDSGEDDELNRANGEVPAEEMLSDDYYEQDGEEQIESLHRGGTKQSSCSTSEDDPADVDFEPDSETDKATDKDKFMDSENSDGDDDDGLELSDDDDDFVENRRQPKRLKIVATKTSKGRKLPMPAQRKRGVSHSDEEYSSGKDSDLPSDADFKHRSKRPDRLHQKSVGRSDVAPINSHNELRTSGRRTVKKISYVESEESDDSEEKSTKQQKEELEEEDGETIEKVLWHQPKGVAEEAIKNHQSAQPTVVSLTSDFDQQWDELEFYIKWKGQSYLHCQWKTLSELQSVSGFKKVINYTKRVAEEQRYKRALSREEVEVHDVGKEMELDLIKQYSQVERIFADRVSKADGDDLVPEYLVKWQGLPYAESTWEKDTDIDFAQDAIDEYKAREAATSILGKTVDFQRKKSKASLRRLDDQPEWLKAGKLRDYQLEGLNFLVNGWRNDTNVILADEMGLGKTIQSVSMLGFLHNAQEINGPFLVVVPLSTLSNWAKEFRKWLPNMNVVIYVGNRASREMCQKHEFFSDKKGGRHVKFHTLITTYEVILKDKAVLSKIKWNYLMVDEAHRLKNCEASLYTTLLEFSTKNKLLITGTPLQNSVEELWALLHFLDPVKFNSKDSFVERYKNLSSFNETELANLHKELRPHILRRVIKDVEKSLPPKIERILRVEMSPLQKQYYKWILERNFQNLNKGVRGNQVSLLNIVVELKKCCNHPFLFESADHGYGGDSIGDRNKVERIVMSSGKLVLLDKLLVRLRETNHRVLIFSQMVKMLDILAEYLSLRGFQFQRLDGSTRADLRHQAMEHFNAPGSDDFCFLLSTRAGGLGINLATADTVIIFDSDWNPQNDLQAMSRAHRIGQQETVNIYRFVTCKSVEEDILERAKKKMVLDHLVIQKLNAEGRLEKKESKKGGSIFDKNELSAILRFGAEELFKEDKTDEEAKRNLESLDIDEILERAEKVETKGGEGEEGNELLSAFKVANFSSGEDDATFWSRLIQPDPADIIQETLAPRAARNKKSYVEDPQFDKNNNRKRRAVEAQEKPRRRSGRTVETVNSVPLVDGAVAQVREWSFGNIPKKDASRFVRAVKKFGNATQIDLIVDDVGGVLEKAPHEAQIELFDLLIDGCQKSC

SEQ ID NO: 191134 - protein, 1093 aa, Zea Mays
MLMTTMMTMTIMMRMTMTMTLMKTTPLMWILSQTAKRTKLLISENSDGDDDDGLELSDDDDDFVENRRQPKRLKIVATKTSKGRKLPMPAQRKRGVSHSDEEYSSGKDSDLPSDADFKHRSKRPDRLHQKSVGRSDVAPINSHNELRTSGRRTVKKISYVESEESDDSEEKSTKQQKLMKEELEEEDGETIEKVLWHQPKGVAEEAIKNHQSAQPTVVSLTSDFDQQWDELEFYIKWKGQSYLHCQWKTLSELQSVSGFKKVINYTKRVAEEQRYKRALSREEVEVHDVGKEMELDLIKQYSQVERIFADRVSKADGDDLVPEYLVKWQGLPYAESTWEKDTDIDFAQDAIDEYKAREAATSILGKTVDFQRKKSKASLRRLDDQPEWLKAGKLRDYQLEGLNFLVNGWRNDTNVILADEMGLGKTIQSVSMLGFLHNAQEINGPFLVVVPLSTLSNWAKEFRKWLPNMNVVIYVGNRASREMCQKHEFFSDKKGGRHVKFHTLITTYEVILKDKAVLSKIKWNYLMVDEAHRLKNCEASLYTTLLEFSTKNKLLITGTPLQNSVEELWALLHFLDPVKFNSKDSFVERYKNLSSFNETELANLHKELRPHILRRVIKDVEKSLPPKIERILRVEMSPLQKQYYKWILERNFQNLNKGVRGNQVSLLNIVVELKKCCNHPFLFESADHGYGGDSIGDRNKVERIVMSSGKLVLLDKLLVRLRETNHRVLIFSQMVKMLDILAEYLSLRGFQFQRLDGSTRADLRHQAMEHFNAPGSDDFCFLLSTRAGGLGINLATADTVIIFDSDWNPQNDLQAMSRAHRIGQQETVNIYRFVTCKSVEEDILERAKKKMVLDHLVIQKLNAEGRLEKKESKKGGSIFDKNELSAILRFGAEELFKEDKTDEEAKRNLESLDIDEILERAEKVETKGGEGEEGNELLSAFKVANFSSGEDDATFWSRLIQPDPADIIQETLAPRAARNKKSYVEDPQFDKNNNRKRRAVEAQEKPRRRSGRTVETVNSVPLVDGAVAQVREWSFGNIPKKDASRFVRAVKKFGNATQIDLIVDDVGGVLEKAPHEAQIELFDLLIDGCQKSC

SEQ ID NO: 191135 - protein, 1289 aa, Zea Mays
MAFFSNSGSKADSGGYNLNEKAEDEGIYESVQDGNVDLSSRQWNLNEKADDAYHCEAEQYEAGQSGLYSSEKASGQHIQKGGRSSGGPWGTNFLKDSRSKQMAEDVPSNSGRGMNAASLHDGLDDSGEDDELNRANGEVPAEEMLSDDYYEQDGEEQIESLHRGGTKQSSCSTSGGAAKSGSRQMKASKYNAYDDDDDDDYNDENDDDNDADEDDPADVDFEPDSETDKATDKDKFMDSENSDGDDDDGLELSDDDDDFVENRRQPKRLKIVATKTSKGRKLPMPAQRKRGVSHSDEEYSSGKDSDLPSDADFKHRSKRPDRLHQKSVGRSDVAPINSHNELRTSGRRTVKKISYVESEESDDSEEKSTKQQKLMKEELEEEDGETIEKVLWHQPKGVAEEAIKNHQSAQPTVVSLTSDFDQQWDELEFYIKWKGQSYLHCQWKTLSELQSVSGFKKVINYTKRVAEEQRYKRALSREEVEVHDVGKEMELDLIKQYSQVERIFADRVSKADGDDLVPEYLVKWQGLPYAESTWEKDTDIDFAQDAIDEYKAREAATSILGKTVDFQRKKSKASLRRLDDQPEWLKAGKLRDYQLEGLNFLVNGWRNDTNVILADEMGLGKTIQSVSMLGFLHNAQEINGPFLVVVPLSTLSNWAKEFRKWLPNMNVVIYVGNRASREMCQKHEFFSDKKGGRHVKFHTLITTYEVILKDKAVLSKIKWNYLMVDEAHRLKNCEASLYTTLLEFSTKNKLLITGTPLQNSVEELWALLHFLDPVKFNSKDSFVERYKNLSSFNETELANLHKELRPHILRRVIKDVEKSLPPKIERILRVEMSPLQKQYYKWILERNFQNLNKGVRGNQVSLLNIVVELKKCCNHPFLFESADHGYGGDSIGDRNKVERIVMSSGKLVLLDKLLVRLRETNHRVLIFSQMVKMLDILAEYLSLRGFQFQRLDGSTRADLRHQAMEHFNAPGSDDFCFLLSTRAGGLGINLATADTVIIFDSDWNPQNDLQAMSRAHRIGQQETVNIYRFVTCKSVEEDILERAKKKMVLDHLVIQKLNAEGRLEKKESKKGGSIFDKNELSAILRFGAEELFKEDKTDEEAKRNLESLDIDEILERAEKVETKGGEGEEGNELLSAFKVANFSSGEDDATFWSRLIQPDPADIIQETLAPRAARNKKSYVEDPQFDKNNNRKRRAVEAQEKPRRRSGRTVETVNSVPLVDGAVAQVREWSFGNIPKKDASRFVRAVKKFGNATQIDLIVDDVGGVLEKAPHEAQIELFDLLIDGCQKSC

SEQ ID NO: 191136 - protein, 1274 aa, Zea Mays
MAFFSNSGSKADSGGYNLNEKAEDEGIYESVQDGNVDLSSRQWNLNEKADDAYHCEAEQYEAGQSGLYSSEKASGQHIQKGGRSSGGPWGTNFLKDSRSKQMAEDVPSNSGRGMNAASLHDGLDDSGEDDELNRANGEVPAEEMLSDDYYEQDGEEQIESLHRGGTKQSSCSTSGGAAKSGSRQMKASKYNAYDDDDDDDYNDENDDDNDADEDDPADVDFEPDSETDKATDKDKFMDSENSDGDDDDGLELSDDDDDFVENRRQPKRLKIVATKTSKGRKLPMPAQRKRGVSHSDEEYSSGKDSDLPSDADFKHRSKRPDRLHQKSVGRSDVAPINSHNELRTSGRRTVKKISYVESEESDDSEEKSTKQQKLMKEELEEEDGETIEKVLWHQPKGVAEEAIKNHQSAQPTVVSLTSDFDQQWDELEFYIKWKGQSYLHCQWKTLSELQSVSGFKKVINYTKRVAEEQRYKRALSREEVEVHDVGKEMELDLIKQYSQVERIFADRVSKADGDDLVPEYLVKWQGLPYAESTWEKDTDIDFAQDAIDEYKAREAATSILGKTVDFQRKKSKASLRRLDDQPEWLKAGKLRDYQLEGLNFLVNGWRNDTNVILADEMGLGKTIQSVSMLGFLHNAQEINGPFLVVVPLSTLSNWAKEFRKWLPNMNVVIYVGNRASREMCQKHEFFSDKKGGRHVKFHTLITTYEVILKDKAVLSKIKWNYLMVDEAHRLKNCEASLYTTLLEFSTKNKLLITGTPLQNSVEELWALLHFLDPVKFNSKDSFVERYKNLSSFNETELANLHKELRPHILRRVIKDVEKSLPPKIERILRVEMSPLQKQYYKWILERNFQNLNKGVRGNQVSLLNIVVELKKCCNHPFLFESADHGYGGDSIGDRNKVERIVMSSGKLVLLDKLLMVKMLDILAEYLSLRGFQFQRLDGSTRADLRHQAMEHFNAPGSDDFCFLLSTRAGGLGINLATADTVIIFDSDWNPQNDLQAMSRAHRIGQQETVNIYRFVTCKSVEEDILERAKKKMVLDHLVIQKLNAEGRLEKKESKKGGSIFDKNELSAILRFGAEELFKEDKTDEEAKRNLESLDIDEILERAEKVETKGGEGEEGNELLSAFKVANFSSGEDDATFWSRLIQPDPADIIQETLAPRAARNKKSYVEDPQFDKNNNRKRRAVEAQEKPRRRSGRTVETVNSVPLVDGAVAQVREWSFGNIPKKDASRFVRAVKKFGNATQIDLIVDDVGGVLEKAPHEAQIELFDLLIDGCQKSC

SEQ ID NO: 191137 - protein, 1236 aa, Zea Mays
MAFFSNSGSKADSGGYNLNEKAEDEGIYESVQDGNVDLSSRQWNLNEKADDAYHCEAEQYEAGQSGLYSSEKASGQHIQKGGRSSGGPWGTNFLKDSRSKQMAEDVPSNSGRGMNAASLHDGLDDSGEDDELNRANGEVPAEEMLSDDYYEQDGEEQIESLHRGGTKQSSCSTSEDDPADVDFEPDSETDKATDKDKFMDSENSDGDDDDGLELSDDDDDFVENRRQPKRLKIVATKTSKGRKLPMPAQRKRGVSHSDEEYSSGKDSDLPSDADFKHRSKRPDRLHQKSVGRSDVAPINSHNELRTSGRRTVKKISYVESEESDDSEEKSTKQQKLMKEELEEEDGETIEKVLWHQPKGVAEEAIKNHQSAQPTVVSLTSDFDQQWDELEFYIKWKGQSYLHCQWKTLSELQSVSGFKKVINYTKRVAEEQRYKRALSREEVEVHDVGKEMELDLIKQYSQVERIFADRVSKADGDDLVPEYLVKWQGLPYAESTWEKDTDIDFAQDAIDEYKAREAATSILGKTVDFQRKKSKASLRRLDDQPEWLKAGKLRDYQLEGLNFLVNGWRNDTNVILADEMGLGKTIQSVSMLGFLHNAQEINGPFLVVVPLSTLSNWAKEFRKWLPNMNVVIYVGNRASREMCQKHEFFSDKKGGRHVKFHTLITTYEVILKDKAVLSKIKWNYLMVDEAHRLKNCEASLYTTLLEFSTKNKLLITGTPLQNSVEELWALLHFLDPVKFNSKDSFVERYKNLSSFNETELANLHKELRPHILRRVIKDVEKSLPPKIERILRVEMSPLQKQYYKWILERNFQNLNKGVRGNQVSLLNIVVELKKCCNHPFLFESADHGYGGDSIGDRNKVERIVMSSGKLVLLDKLLMVKMLDILAEYLSLRGFQFQRLDGSTRADLRHQAMEHFNAPGSDDFCFLLSTRAGGLGINLATADTVIIFDSDWNPQNDLQAMSRAHRIGQQETVNIYRFVTCKSVEEDILERAKKKMVLDHLVIQKLNAEGRLEKKESKKGGSIFDKNELSAILRFGAEELFKEDKTDEEAKRNLESLDIDEILERAEKVETKGGEGEEGNELLSAFKVANFSSGEDDATFWSRLIQPDPADIIQETLAPRAARNKKSYVEDPQFDKNNNRKRRAVEAQEKPRRRSGRTVETVNSVPLVDGAVAQVREWSFGNIPKKDASRFVRAVKKFGNATQIDLIVDDVGGVLEKAPHEAQIELFDLLIDGCQKSC

SEQ ID NO: 191138 - protein, 1286 aa, Zea Mays
MAFFSNSGSKADSGGYNLNEKAEDEGIYESVQDGNVDLSSRQWNLNEKADDAYHCEAEQYEAGQSGLYSSEKASGQHIQKGGRSSGGPWGTNFLKDSRSKQMAEDVPSNSGRGMNAASLHDGLDDSGEDDELNRANGEVPAEEMLSDDYYEQDGEEQIESLHRGGTKQSSCSTSGGAAKSGSRQMKASKYNAYDDDDDDDYNDENDDDNDADEDDPADVDFEPDSETDKATDKDKFMDSENSDGDDDDGLELSDDDDDFVENRRQPKRLKIVATKTSKGRKLPMPAQRKRGVSHSDEEYSSGKDSDLPSDADFKHRSKRPDRLHQKSVGRSDVAPINSHNELRTSGRRTVKKISYVESEESDDSEEKSTKQQKEELEEEDGETIEKVLWHQPKGVAEEAIKNHQSAQPTVVSLTSDFDQQWDELEFYIKWKGQSYLHCQWKTLSELQSVSGFKKVINYTKRVAEEQRYKRALSREEVEVHDVGKEMELDLIKQYSQVERIFADRVSKADGDDLVPEYLVKWQGLPYAESTWEKDTDIDFAQDAIDEYKAREAATSILGKTVDFQRKKSKASLRRLDDQPEWLKAGKLRDYQLEGLNFLVNGWRNDTNVILADEMGLGKTIQSVSMLGFLHNAQEINGPFLVVVPLSTLSNWAKEFRKWLPNMNVVIYVGNRASREMCQKHEFFSDKKGGRHVKFHTLITTYEVILKDKAVLSKIKWNYLMVDEAHRLKNCEASLYTTLLEFSTKNKLLITGTPLQNSVEELWALLHFLDPVKFNSKDSFVERYKNLSSFNETELANLHKELRPHILRRVIKDVEKSLPPKIERILRVEMSPLQKQYYKWILERNFQNLNKGVRGNQVSLLNIVVELKKCCNHPFLFESADHGYGGDSIGDRNKVERIVMSSGKLVLLDKLLVRLRETNHRVLIFSQMVKMLDILAEYLSLRGFQFQRLDGSTRADLRHQAMEHFNAPGSDDFCFLLSTRAGGLGINLATADTVIIFDSDWNPQNDLQAMSRAHRIGQQETVNIYRFVTCKSVEEDILERAKKKMVLDHLVIQKLNAEGRLEKKESKKGGSIFDKNELSAILRFGAEELFKEDKTDEEAKRNLESLDIDEILERAEKVETKGGEGEEGNELLSAFKVANFSSGEDDATFWSRLIQPDPADIIQETLAPRAARNKKSYVEDPQFDKNNNRKRRAVEAQEKPRRRSGRTVETVNSVPLVDGAVAQVREWSFGNIPKKDASRFVRAVKKFGNATQIDLIVDDVGGVLEKAPHEAQIELFDLLIDGCQKSC

SEQ ID NO: 191139 - protein, 341 aa, Zea Mays
MAVRRRTAAAAAGDPPPQAPPADEAAAVAPDEPVLRAPNLRVAAVAAALFLAPFSYLAFVHYSLTADLQRSILKCGAMSLVGFCVALKLIPIAARYHLRRRMFGYDINKKGLPTGQIKVPEALGLVVGIVYLVIAIIFQQFHYAPDSIWLVEYNAALTSICFMILLGFVDDVLDVPWRVKLALPTFAALPLLMAYAGGTSIIIPKPLTPYVGLTVLELGLFYKLFMLLLAVFCTNSINIHAGLNGLEVGQTVVISAAVLIHNVMRIASSTDIETQQAHEFSIYLVLPFLTISLALLAFNWYPSIVFVGDTYTYFAGMALAVIGILGHFRRDVVALLFTSSS

SEQ ID NO: 191140 - protein, 368 aa, Zea Mays
MAVRRRTAAAAAGDPPPQAPPADEAAAVAPDEPVLRAPNLRVAAVAAALFLAPFSYLAFVHYSLTADLQRSILKCGAMSLVGFCVALKLIPIAARYHLRRRMFGYDINKKGLPTGQIKVPEALGLVVGIVYLVIAIIFQQFHYAPDSIWLVEYNAALTSICFMILLGFVDDVLDVPWRVKLALPTFAALPLLMAYAGGTSIIIPKPLTPYVGLTVLELGLFYKLFMLLLAVFCTNSINIHAGLNGLEVGQTVVISAAVLIHNVMRIASSTDIETQQAHEFSIYLVLPFLTISLALLAFNWYPSIVFVGDTYTYFAGMALAVIGILGHFSETLLLFFLPQVLNFLCSVPQALCCVFCFWLRHMLTGWYK

SEQ ID NO: 191141 - protein, 165 aa, Zea Mays
MAVRRRTAAAAAGDPPPQAPPADEAAAVAPDEPVLRAPNLRVAAVAAALFLAPFSYLAFVHYSLTADLQRSILKCGAMSLVGFCVALKLIPIAARYHLRRRMFGYDINKKGLPTGQIKVPEALGLVVGIVYLVIAIIFQQFHYAPDSILFLLSSCCSGLLNIMQH

SEQ ID NO: 191142 - protein, 63 aa, Zea Mays
MITHCFFNKTNGQKNLKSQQCHIFMNGVSTKHKGDKVDTFPAAVLYPSKDSGVENRRSASLSV

SEQ ID NO: 191143 - protein, 1175 aa, Zea Mays
MVNTISSFCDTAIKSPNLNSRYQSSRECSTSDAEIDSKHLSLLKQPSDHDQFKVEQRSSFEHLNSGKISTSNSDDLDQDLSQHSIKLRYSLMSRSGIVAEGDLNQIPENRSSSAKNDNCNSPKDIVYSRANGSLAKNQKDSPPKEKPRDWQLHSDPARYINYYSFGQIAASAAEELKHKLSENKDVKKPVQDVLSFHLRTICKKYANFFALTDQKLSAELLKEKCGWCNSCQISGGVDCIFRLTDIKYMEGPKPHTLDLGAENNMESHIILAMYNILSVEERLNGLLSGPWQNPQYSICWRNAVLKASDVSSLKQPLLMLESSLRRVAITTEWQKAADSVEVVGSAAHILVRSSNKSLSHVSATARKPGRKPSPNGELKVDSRDVGVYWWRGGKLSRQVFHWKRLPQSLVNKAARQAGRRRIPTISYTDGSQFARRFKYIAWRAAVEMAENAAQLILQIKELEWNIKWTEILSTLPSSLMTKETQKIARLFKKVIIRRKRIEGTNVEYLLDFGKRENIPPVISKHGTKLEESSSERNRYWLSEVHVPLNLLKAYEAKTFARLLKKKETDELSKKTKKLCGSKPEMPRKTGFDYLFEKAEKRSTMPCGHCHKEVIASEAVNCQYCAALFHRKHFKVPRGATNAVYVCNKCLDEKVLKVESPQKKTAPKKLSPKKKQKKQKKQSRKIETRRNQIVLKCKTKIGKKGKRGRPRKNPTDLSKNEPSKIHESEPSNVSKNEPVKRISKRLHDKYMKSNSNVSENAASSSKRKRTVSQYSYWLNGLRWSQNPHDERARSFRKERVVFPSEDAEISEVNPVCCLCEKCYNEEDIYIACEKCEDWFHGDIYSVNIENVNNLIGFKCHRCRRRSLPVCPYAETVTVVKGQSDEDHCIKLVDQCVGKFVEDEDPNCPKDLGAPGSLQELHDHEIEQGLNVHITEIEFSYDNCLEELNDHGCSKEFDAHSTEKDLEDDKSLRKVDIHNELRALDDLGSEKEPGDHCNPKDLNSHINLKDPGNCRSDKEMKDNNCLNELDGDNNWKALDSYNSWKLLDSHNSQEELDCTTNSKFSPKEIPCPMELDGFSSLKLVSHNILEELDNHNCLKENGNENSSKELDNNGSPKDSGDCLADHFNSSRISGNEALVLTPETDSVNESLGLQSKDDPGKSVPTEHEIDLQVVVTL

SEQ ID NO: 191144 - protein, 972 aa, Zea Mays
MEALVGRAVRKAFPGFGTYAGVVESYDPGAGYFRVLYEDGDSEEVDADEMAQILVGPAMPRAQQQRTSPQDAAGRRPKKRRRGNEDDPSPTSTPDGVVLAVAAAAGEETEPATPVMEAVAEKKPRVSPGPESSRPLRRSARQAKAAEHAAEMEAAVAVAAAAEAEEEAAAAAAASTPQQSGRKRPRAIGSGRYRSVSRDLEEAAPKKPLPPPPKPELPPSSQGLDLGGLPVLDVFQVYSCLRSFSKQLFLSPFSLETFVAALRSTYVNPLIDWVHFTLLRALKSHLEDSANEGDPSAVHCIRNLNWELLDLATWPIYLAEYLLTRGSELRYGMKLTDLSLLSTEYYRQPAGVKLELLRSLSDDVLEIGAIRSRLSESDGNDEGFRSTGVRRKKRGRGSSAKVAVGSSQFPEGSAEVDDGNSDECYLCGMDGNLLCCDGCPAAFHSKCVGVVEDLLPEGDWYCPECLIRKDGSRNIANPMRGAEILGTDPHGRLYFFTCGYLLVSMVNTISSFCDTAIKSPNLNSRYQSSRECSTSDAEIDSKHLSLLKQPSDHDQFKVEQRSSFEHLNSGKISTSNSDDLDQDLSQHSIKLRYSLMSRSGIVAEGDLNQIPENRSSSAKNDNCNSPKDIVYSRANGSLAKNQKDSPPKEKPRDWQLHSDPARYINYYSFGQIAASAAEELKHKLSENKDVKKPVQDVLSFHLRTICKKYANFFALTDQKLSAELLKEKCGWCNSCQISGGVDCIFRLTDIKYMEGPKPHTLDLGAENNMESHIILAMYNILSVEERLNGLLSGPWQNPQYSICWRNAVLKASDVSSLKQPLLMLESSLRRVAITTEWQKAADSVEVVGSAAHILVRSSNKSLSHVSATARKPGRKPSPNGELKVDSRDVGVYWWRGGKLSRQVFHWKRLPQSLVNKAARQAGRRRIPTISYTDGSQFARRFKYIAWRAAVEMAENAAQLILQVTSSPCFGKQ

SEQ ID NO: 191145 - protein, 77 aa, Zea Mays
MAADGGPATSALEEALKPFQERASEAEIRIAKLEALLYNKDGPSGGSEATSSAVKDLQSKLDVVTAECLTEKEKLGS

SEQ ID NO: 191146 - protein, 322 aa, Zea Mays
MAMRTLGTFGVRTSCLSYLFIHYALLVAYVARSSNIITNSLGIPIWESATLFSLAFGGVCYFGSQRLIGAVNGVLVVGILASFTSLVVVASGNLQWSSLLEANFAAAPQSIPIIALSFVYQNVVPVLCTNLEGDLSKVRTAIVAGTAIPLALFLVWDGVILGTLPDLAGSSTVSDPLELLRSSNGIVGPIVEAFSFLAIATSYIGFVLGISDFLADLLKLPSGQNKPLPYVLTLFPPLVLSLLDPEIFFKALDFAGTYGVLVLFGVFPAAMSWSERYSDELEAPVPPIVPGGKFTLSAVMGGALLVIVPELIKDVMQLQGLH

SEQ ID NO: 191147 - protein, 306 aa, Zea Mays
MASWSWTSVHCSSYPLPGPSARFTPSLVSATTPALRRTRARGQLQRCLCSQYAGERQPPPPPPPQPEPDSPQQLERLFSNLNQTTMKHEPGSVTSAVFLVAGTTVGAGILAIPAVTQEAGFLASAVICILCWSYMVVTGLLVAEVNVNTMCELGSGGVSLVSMAMRTLGTFGVRTSCLSYLFIHYALLVAYVARSSNIITNSLGIPIWESATLFSLAFGGVCYFGSQRLIGAVNGVLVVGILASFTSLVVVASGNLQWSSLLEANFAAAPQSIPIIALSFVYQNVVPVLCTNLEGDLSKVRYDFQG

SEQ ID NO: 191148 - protein, 255 aa, Zea Mays
MASWSWTSVHCSSYPLPGPSARFTPSLVSATTPALRRTRARGQLQRCLCSQYAGERQPPPPPPPQPEPDSPQQLERLFSNLNQTTMKHEPGSVTSAVFLVAGTTVGAGILAIPAVTQEAGFLASAVICILCWSYMVVTGLLVAEVNVNTMCELGSGGVSLVSMAMRTLGTFGVRTSCLSYLFIHYALLVAYVARSSNIITNSLGIPIWESATLFSLAFGGVCYFGSKWSSGSRHPSILHFSCCSGKWKPTVEFSS

SEQ ID NO: 191149 - protein, 199 aa, Zea Mays
MWFLFSVQIWRETCQKYAIVAGTAIPLALFLVWDGVILGTLPDLAGSSTVSDPLELLRSSNGIVGPIVEAFSFLAIATSYIGFVLGISDFLADLLKLPSGQNKPLPYVLTLFPPLVLSLLDPEIFFKALDFAGTYGVLVLFGVFPAAMSWSERYSDELEAPVPPIVPGGKFTLSAVMGGALLVIVPELIKDVMQLQGLH

SEQ ID NO: 191150 - protein, 240 aa, Zea Mays
MWFTQVVASGNLQWSSLLEANFAAAPQSIPIIALSFVYQNVVPVLCTNLEGDLSKVRTAIVAGTAIPLALFLVWDGVILGTLPDLAGSSTVSDPLELLRSSNGIVGPIVEAFSFLAIATSYIGFVLGISDFLADLLKLPSGQNKPLPYVLTLFPPLVLSLLDPEIFFKALDFAGTYGVLVLFGVFPAAMSWSERYSDELEAPVPPIVPGGKFTLSAVMGGALLVIVPELIKDVMQLQGLH

SEQ ID NO: 191151 - protein, 83 aa, Zea Mays
MSFKRHDRRQWRQTGRESATGGGRDQSEVQNRASERAAKALRLSLEDRRRREGSGWVCVWRAKATSTTVGEPGKASPATAVTA

SEQ ID NO: 191152 - protein, 214 aa, Zea Mays
MASAVHSPLALLPRPRAVADGGMEDSDSESVAESCPHPRGAATDSSSCCGSSACCHDDEEEEEMDEDDDGCSSCVEGDECSSYHQGQEGAAGGGGGGGDGDVEERRLVGADGGGRGPRHDASSPTGAGGRGRRGPEARGGAAGGGPQVLGGLSRLRVPMNPPTPLAPCHASDRAHRNPMRACSRTNHKLHTRRRRQRPESPCRHTRASSSSMFF

SEQ ID NO: 191153 - protein, 1014 aa, Zea Mays
MSRSGPRRGIFDGLPIPADKSYLKESLSRIDESWAAARFDSLPHVVHILTSKDREGEIQFLKEQSDLIEDVVDEVVHAYHHGFNKAIQNYSQILRLFSESAESITGLKGEMEEAKKLLGRKNKHLGQLWYRSLTLRHVLSLLDQVEDVAKVPARIENLMAEKQLYAAVQLQVQSVLILEREGLQAVGALQDVRSDLTKLRGVLFYKILEELHAHLYNNGEYSSAVLSMVDSEQAPTSTATGRLVNSMQPLSRRTRSIKGDNHIGGPVDGFPKVSSVDGGSSFDGPDDNSLDMSESDGHTRKDSKSFSHEIPIFLSYATPDEFLESMIKADAPLNVKYLRTLVQCLSMLGKVAAAGAVICQRVRPTIHDVITSKIKACSEDASKSSMGKAAKTNDVLHSNGPTPRFQMFTQKTKSGASVMAAQLVVSPISPTMAPTGDAQRAATQLLRSIFECLVEILENHIIVGELLEQKSTSEVDNVNTPHIANGDASWNPDSESFQATGGFSVAFSLSVVQSECQQLLCEILRATPEAATADAAVQTARLANKDPVKEKRDGSEGLSFAFRITDAATPASNEGQGWRRNSNVPQEGSDGLLAFVNNFLKEHFLPAIFVDYRKCVQQAISSPAAFRPRVHATSAYSSSVELGRPVLQGLLAIDIIAKEVLGWVQLMPNYATELVEYVRTFLERAHERCRASYMEAVLEKQSYILLSRNDIESLMRLEPANISLQNSTGEHDNNATGAEAVEVEIELSDLLLDMCPIKQENLIHDDQKLILLASLSDSLEYLADSVERLGESFISPPTTSESINHSHGRHARSSSAIPKSLASLANEYRRLAVDCVRVLRLEMQLEAIYHMQEMTKREYVEDQDAEDPDDFIISLTTQIARRDEEMAPYITESERNYIFGGISSVAANASIKALAQMKSINLLGVQQICRNSIALEQALAAIPSIDSEAVQQRLDRVRTFYELLNLPFESLLGFIAEHEYLFSAKEYLSVLKVNVPGREIPADAERRISQILGH

SEQ ID NO: 191154 - protein, 897 aa, Zea Mays
MAEKQLYAAVQLQVQSVLILEREGLQAVGALQDVRSDLTKLRGVLFYKILEELHAHLYNNGEYSSAVLSMVDSEQAPTSTATGRLVNSMQPLSRRTRSIKGDNHIGGPVDGFPKVSSVDGGSSFDGPDDNSLDMSESDGHTRKDSKSFSHEIPIFLSYATPDEFLESMIKADAPLNVKYLRTLVQCLSMLGKVAAAGAVICQRVRPTIHDVITSKIKACSEDASKSSMGKAAKTNDVLHSNGPTPRFQMFTQKTKSGASVMAAQLVVSPISPTMAPTGDAQRAATQLLRSIFECLVEILENHIIVGELLEQKSTSEVDNVNTPHIANGDASWNPDSESFQATGGFSVAFSLSVVQSECQQLLCEILRATPEAATADAAVQTARLANKDPVKEKRDGSEGLSFAFRITDAATPASNEGQGWRRNSNVPQEGYGTASVIPDQGIFLAASVYRPVFEFMNKIGLMLPQKYSQLGSDGLLAFVNNFLKEHFLPAIFVDYRKCVQQAISSPAAFRPRVHATSAYSSSVELGRPVLQGLLAIDIIAKEVLGWVQLMPNYATELVEYVRTFLERAHERCRASYMEAVLEKQSYILLSRNDIESLMRLEPANISLQNSTGEHDNNATGAEAVEVEIELSDLLLDMCPIKQENLIHDDQKLILLASLSDSLEYLADSVERLGESFISPPTTSESINHSHGRHARSSSAIPKSLASLANEYRRLAVDCVRVLRLEMQLEAIYHMQEMTKREYVEDQDAEDPDDFIISLTTQIARRDEEMAPYITESERNYIFGGISSVAANASIKALAQMKSINLLGVQQICRNSIALEQALAAIPSIDSEAVQQRLDRVRTFYELLNLPFESLLGFIAEHEYLFSAKEYLSVLKVNVPGREIPADAERRISQILGH

SEQ ID NO: 191155 - protein, 848 aa, Zea Mays
MPICTTMANIDFLCSSAVLSMVDSEQAPTSTATGRLVNSMQPLSRRTRSIKGDNHIGGPVDGFPKVSSVDGGSSFDGPDDNSLDMSESDGHTRKDSKSFSHEIPIFLSYATPDEFLESMIKADAPLNVKYLRTLVQCLSMLGKVAAAGAVICQRVRPTIHDVITSKIKACSEDASKSSMGKAAKTNDVLHSNGPTPRFQMFTQKTKSGASVMAAQLVVSPISPTMAPTGDAQRAATQLLRSIFECLVEILENHIIVGELLEQKSTSEVDNVNTPHIANGDASWNPDSESFQATGGFSVAFSLSVVQSECQQLLCEILRATPEAATADAAVQTARLANKDPVKEKRDGSEGLSFAFRITDAATPASNEGQGWRRNSNVPQEGYGTASVIPDQGIFLAASVYRPVFEFMNKIGLMLPQKYSQLGSDGLLAFVNNFLKEHFLPAIFVDYRKCVQQAISSPAAFRPRVHATSAYSSSVELGRPVLQGLLAIDIIAKEVLGWVQLMPNYATELVEYVRTFLERAHERCRASYMEAVLEKQSYILLSRNDIESLMRLEPANISLQNSTGEHDNNATGAEAVEVEIELSDLLLDMCPIKQENLIHDDQKLILLASLSDSLEYLADSVERLGESFISPPTTSESINHSHGRHARSSSAIPKSLASLANEYRRLAVDCVRVLRLEMQLEAIYHMQEMTKREYVEDQDAEDPDDFIISLTTQIARRDEEMAPYITESERNYIFGGISSVAANASIKALAQMKSINLLGVQQICRNSIALEQALAAIPSIDSEAVQQRLDRVRTFYELLNLPFESLLGFIAEHEYLFSAKEYLSVLKVNVPGREIPADAERRISQILGH

SEQ ID NO: 191156 - protein, 1019 aa, Zea Mays
MSRSGPRRGIFDGLPIPADKSYLKESLSRIDESWAAARFDSLPHVVHILTSKDREGEIQFLKEQSDLIEDVVDEVVHAYHHGFNKAIQNYSQILRLFSESAESITGLKGEMEEAKKLLGRKNKHLGQLWYRSLTLRHVLSLLDQVEDVAKVPARIENLMAEKQLYAAVQLQVQSVLILEREGLQAVGALQDVRSDLTKLRGVLFYKILEELHAHLYNNGEYSSAVLSMVDSEQAPTSTATGRLVNSMQPLSRRTRSIKGDNHIGGPVDGFPKVSSVDGGSSFDGPDDNSLDMSESDGHTRKDSKSFSHEIPIFLSYATPDEFLESMIKADAPLNVKYLRTLVQCLSMLGKVAAAGAVICQRVRPTIHDVITSKIKACSEDASKSSMGKAAKTNDVLHSNGPTPRFQMFTQKTKSGASVMAAQLVVSPISPTMAPTGDAQRAATQLLRSIFECLVEILENHIIVGELLEQKSTSEVDNVNTPHIANGDASWNPDSESFQATGGFSVAFSLSVVQSECQQLLCEILRATPEAATADAAVQTARLANKDPVKEKRDGSEGLSFAFRITDAATPASNEGQGWRRNSNVPQEGYGTASVIPDQGIFLAASVYRPVFEFMNKIGLMLPQKYSQLGSDGLLAFVNNFLKEHFLPAIFVDYRKCVQQAISSPAAFRPRVHATSAYSSSVELGRPVLQGLLAIDIIAKEAVLEKQSYILLSRNDIESLMRLEPANISLQNSTGEHDNNATGAEAVEVEIELSDLLLDMCPIKQENLIHDDQKLILLASLSDSLEYLADSVERLGESFISPPTTSESINHSHGRHARSSSAIPKSLASLANEYRRLAVDCVRVLRLEMQLEAIYHMQEMTKREYVEDQDAEDPDDFIISLTTQIARRDEEMAPYITESERNYIFGGISSVAANASIKALAQMKSINLLGVQQICRNSIALEQALAAIPSIDSEAVQQRLDRVRTFYELLNLPFESLLGFIAEHEYLFSAKEYLSVLKVNVPGREIPADAERRISQILGH

SEQ ID NO: 191157 - protein, 828 aa, Zea Mays
MVDSEQAPTSTATGRLVNSMQPLSRRTRSIKGDNHIGGPVDGFPKVSSVDGGSSFDGPDDNSLDMSESDGHTRKDSKSFSHEIPIFLSYATPDEFLESMIKADAPLNVKYLRTLVQCLSMLGKVAAAGAVICQRVRPTIHDVITSKIKACSEDASKSSMGKAAKTNDVLHSNGPTPRFQMFTQKTKSGASVMAAQLVVSPISPTMAPTGDAQRAATQLLRSIFECLVEILENHIIVGELLEQKSTSEVDNVNTPHIANGDASWNPDSESFQATGGFSVAFSLSVVQSECQQLLCEILRATPEAATADAAVQTARLANKDPVKEKRDGSEGLSFAFRITDAATPASNEGQGWRRNSNVPQEGYGTASVIPDQGIFLAASVYRPVFEFMNKIGLMLPQKYSQLGSDGLLAFVNNFLKEHFLPAIFVDYRKCVQQAISSPAAFRPRVHATSAYSSSVELGRPVLQGLLAIDIIAKEVLGWVQLMPNYATELVEYVRTFLERAHERCRASYMEAVLEKQSYILLSRNDIESLMRLEPANISLQNSTGEHDNNATGAEAVEVEIELSDLLLDMCPIKQENLIHDDQKLILLASLSDSLEYLADSVERLGESFISPPTTSESINHSHGRHARSSSAIPKSLASLANEYRRLAVDCVRVLRLEMQLEAIYHMQEMTKREYVEDQDAEDPDDFIISLTTQIARRDEEMAPYITESERNYIFGGISSVAANASIKALAQMKSINLLGVQQICRNSIALEQALAAIPSIDSEAVQQRLDRVRTFYELLNLPFESLLGFIAEHEYLFSAKEYLSVLKVNVPGREIPADAERRISQILGH

SEQ ID NO: 191158 - protein, 436 aa, Zea Mays
MLPQKYSQLGSDGLLAFVNNFLKEHFLPAIFVDYRKCVQQAISSPAAFRPRVHATSAYSSSVELGRPVLQGLLAIDIIAKEVLGWVQLMPNYATELVEYVRTFLERAHERCRASYMEAVLEKQSYILLSRNDIESLMRLEPANISLQNSTGEHDNNATGAEAVEVEIELSDLLLDMCPIKQENLIHDDQKLILLASLSDSLEYLADSVERLGESFISPPTTSESINHSHGRHARSSSAIPKSLASLANEYRRLAVDCVRVLRLEMQLEAIYHMQEMTKREYVEDQDAEDPDDFIISLTTQIARRDEEMAPYITESERNYIFGGISSVAANASIKALAQMKSINLLGVQQICRNSIALEQALAAIPSIDSEAVQQRLDRVRTFYELLNLPFESLLGFIAEHEYLFSAKEYLSVLKVNVPGREIPADAERRISQILGH

SEQ ID NO: 191159 - protein, 417 aa, Zea Mays
MQVAAARARRLLALPAASGIPGILSGPIPGRASCAEGVLLYRLNGAPASPSSPQHTRGFSSSCFASRSHCNLPSPTIASQWLNEKSVHCHMTTAHFSTEASDMDHPTEAVEEMYQKMLKSVEAETMPPNAWLWSMIDSCSNKEDIKLLFQILQKLRVFRLSNLRISANFNEHLCRKVTEACARVGAVDYGLKALWKHNVYGITPTIGSAHYLLQHAKEQNDNKLMENVIHVLSKNFLPLQPGTADIVFSICYNADRWDLLSKYAERFVKAGVKLHRAAFDIWMDFAAKVGDSQSIWHINSLRGRSVKHYTLATGFACAKGSLLDRKPENAADKIKLLYEVWHRHLPDQKKPFVKDELEKLIAGWPTEVVKRQKKDKRKELEEALMKDIPTMVDCLTKSGLDIPVELDKLATPQLQVA

SEQ ID NO: 191160 - protein, 368 aa, Zea Mays
MQVAAARARRLLALPAASGIPGILSGPIPGRASCAEGVLLYRLNGAPASPSSPQHTRGFSSSCFASRSHCNLPSPTIASQWLNEKSVHCHMTTAHFSTEASDMDHPTEAVEEMYQKMLKSVEAETMPPNAWLWSMIDSCSNKEDIKLLFQILQKLRVFRLSNLRISANFNEHLCRKVTEACARVGAVDYGLKALWKHNVYGITPTIGSAHYLLQHAKEQNDNKLMENVIHVLSKNFLPLQPGTADIVFSICYNADRWDLLSKYAERFVKAGVKLHRAAFDIWMDFAAKVGDSQSIWHINSLRGRSVKHYTLATGFACAKGSLLDRKPENAADKIKLLYEVWHRVGHQTYITKILDLLHGSSILKNISG

SEQ ID NO: 191161 - protein, 81 aa, Zea Mays
MPKVLTVSMAISSSWSCSYVMMSMDSTHIAWARPDLKNLCVAPESPTTMVLSSLSEASTSTAALHYEVVDFIKPALGKLEG

SEQ ID NO: 191162 - protein, 341 aa, Zea Mays
MLSLLHHPNLVRLIGYCADGDQRLLVYEYMLLGSLENRLFGPAGKEPLDWNTRMKIAAGAAKGLEYLHDKANPPVIYRDFKSSNILLGEDYYPKLSDFGLAKLGPVGDKTHVSTRVMGTYGYCAPEYAMTGQLTLKSDVYSFGVVFLELITGRKAIDHTQPSGEQNLVAWARPLFRDRRKFCQLADPLLHGGYPKRGLYQALAVAAMCLQEQAASRPLIGDVVTALSYLAAHPYDPNAPSTKDSKTCPSTPRAKTHRRTTSVPDAQHAAESLILNFPDMRKETVRGGEFEKDRTEGSGSSSSSGRNDCLDVPRLLSVPNGKVCGEGNNIQKSTVKVGAREN

SEQ ID NO: 191163 - protein, 471 aa, Zea Mays
MKGCSERLLFLLLLLASSSLLSAVIAAQQTCPADLDSKCDGGASDDDWEGEFFPGVPKIKYEGPTSKNPLAYKWYNKEEVILGKKMKDWMRFSVAFWHTFRGTGADPFGAPTKTWPWEDGTNSLAMAKRRMRAHFEFMEKLGVDKWCFHDRDIAPDGKTLEETNSNLDEIVQLAKQLQLFMHPRYMHGAATSPEVKVYAYAAAQVKKALEVTHYLGGENYVFWGGREGYQTLLNTDMKRELDHLANFLQAAVDYKKKIGFNGTLLIEPKPQEPTKHQYDWDVATTFAFLQKYGLTGEFKINVECNHATLSGHSCHHELETARINGLLGNIDANTGDPQVGWDTDQFMTDIAEATLVMSSVVKNGGLAPGGFNFDAKLRRESTDVEDMFLAHISGMDTLARGLRNVAKLIGDGSLDDLVRKRYQSFDSEIGALIEAGKGDFETLEKKVLEWGEPTVASGKQELAEILFQSAL

SEQ ID NO: 191164 - protein, 399 aa, Zea Mays
MKDWMRFSVAFWHTFRGTGADPFGAPTKTWPWEDGTNSLAMAKRRMRAHFEFMEKLGVDKWCFHDRDIAPDGKTLEETNSNLDEIVQLAKQLQGETNIKPLWGTAQLFMHPRYMHGAATSPEVKVYAYAAAQVKKALEVTHYLGGENYVFWGGREGYQTLLNTDMKRELDHLANFLQAAVDYKKKIGFNGTLLIEPKPQEPTKHQYDWDVATTFAFLQKYGLTGEFKINVECNHATLSGHSCHHELETARINGLLGNIDANTGDPQVGWDTDQFMTDIAEATLVMSSVVKNGGLAPGGFNFDAKLRRESTDVEDMFLAHISGMDTLARGLRNVAKLIGDGSLDDLVRKRYQSFDSEIGALIEAGKGDFETLEKKVLEWGEPTVASGKQELAEILFQSAL

SEQ ID NO: 191165 - protein, 479 aa, Zea Mays
MKGCSERLLFLLLLLASSSLLSAVIAAQQTCPADLDSKCDGGASDDDWEGEFFPGVPKIKYEGPTSKNPLAYKWYNKEEVILGKKMKDWMRFSVAFWHTFRGTGADPFGAPTKTWPWEDGTNSLAMAKRRMRAHFEFMEKLGVDKWCFHDRDIAPDGKTLEETNSNLDEIVQLAKQLQGETNIKPLWGTAQLFMHPRYMHGAATSPEVKVYAYAAAQVKKALEVTHYLGGENYVFWGGREGYQTLLNTDMKRELDHLANFLQAAVDYKKKIGFNGTLLIEPKPQEPTKHQYDWDVATTFAFLQKYGLTGEFKINVECNHATLSGHSCHHELETARINGLLGNIDANTGWDTDQFMTDIAEATLVMSSVVKNGGLAPGGFNFDAKLRRESTDVEDMFLAHISGMDTLARGLRNVAKLIGDGSLDDLVRKRYQSFDSEIGALIEAGKGDFETLEKKVLEWGEPTVASGKQELAEILFQSAL

SEQ ID NO: 191166 - protein, 90 aa, Zea Mays
MQRWSASQASIKSQCPVGPRTWFDQTRTQPVALPSSPSVLFRPPPVHRPVQFGGDMAAAGDLSDDEKRAMRGSKFAPLPPPPPSSRPQPR

SEQ ID NO: 191167 - protein, 470 aa, Zea Mays
MVIGDGVFTPTISVLSAISGLQDPATSGLGDGWIVFIACVMLVGLFALQHRGTHKVAFLFAPIIVLWLLSIGIIGLYNIIRWNPRIFVALSPHYIVKFFKKTGKDGWISLGGVLLAITGTEAMFADLGHFSAASIRLAFVSVIYPCLVLQYMGQAAFLSKNIPAVYNSFYLSIPSPLFWPVFVIATLAAILGSQAIISATFSIVKQCLALGCFPRVKVVHTSRWIRGQIYIPEINWILMVLCLAVTLGFRDITVIGNAYGLACITVMFVTTCLMSLVIIFVWQKNLLISLLFFVFFGALEGAYLSAAVMKVPQGGWAPIALSAVFMFIMYVWHYGTRRKYLFDLQNKVSMRWILNLGPSLGIVRVPGIGLIYTELVTGVPAIFSHFVTNLPAFHQVLVFVCVKSVPVPYVPMDERYLIGRIGPREYRMYRCIVRWRPRSRPRRGRGGATSRRRRAGWRSCTPPARRGPGW

SEQ ID NO: 191168 - protein, 702 aa, Zea Mays
MQLCATSGAFALYSLLCRHAKFSLLPNQQAADEELSTYYHPGTDRAVVSSPFKRFLEKHRKLRTCLLLFVLFGACMVIGDGVFTPTISVLSAISGLQDPATSGLGDGWIVFIACVMLVGLFALQHRGTHKVAFLFAPIIVLWLLSIGIIGLYNIIRWNPRIFVALSPHYIVKFFKKTGKDGWISLGGVLLAITGTEAMFADLGHFSAASIRLAFVSVIYPCLVLQYMGQAAFLSKNIPAVYNSFYLSIPSPLFWPVFVIATLAAILGSQAIISATFSIVKQCLALGCFPRVKVVHTSRWIRGQIYIPEINWILMVLCLAVTLGFRDITVIGNAYGLACITVMFVTTCLMSLVIIFVWQKNLLISLLFFVFFGALEGAYLSAAVMKVPQGGWAPIALSAVFMFIMYVWHYGTRRKYLFDLQNKVSMRWILNLGPSLGIVRVPGIGLIYTELVTGVPAIFSHFVTNLPAFHQVLVFVCVKSVPVPYVPMDERYLIGRIGPREYRMYRCIVRYGYKDVQKDDENFENNLVMSIARFIQMEAEESASSGTGRSYESSTEGRMAVVHTTGTTGTGLVMMASAEDAEGTSLSRSSKSETLRSLQSIYEQESAGTVSRRRRRVRFQIDEEERIEPQVRDELSDLLEAKEAGAAYIIGHSYVKARKNSNFLKTFAINYAYSFLRKNCRGPSVTLHIPHISLIEVGMIYYV

SEQ ID NO: 191169 - protein, 422 aa, Zea Mays
MHRGTHKVAFLFAPIIVLWLLSIGIIGLYNIIRWNPRIFVALSPHYIVKFFKKTGKDGWISLGGVLLAITGTEAMFADLGHFSAASIRLAFVSVIYPCLVLQYMGQAAFLSKNIPAVYNSFYLSIPSPLFWPVFVIATLAAILGSQAIISATFSIVKQCLALGCFPRVKVVHTSRWIRGQIYIPEINWILMVLCLAVTLGFRDITVIGNAYGLACITVMFVTTCLMSLVIIFVWQKNLLISLLFFVFFGALEGAYLSAAVMKVPQGGWAPIALSAVFMFIMYVWHYGTRRKYLFDLQNKVSMRWILNLGPSLGIVRVPGIGLIYTELVTGVPAIFSHFVTNLPAFHQVLVFVCVKSVPVPYVPMDERYLIGRIGPREYRMYRCIVRWRPRSRPRRGRGGATSRRRRAGWRSCTPPARRGPGW

SEQ ID NO: 191170 - protein, 475 aa, Zea Mays
MDEEVGAAGRQQVQWKSYCSTLSLLAFQSFGVVYGDLSTSPLYVYRNSLSGRLNGYLDETTIFGLFSLVFWTFTLVPLLKYVIIVLSADDNGEGGAFALYSLLCRHAKFSLLPNQQAADEELSTYYHPGTDRAVVSSPFKRFLEKHRKLRTCLLLFVLFGACMVIGDGVFTPTISVLSAISGLQDPATSGLGDGWIVFIACVMLVGLFALQHRGTHKVAFLFAPIIVLWLLSIGIIGLYNIIRWNPRIFVALSPHYIVKFFKKTGKDGWISLGGVLLAITGTEAMFADLGHFSAASIRLAFVSVIYPCLVLQYMGQAAFLSKNIPAVYNSFYLSIPSPLFWPVFVIATLAAILGSQAIISATFSIVKQCLALGCFPRVKVVHTSRWIRGQIYIPEINWILMVLCLAVTLGFRDITVIGNAYGKPLTISVLHKLGKSYQAHGFYFGTIWCFRLRHLQILHFIQDPKFKPFSTLWLI

SEQ ID NO: 191171 - protein, 78 aa, Zea Mays
MLHQTIPDVVEAVSNAESDGEERNCSPEQFGHRGVAIGCVQHPPQRQLRSRAGTAKRRIMKMSSERSMSLSPSQLGLW

SEQ ID NO: 191172 - protein, 112 aa, Zea Mays
MLTEAELLQLQLSRQQKESNKIPRINKSRRCLQHNTARNILDRRSQNSDEKNMFVAILSLYIIRVTASMKQILFWTCYMISMYYYVMYLSVYLSGAITNRHVSYIESFALAC

SEQ ID NO: 191173 - protein, 143 aa, Zea Mays
MPNKPLSALTLQDRNAEVQIQVHRKWEFRGAVDNGPILHIDMILTDCTGNAIHCQIPSFLAATRGDEFQVGKIYKMTRFSVARAKSTYKPVDGDLMLYVKPYTTLELCHTSPSGFPLYVYHLTSYDKIDPDGSNARNFHATTF

SEQ ID NO: 191174 - protein, 99 aa, Zea Mays
MKPTLPMPQARMLELLPTNPRDKPQVRPWQWGHLQLLQMTILCSETLPRALRLHVDPSHLNTLRESGSMCDADINTELKAIVPVIIDVCMTALYAKNPS

SEQ ID NO: 191175 - protein, 261 aa, Zea Mays
MSDEGGAGEPLSDRQKREIATWFLSNAPAGEIHYIAKDVRALLGNDAVYEAAAAEAFPEYNKARLVSIELPDRSGDIIISTYGEIDKNNYLDPRTAQVATIDHMKQTCTKLRPAEDEELPSAYIEEFRCALDVELSNNGSWCSVWTIEFNYELQFVDIKGKIQVDAHYFEEGNVQLDTNIDRKDSTRMQSPDDCAVSISGIIRHHESEYLSSLEESYLNLSDATFKDLRRKLPVTRTLFPWHNTLVFGLTRDLAKELALGK

SEQ ID NO: 191176 - protein, 156 aa, Zea Mays
MSDEGGAGEPLSDRQKREIATWFLSNAPAGEIHYIAKDVRALLGNDAVYEAAAAEAFPEYNKARLVSIELPDRSGDIIISTYGEIDKNNYLDPRTAQVATIDHMKQTCTKLRPAEDEELPSAYIEEFSGKDIEGPGADFSFAAVISAAKRSPQNFW

SEQ ID NO: 191177 - protein, 216 aa, Zea Mays
MSDEGGAGEPLSDRQKREIATWFLSNAPAGEIHYIAKDVRALLGNDAVYEAAAAEAFPEYNKARLVSIELPDRSGDIIISTYGEIDKNNYLDPRTAQVATIDHMKQTCTKLRPAEDEELPSAYIEEFRCALDVELSKYVSEAYPKGACAVYCTSGKDIEGPGADFSFAAVISAAKRSPQNFCNGSWCSVWTIEFNYELQFVDIKGKIQVDLFYLTR

SEQ ID NO: 191178 - protein, 174 aa, Zea Mays
MCGGAIISEFIPHRGAKRGLCAEDIWPHAAADFDDLLHAHAHAHGHDDDDFAAAASFHPDQGQGQLPQRGPAARVRRRRRRPRPRPRRRGAGDARHVRRRRQGRPPSRLRRRRRHGHGRLLPAPRVRARRRGAAGAGAHGRVRAPPAAAAATAGRCRDGHVDVRRHQHARAHVM

SEQ ID NO: 191179 - protein, 76 aa, Zea Mays
MHSAVAGIYPPVDVDVESTHMHAVACWHASFGPFDRARKQELSSYVGPIVASCQRDVHHIRGIWNGEIGVHHPSRR

SEQ ID NO: 191180 - protein, 240 aa, Zea Mays
MTTDVTQSSHINYYFLSVHCARARMALLPAGRNLVRRAPGAARRDDGKHGRREQRHPDAVHGPAGAAGQLRVPRPVPARPGGALRRPHAGLLPLPLLPRPPVQRDRHAGPGVRRVAGRALPADGRRRRAVGAGRHPHHRRRGLLPGPHAGPRAAALGPAALPGRRRRWRSGGVLRREPDQVLGGLRRGHAQAGQPEPAHRRRRGGQGELPGRQPGVSVTSPPSPSNERGISFVPYAHCGC

SEQ ID NO: 191181 - protein, 445 aa, Zea Mays
MAEHKGNVLLHKYEMGKLLGQGTFAKVYHARNTATSESVAIKVIDKEKVMKVGLIDQIQREISVMKLVRHPNIVQLYEVMATKTKIYFVLEHVKGGELFNKIQRGRLKEDAARKYFQQLICAVDFCHSRGVYHRDLKPENLLLDENSNLKVSDFGLSALAECHRQDGLLHTTCGTPAYVAPEVINRKGYDGAKADIWSCGVILFVLLAGYLPFHDKNLMDMYKKIEKADFKCPSWFSTDVRRLLQRILDPNPSRRISMEKIMENPWFRKGLGAKLLRYDLQNKNAPHVDKNADFDSLSANITTESKQHEEKKPINMNAFDIISLSTGLDLSGLFEESNKKRESKFTSTNTSSTIISKIEDIAKNLRLNLTKKDGGLLKMEASKPGRKGVMGIDAEVFEVSPNFHLVEIKKTNGDTLEYQKVLNQEMRPALKEIVWAWQEGMLTLF

SEQ ID NO: 191182 - protein, 692 aa, Zea Mays
MDPEFGVGTAPQKGRRAWRTTLLLAYQSLGVVYGDLSISPLYVYKSTFAEDITHSETNQEIFGALSFVFWTLTLVPLLKYATIVLRADDSGEDAVIPITCAILVFLFALQHYGTHRVGFLFAPIILAWLLCMSAIGLYNIVRWNPQIYQALNPVYMIRFLRKTKKSGWMSLGGILLCMTGSEAMFADLGHFSYSAIQLAFTSLVYPSLILGYMGQAAYLSQHHNLDASYQIGFYIAVPECVRWPVLVLAILASVVGSQAIISGTFSIINQSQSLSCFPRVKVVHTSDKVHGQIYIPEVNWILMILCVAVTVGFRNTKHMGNASGLAVITVMLVTTCLMPLVIMLCWDRSPWLALAFFLFFGSIEALYFSASLIKFLDGAWVPILLALILLAVMFVWHHTTIRKYEYDMHNKVTLEWLLALGDKLGMVRVPGIGLVYTDLTSGVPANFSRFVTNLPAFHRVLVFVCVKSVPVPHVLPAERYLVGRVGPPGHRSYRCIVRYGYRDVHQDVDSFETELVESLATFIKLDALFRCSDAAGDQQRDSSYYERENALTVIGSNPLRRHLALGYDDSHSHDDGASSAGSDRVDGIELAAAAPAPAVVKKQVRFAVAPPRSPGVDETVLEELHELCEAREAGTAFILGHSHVKTKPGSSILKRLAVGVGYNFLRRNCRGPDVVLRVPPASLLEVGMVYVL

SEQ ID NO: 191183 - protein, 358 aa, Zea Mays
MRIKIQEKSYSHPSCCQICWISQAVEEACLADVLDEDSFKMSDIILKLKTSTRSSSLSLVSSTDSERRKLSHVYCSHSTGDDLQLSHAEVQVDMVWQQNVPLSPNGSTFTPSPSNNSDNYHVSWFCFSPTSHGTGTYIPNMSYHTYRERMMLERETIRARKQRQRFPDRRYYSAEQGFADSQTEDSVAQSGTNQSPTKQNSAQQSGYSSKSSISDGDFVRFKEHVATNGGTKQAVGRDFVEKGRHTTPPSSPPMTVLLQNGQGKPTCQPSSPVTADLFNAAKSLEFGSLGPFSLGLPSTSTQFEEEFPALPTRKRAEGPISVAPSAKAVETKSRSEESEEMFRLRNESDFPPLQAGCR

SEQ ID NO: 191184 - protein, 907 aa, Zea Mays
MGRSPSSFGPLRPMNACVWMPNSNFTRLVLLCSRRFFSVVRRTAETLSAIKKGTVLATSTFPRWFADVFAFGSVPLRTYLPDGDVDITVLGNTWLNSTFIDDVRSMLQSEQENCDAEFKLTGLQFINAEVKLIKCVIENIIVDVSFNQIGGVSTFCFLELVDRQIGQNHLFKRSIMLIKAWCYHESRILGAHHGLISTYALETLVLYIFNMFHKSLHGPLEALYRFLEYFSKFDWDRYGISLNGQVDLSSLTVEPTDVQGESLLGKELQQGYLDRLVVIPNEFDGCGTQFRQKFLNIIDPLKANNNLGRSVSKANFYRIRSAFSFGAQKLGQILLLPSEYIRDEIYGFFANTLKRHGNGERPDVDTCSSFHPSRGPESALTEDGSKFKFCCMNEGENGSSCQCHSSKLPDKDSSVTDAHKNSGKYLPGLVQDISWNKIWFMEYASDFKEHTSTLASLSSHSPCSQDNSNGSSDECFENYAAEEDLHQNVPQQIYPEHPSHILTNSTSANILDFSSSCFGDESDWTAPRAGKKLLPPFLLSNMLDLSGDLELHLGCLRKVQYHLESLFDELLQAVEEACLADVLDEDSFKMSDIILKLKTSTRSSSLSLVSSTDSERRKLSHVYCSHSTGDDLQLSHAEVQVDMVWQQNVPLSPNGSTFTPSPSNNSDNYHVSWFCFSPTSHGTGTYIPNMSYHTYRERMMLERETIRARKQRQRFPDRRYYSAEQGFADSQTEDSVAQSGTNQSPTKQNSAQQSGYSSKSSISDGDFVRFKEHVATNGGTKQAVGRDFVEKGRHTTPPSSPPMTVLLQNGQGKPTCQPSSPVTADLFNAAKSLEFGSLGPFSLGLPSTSTQFEEEFPALPTRKRAEGPISVAPSAKAVETKSRSEESEEMFRLRNESDFPPLQAGCR

SEQ ID NO: 191185 - protein, 802 aa, Zea Mays
MLQSEQENCDAEFKLTGLQFINAEVKLIKCVIENIIVDVSFNQIGGVSTFCFLELVDRQIGQNHLFKRSIMLIKAWCYHESRILGAHHGLISTYALETLVLYIFNMFHKSLHGPLEALYRFLEYFSKFDWDRYGISLNGQVDLSSLTVEPTDVQGESLLGKELQQGYLDRLVVIPNEFDGCGTQFRQKFLNIIDPLKANNNLGRSVSKANFYRIRSAFSFGAQKLGQILLLPSEYIRDEIYGFFANTLKRHGNGERPDVDTCSSFHPSRGPESALTEDGSKFKFCCMNEGENGSSCQCHSSKLPDKDSSVTDAHKNSGKYLPGLVQDISWNKIWFMEYASDFKEHTSTLASLSSHSPCSQDNSNGSSDECFENYAAEEDLHQNVPQQIYPEHPSHILTNSTSANILDFSSSCFGDESDWTAPRAGKKLLPPFLLSNMLDLSGDLELHLGCLRKVQYHLESLFDELLQAVEEACLADVLDEDSFKMSDIILKLKTSTRSSSLSLVSSTDSERRKLSHVYCSHSTGDDLQLSHAEVQVDMVWQQNVPLSPNGSTFTPSPSNNSDNYHVSWFCFSPTSHGTGTYIPNMSYHTYRERMMLERETIRARKQRQRFPDRRYYSAEQGFADSQTEDSVAQSGTNQSPTKQNSAQQSGYSSKSSISDGDFVRFKEHVATNGGTKQAVGRDFVEKGRHTTPPSSPPMTVLLQNGQGKPTCQPSSPVTADLFNAAKSLEFGSLGPFSLGLPSTSTQFEEEFPALPTRKRAEGPISVAPSAKAVETKSRSEESEEMFRLRNESDFPPLQAGCR

SEQ ID NO: 191186 - protein, 171 aa, Zea Mays
MCLISFTLFCFDRQRDTTGLSAENAELKIRLQAMEQQAQLRDALNDALRQEVERLKIATGEMSKSNNEHFNMGMQHVSYSPSFFQLSEQHTVQQHGNIQLPHHFQQPPLNVPSHQMLSHPNSLSNMVQQDSLGRLQGLDIGKGSMAVKSEAEVVVKSEGSSISAGESNTTF

SEQ ID NO: 191187 - protein, 231 aa, Zea Mays
MFGEVMEAKKAMSSEQLSELAAIDPKRAKRIIANRQSAARSKERKARYITELERKVQTLQTEATTLSAQLTLFQRDTTGLSAENAELKIRLQAMEQQAQLRDALNDALRQEVERLKIATGEMSKSNNEHFNMGMQHVSYSPSFFQLSEQHTVQQHGNIQLPHHFQQPPLNVPSHQMLSHPNSLSNMVQQDSLGRLQGLDIGKGSMAVKSEAEVVVKSEGSSISAGESNTTF

SEQ ID NO: 191188 - protein, 80 aa, Zea Mays
MWIRHPLSMYGIGYILSMDADDVHRKKRFTERMSRLEEEEKNQANIRKRKFFAEILNASREQQVQLGTTFKQIKQRNDEV

SEQ ID NO: 191189 - protein, 854 aa, Zea Mays
MKNSAAQSASGQVVPKLFPCPNNLLFFGKSDELLSSRKFEQPPSLMLDSRNDDIAIVNKSSHLFMVSGIEAGQSSNILRQKEIENGPRQIKWEQPTLNIGDMGRPLLTRSQSALESPQCTRRDDNKDPTTDSTTSESFPEACLSMNLGIANNGNRMEATSTAERPMLSPTTAIAEGRELTTALSPFQHAQRARHFLTRPPRVGEGAAFDPTRDMFPHLRVARPPAEGRGRNQLLPRYWPRITDQELQQISGDSNSTIVPLFEKVLSASDAGRIGRLVLPKACAEAYFPPISQPEGRPLTIQDARGKEWHFQFRFWPNNNSRMYVLEGVTPCIQSLQLQAGDTVTFSRIDPGGKLVMGFRKATNTVSLPDSQISAIANGSLLSETLFSTANESIGVVSGYPGFLHSIKGAADFHPSSLYDHHINSADGDVSWNKADKFGSRPDEGSLQFLQKRSRNIGSKSRRFLIDAEDAMELKLTWEEAQELLRPAPTAKPTVVMIEDYEFEEYDEPPVFAKRSIFTIRATGEQDQWIQCDECSKWRRLPLNVIVASKWTCTDNSWDPKCCSCSAPEELTPKELQSVMQQYEEMRRRKGSYGLKLNVAEMDASSFDALATGAVFGEVGNQGTASVATTTRHPRHRPGCTCIVCIQPPSGKGPKHNPACTCNVCMTVRRRFKTLMMRKKQRQSEREEAEASKKIAWVNRDEPEGSSLSRSPQTLDTTRDSSDVTMFDKVAADVNKGHIDLNFHPAAPAVRGAGDQGQNGAQQPRAVSMMGLLEVASRPLDNYMKQNGLTSLAGEQGGGSSSTATVPPAPVESEDRTSDEGRVASAEREADAMAIDEAGENQQDKPADSAAAAAT

SEQ ID NO: 191190 - protein, 506 aa, Zea Mays
MAMAGAGAAAAAAKRCMNPACGALPASSVVVGAGGDWRKGWPLRSGGFALLCDKCGLAYEQFVFCDIFHQKESGWRDCSFCGKRLHCGCVASKNSYDLLDSGGIQCVTCMKNSAAQSASGQVVPKLFPCPNNLLFFGKSDELLSSRKFEQPPSLMLDSRNDDIAIVNKSSHLFMVSGIEAGQSSNILRQKEIENGPRQIKWEQPTLNIGDMGRPLLTRSQSALESPQCTRRDDNKDPTTDSTTSESFPEACLSMNLGIANNGNRMEATSTAERPMLSPTTAIAEGRELTTALSPFQHAQRARHFLTRPPRVGEGAAFDPTRDMFPHLRVARPPAEGRGRNQLLPRYWPRITDQELQQISGDSNSTIVPLFEKVLSASDAGRIGRLVLPKACAEAYFPPISQPEGRPLTIQDARGKEWHFQFRFWPNNNSRMYVLEGVTPCIQSLQLQAGDTVTFSRIDPGGKLVMGFRKATNTVSLPDSQISAIANGSLLSETLFSTANESIGVLE

SEQ ID NO: 191191 - protein, 925 aa, Zea Mays
MAMAGAGAAAAAAKRCMNPACGALPASSVVVGAGGDWRKGWPLRSGGFALLCDKCGLAYEQFVFCDIFHQKESGWRDCSFCGKRLHCGCVASKNSYDLLDSGGIQCVTCMKNSAAQSASGQVVPKLFPCPNNLLFFGKSDELLSSRKFEQPPSLMLDSRNDDIAIVNKSSHLFMVSGIEAGQSSNILRQKEIENGPRQIKWEQPTLNIGDMGRPLLTRSQSALESPQCTRRDDNKDPTTDSTTSESFPEACLSMNLGIANNGNRMEATSTAERPMLSPTTAIAEGRELTTALSPFQHAQRARHFLTRPPRVGEGAAFDPTRDMFPHLRVARPPAEGRGRNQLLPRYWPRITDQELQQISGDSNSTIVPLFEKVLSASDAGRIGRLVLPKACAEAYFPPISQPEGRPLTIQDARGKEWHFQFRFWPNNNSRMYVLEGVTPCIQSLQLQAGDTVTFSRIDPGGKLVMGFRKATNTVSLPDSQISAIANGSLLSETLFSTANESIGVADKFGSRPDEGSLQFLQKRSRNIGSKSRRFLIDAEDAMELKLTWEEAQELLRPAPTAKPTVVMIEDYEFEEYDEPPVFAKRSIFTIRATGEQDQWIQCDECSKWRRLPLNVIVASKWTCTDNSWDPKCCSCSAPEELTPKELQSVMQQYEEMRRRKGSYGLKLNVAEMDASSFDALATGAVFGEVGNQGTASVATTTRHPRHRPGCTCIVCIQPPSGKGPKHNPACTCNVCMTVRRRFKTLMMRKKQRQSEREEAEASKKIAWVNRDEPEGSSLSRSPQTLDTTRDSSDVTMFDKVAADVNKGHIDLNFHPAAPAVRGAGDQGQNGAQQPRAVSMMGLLEVASRPLDNYMKQNGLTSLAGEQGGGSSSTATVPPAPVESEDRTSDEGRVASAEREADAMAIDEAGENQQDKPADSAAAAAT

SEQ ID NO: 191192 - protein, 809 aa, Zea Mays
MLDSRNDDIAIVNKSSHLFMVSGIEAGQSSNILRQKEIENGPRQIKWEQPTLNIGDMGRPLLTRSQSALESPQCTRRDDNKDPTTDSTTSESFPEACLSMNLGIANNGNRMEATSTAERPMLSPTTAIAEGRELTTALSPFQHAQRARHFLTRPPRVGEGAAFDPTRDMFPHLRVARPPAEGRGRNQLLPRYWPRITDQELQQISGDSNSTIVPLFEKVLSASDAGRIGRLVLPKACAEAYFPPISQPEGRPLTIQDARGKEWHFQFRFWPNNNSRMYVLEGVTPCIQSLQLQAGDTVTFSRIDPGGKLVMGFRKATNTVSLPDSQISAIANGSLLSETLFSTANESIGVVSGYPGFLHSIKGAADFHPSSLYDHHINSADGDVSWNKADKFGSRPDEGSLQFLQKRSRNIGSKSRRFLIDAEDAMELKLTWEEAQELLRPAPTAKPTVVMIEDYEFEEYDEPPVFAKRSIFTIRATGEQDQWIQCDECSKWRRLPLNVIVASKWTCTDNSWDPKCCSCSAPEELTPKELQSVMQQYEEMRRRKGSYGLKLNVAEMDASSFDALATGAVFGEVGNQGTASVATTTRHPRHRPGCTCIVCIQPPSGKGPKHNPACTCNVCMTVRRRFKTLMMRKKQRQSEREEAEASKKIAWVNRDEPEGSSLSRSPQTLDTTRDSSDVTMFDKVAADVNKGHIDLNFHPAAPAVRGAGDQGQNGAQQPRAVSMMGLLEVASRPLDNYMKQNGLTSLAGEQGGGSSSTATVPPAPVESEDRTSDEGRVASAEREADAMAIDEAGENQQDKPADSAAAAAT

SEQ ID NO: 191193 - protein, 959 aa, Zea Mays
MAMAGAGAAAAAAKRCMNPACGALPASSVVVGAGGDWRKGWPLRSGGFALLCDKCGLAYEQFVFCDIFHQKESGWRDCSFCGKRLHCGCVASKNSYDLLDSGGIQCVTCMKNSAAQSASGQVVPKLFPCPNNLLFFGKSDELLSSRKFEQPPSLMLDSRNDDIAIVNKSSHLFMVSGIEAGQSSNILRQKEIENGPRQIKWEQPTLNIGDMGRPLLTRSQSALESPQCTRRDDNKDPTTDSTTSESFPEACLSMNLGIANNGNRMEATSTAERPMLSPTTAIAEGRELTTALSPFQHAQRARHFLTRPPRVGEGAAFDPTRDMFPHLRVARPPAEGRGRNQLLPRYWPRITDQELQQISGDSNSTIVPLFEKVLSASDAGRIGRLVLPKACAEAYFPPISQPEGRPLTIQDARGKEWHFQFRFWPNNNSRMYVLEGVTPCIQSLQLQAGDTVTFSRIDPGGKLVMGFRKATNTDSQISAIANGSLLSETLFSTANESIGVVSGYPGFLHSIKGAADFHPSSLYDHHINSADGDVSWNKADKFGSRPDEGSLQFLQKRSRNIGSKSRRFLIDAEDAMELKLTWEEAQELLRPAPTAKPTVVMIEDYEFEEYDEPPVFAKRSIFTIRATGEQDQWIQCDECSKWRRLPLNVIVASKWTCTDNSWDPKCCSCSAPEELTPKELQSVMQQYEEMRRRKGSYGLKLNVAEMDASSFDALATGAVFGEVGNQGTASVATTTRHPRHRPGCTCIVCIQPPSGKGPKHNPACTCNVCMTVRRRFKTLMMRKKQRQSEREEAEASKKIAWVNRDEPEGSSLSRSPQTLDTTRDSSDVTMFDKVAADVNKGHIDLNFHPAAPAVRGAGDQGQNGAQQPRAVSMMGLLEVASRPLDNYMKQNGLTSLAGEQGGGSSSTATVPPAPVESEDRTSDEGRVASAEREADAMAIDEAGENQQDKPADSAAAAAT

SEQ ID NO: 191194 - protein, 584 aa, Zea Mays
MKNSAAQSASGQVVPKLFPCPNNLLFFGKSDELLSSRKFEQPPSLMLDSRNDDIAIVNKSSHLFMVSGIEAGQSSNILRQKEIENGPRQIKWEQPTLNIGDMGRPLLTRSQSALESPQCTRRDDNKDPTTDSTTSESFPEACLSMNLGIANNGNRMEATSTAERPMLSPTTAIAEGRELTTALSPFQHAQRARHFLTRPPRVGEGAAFDPTRDMFPHLRVARPPAEGRGRNQLLPRYWPRITDQELQQISGDSNSTIVPLFEKVLSASDAGRIGRLVLPKACAEAYFPPISQPEGRPLTIQDARGKEWHFQFRFWPNNNSRMYVLEGVTPCIQSLQLQAGDTVTFSRIDPGGKLVMGFRKATNTDSQISAIANGSLLSETLFSTANESIGVVSGYPGFLHSIKGAADFHPSSLYDHHINSADGDVSWNKADKFGSRPDEGSLQFLQKRSRNIGSKSRRFLIDAEDAMELKLTWEEAQELLRPAPTAKPTVVMIEDYEFEEYDKYKYLNDLQPDLTILHTCRNPLSLQRDQFLPSVQQGNKTSGFNVTSAQNGAGCLLMLLLHPNGHAPTTHGTQNAAPALRLKS

SEQ ID NO: 191195 - protein, 623 aa, Zea Mays
MAMAGAGAAAAAAKRCMNPACGALPASSVVVGAGGDWRKGWPLRSGGFALLCDKCGLAYEQFVFCDIFHQKESGWRDCSFCGKRLHCGCVASKNSYDLLDSGGIQCVTCMKNSAAQSASGQVVPKLFPCPNNLLFFGKSDELLSSRKFEQPPSLMLDSRNDDIAIVNKSSHLFMVSGIEAGQSSNILRQKEIENGPRQIKWEQPTLNIGDMGRPLLTRSQSALESPQCTRRDDNKDPTTDSTTSESFPEACLSMNLGIANNGNRMEATSTAERPMLSPTTAIAEGRELTTALSPFQHAQRARHFLTRPPRVGEGAAFDPTRDMFPHLRVARPPAEGRGRNQLLPRYWPRITDQELQQISGDSNSTIVPLFEKVLSASDAGRIGRLVLPKACAEAYFPPISQPEGRPLTIQDARGKEWHFQFRFWPNNNSRMYVLEGVTPCIQSLQLQAGDTVTFSRIDPGGKLVMGFRKATNTDSQISAIANGSLLSETLFSTANESIGVVSGYPGFLHSIKGAADFHPSSLYDHHINSADGDVSWNKADKFGSRPDEGSLQFLQKRSRNIGSKSRRFLIDAEDAMELKLTWEEAQELLRPAPTAKPTVVMIEDYEFEEYDKYKYLNDLQPDL

SEQ ID NO: 191196 - protein, 239 aa, Zea Mays
MKRALKIWLKALFLSKFEAVTRRILRITSTDGTAKVLVFSSWNDVLDVLEHSLAANNISYVRMKGGRKSQAALSQFKGQESNINVDKVNRAACKMQPVQVLLMLIQHGANGLNLLEAQHVILVEPLLNPAAEAQAISRIHRVGQDKSTFVHRFIVKKTIEESIYKLNRSRAVCSTINRKSKNFKDEPVLTLKDVESLFPMAGPDEPLEQADQNYGDSLRSLPPSVAAGLAAERRRLMEQ

SEQ ID NO: 191197 - protein, 347 aa, Zea Mays
MDLFAISPRFYYTQRPPGRPIVDERPRLNNRTNSNALLNVYLSNDDIAKLLVPLLKLRQACCHPQVGSSGLCSLQHNPLSMDEILQVLIGKAKIEGEEELRKIVVALNGLAGLAVIEQRNQEAISLYKEALALAHENINDFRVDPLLNLHINYNLAELLRISSEYLQECPLKNPAFEVAISRKRKEIDTVETNVLSVKRNKICENSVLSLTANGLEISEDKNTIGQTCMTRDVDVENVTGCHSSFECFADDCLRKTCNTITEKYLSTFTSRLVVAQKDFNASFTEVLNITKELQSEYMNWWLYALDCIEENNISADDLIKKIDNSSSKSTTGLGSWGISSRSAANLF

SEQ ID NO: 191198 - protein, 601 aa, Zea Mays
MDLFAISPRFYYTQRPPGRPIVDERPRLNNRTNSNALLNVYLSNDDIAKLLVPLLKLRQACCHPQVGSSGLCSLQHNPLSMDEILQVLIGKAKIEGEEELRKIVVALNGLAGLAVIEQRNQEAISLYKEALALAHENINDFRVDPLLNLHINYNLAELLRISSEYLQECPLKNPAFEVAISRKRKEIDTVETNVLSVKRNKICENSVLSLTANGLEISEDKNTIGQTCMTRDVDVENVTGCHSSFECFADDCLRKTCNTITEKYLSTFTSRLVVAQKDFNASFTEVLNITKELQSEYMNWWLYALDCIEENNISADDLIKKIDNSSSKSTTGLGSWGISSRVKSIAGLKYAIQADIDSLQSSRQHLMDRLLEVDKTMANPRDEDIEGQRYCPNCYDGTGSLCIQCELDELFQRYESRLFLVKKSNNGSVIDSVEEAHDLLRRKYELNHFFRNRKSKEGPEPDYDNNNPRSARENIQVYRHPSRTETALRVIWNHSKTVLGKQYSTMAKKHLLLFEAMRKEFPQARFLSIAQTQLLRAHDEIKMSISRLQLKEKEDDPSAANIVTREELIPYNVQFTSEKFMSLSSLARVRGQLRYLKVVFT

SEQ ID NO: 191199 - protein, 487 aa, Zea Mays
MDLFAISPRFYYTQRPPGRPIVDERPRLNNRTNSNALLNVYLSNDDIAKLLVPLLKLRQACCHPQVGSSGLCSLQHNPLSMDEILQVLIGKAKIEGEEELRKIVVALNGLAGLAVIEQRNQEAISLYKEALALAHENINDFRVDPLLNLHINYNLAELLRISSEYLQECPLKNPAFEVAISRKRKEIDTVETNVLSVKRNKICENSVLSLTANGLEISEDKNTIGQTCMTRDVDVENVTGCHSSFECFADDCLRKTCNTITEKYLSTFTSRLVVAQKDFNASFTEVLNITKELQSEYMNWWLYALDCIEENNISADDLIKKIDNSSSKSTTGLGSWGISSRVKSIAGLKYAIQADIDSLQSSRQHLMDRLLEVDKTMANPRDEDIEGQRYCPNCYDGTGSLCIQCELDELFQRYESRLFLVKKSNNGSVIDSVEEAHDLLRRKYELNHFFRNRKSKEGPEPDYDNNNPRSARENIQVCYILPFLHVI

SEQ ID NO: 191200 - protein, 459 aa, Zea Mays
MVESGRTSVTEMALRLNAQHRWCITGTPIQRKLDDLFGLLRFLRTNPFDTYRWWVDIIRDPYERGNKVAMNYAHNFFREIMWRSSKIHVSAELQLPPQEECFSWLIFSSIEEYFYKKQHATCMDHAHQIIRSLRNDTNRRESISDSNALLNVYLSNDDIAKLLVPLLKLRQACCHPQVGSSGLCSLQHNPLSMDEILQVLIGKAKIEGEEELRKIVVALNGLAGLAVIEQRNQEAISLYKEALALAHENINDFRVDPLLNLHINYNLAELLRISSEYLQECPLKNPAFEVAISRKRKEIDTVETNVLSVKRNKICENSVLSLTANGLEISEDKNTIGQTCMTRDVDVENVTGCHSSFECFADDCLRKTCNTITEKYLSTFTSRLVVAQKDFNASFTEVLNITKELQSEYMNWWLYALDCIEENNISADDLIKKIDNSSSKSTTGLGSWGISSRSAANLF

SEQ ID NO: 191201 - protein, 678 aa, Zea Mays
MDQIKRQKVERVECICGAASESSAYTGLWVQCDICDAWQHADCVGYSPKRNILFADTTEDVVSTNKKSTMKSGFRRKKKPRCSIVETEDKYICALCLELIEATQTNILSHATLIVCPAPILAQWHSEITRHTRPGSLKVCIYEGARNLDPSTIQKNDMTEIITADVVLTTYDVLKEDLSHDFDRHDGDRRFLRFQKRYPVIPTVLTRIHWWRLCLDEAQMVESGRTSVTEMALRLNAQHRWCITGTPIQRKLDDLFGLLRFLRTNPFDTYRWWVDIIRDPYERGNKVAMNYAHNFFREIMWRSSKIHVSAELQLPPQEECFSWLIFSSIEEYFYKKQHATCMDHAHQIIRSLRNDTNRRESISDSNALLNVYLSNDDIAKLLVPLLKLRQACCHPQVGSSGLCSLQHNPLSMDEILQVLIGKAKIEGEEELRKIVVALNGLAGLAVIEQRNQEAISLYKEALALAHENINDFRVDPLLNLHINYNLAELLRISSEYLQECPLKNPAFEVAISRKRKEIDTVETNVLSVKRNKICENSVLSLTANGLEISEDKNTIGQTCMTRDVDVENVTGCHSSFECFADDCLRKTCNTITEKYLSTFTSRLVVAQKDFNASFTEVLNITKELQSEYMNWWLYALDCIEENNISADDLIKKIDNSSSKSTTGLGSWGISSRSAANLF

SEQ ID NO: 191202 - protein, 771 aa, Zea Mays
MVQRENGNTLHQEYANSAPYCVPFDFVHKNSRMFYNPFNGNISSQPEPSPPYISGGILADEMGLGKTVELLACIFAHRRPISLDFSVFQNKTEMDQIKRQKVERVECICGAASESSAYTGLWVQCDICDAWQHADCVGYSPKRNILFADTTEDVVSTNKKSTMKSGFRRKKKPRCSIVETEDKYICALCLELIEATQTNILSHATLIVCPAPILAQWHSEITRHTRPGSLKVCIYEGARNLDPSTIQKNDMTEIITADVVLTTYDVLKEDLSHDFDRHDGDRRFLRFQKRYPVIPTVLTRIHWWRLCLDEAQMVESGRTSVTEMALRLNAQHRWCITGTPIQRKLDDLFGLLRFLRTNPFDTYRWWVDIIRDPYERGNKVAMNYAHNFFREIMWRSSKIHVSAELQLPPQEECFSWLIFSSIEEYFYKKQHATCMDHAHQIIRSLRNDTNRRESISDSNALLNVYLSNDDIAKLLVPLLKLRQACCHPQVGSSGLCSLQHNPLSMDEILQVLIGKAKIEGEEELRKIVVALNGLAGLAVIEQRNQEAISLYKEALALAHENINDFRVDPLLNLHINYNLAELLRISSEYLQECPLKNPAFEVAISRKRKEIDTVETNVLSVKRNKICENSVLSLTANGLEISEDKNTIGQTCMTRDVDVENVTGCHSSFECFADDCLRKTCNTITEKYLSTFTSRLVVAQKDFNASFTEVLNITKELQSEYMNWWLYALDCIEENNISADDLIKKIDNSSSKSTTGLGSWGISSRSAANLF

SEQ ID NO: 191203 - protein, 360 aa, Zea Mays
MGRKKSRPVRAAGAAFAAAEADPCAPSPSGSTKRRTKGEARRDVCVEVDRSTWGHADIEHRDVAEVVLRDVSVYGDGDGEGALEEAFGASTFSLRLRVRDAPEEGFRMGQWPVVESDCVLLEYVVHGGREGKHAEYVVSGCFDGPDEGVSGLVHLVSLRFITLRVQSFRAFQHMGEVRVESFRVRVEVMEQAFSACGSLLEVARHPWRKSLMNVIAWLRPEVTTSAAIYGLDNLGVPMDDGGNADLVPKSDSQFDLAAFYEAIKPSANAGQLERDLPDLIPQLRPYQLRAAHWMVQRENGNTLHQEYANSAPYCVPFDFVHKNSRMFYNPFNGNISSQPEPSPPYISGGILAEQNRNGSN

SEQ ID NO: 191204 - protein, 874 aa, Zea Mays
MDEILQVLIGKAKIEGEEELRKIVVALNGLAGLAVIEQRNQEAISLYKEALALAHENINDFRVDPLLNLHINYNLAELLRISSEYLQECPLKNPAFEVAISRKRKEIDTVETNVLSVKRNKICENSVLSLTANGLEISEDKNTIGQTCMTRDVDVENVTGCHSSFECFADDCLRKTCNTITEKYLSTFTSRLVVAQKDFNASFTEVLNITKELQSEYMNWWLYALDCIEENNISADDLIKKIDNSSSKSTTGLGSWGISSRVKSIAGLKYAIQADIDSLQSSRQHLMDRLLEVDKTMANPRDEDIEGQRYCPNCYDGTGSLCIQCELDELFQRYESRLFLVKKSNNGSVIDSVEEAHDLLRRKYELNHFFRNRKSKEGPEPDYDNNNPRSARENIQVYRHPSRTETALRVIWNHSKTVLGKQYSTMAKKHLLLFEAMRKEFPQARFLSIAQTQLLRAHDEIKMSISRLQLKEKEDDPSAANIVTREELIPYNVQFTSEKFMSLSSLARVRGQLRYLKGLAVCNKKTHNQHDESLAKAGDAVDTATSCSATGQTVSDFRNEPCPICQEKVFDQKMVFQCGHFVCCKCCLYMTEQTAAQFGKRKQWIMCPTCRQRTDIENIAFVVEKPWDKHEKSIEDLAESTISVQGSYGTKFEAVTRRILRITSTDGTAKVLVFSSWNDVLDVLEHSLAANNISYVRMKGGRKSQAALSQFKGQESNINVDKVNRAACKMQPVQVLLMLIQHGANGLNLLEAQHVILVEPLLNPAAEAQAISRIHRVGQDKSTFVHRFIVKKTIEESIYKLNRSRAVCSTINRKSKNFKDEPVLTLKDVESLFPMAGPDEPLEQADQNYGDSLRSLPPSVAAGLAAERRRLMEQ

SEQ ID NO: 191205 - protein, 1378 aa, Zea Mays
MVQRENGNTLHQEYANSAPYCVPFDFVHKNSRMFYNPFNGNISSQPEPSPPYISGGILADEMGLGKTVELLACIFAHRRPISLDFSVFQNKTEMDQIKRQKVERVECICGAASESSAYTGLWVQCDICDAWQHADCVGYSPKRNILFADTTEDVVSTNKKSTMKSGFRRKKKPRCSIVETEDKYICALCLELIEATQTNILSHATLIVCPAPILAQWHSEITRHTRPGSLKVCIYEGARNLDPSTIQKNDMTEIITADVVLTTYDVLKEDLSHDFDRHDGDRRFLRFQKRYPVIPTVLTRIHWWRLCLDEAQMVESGRTSVTEMALRLNAQHRWCITGTPIQRKLDDLFGLLRFLRTNPFDTYRWWVDIIRDPYERGNKVAMNYAHNFFREIMWRSSKIHVSAELQLPPQEECFSWLIFSSIEEYFYKKQHATCMDHAHQIIRSLRNDTNRRESISDSNALLNVYLSNDDIAKLLVPLLKLRQACCHPQVGSSGLCSLQHNPLSMDEILQVLIGKAKIEGEEELRKIVVALNGLAGLAVIEQRNQEAISLYKEALALAHENINDFRVDPLLNLHINYNLAELLRISSEYLQECPLKNPAFEVAISRKRKEIDTVETNVLSVKRNKICENSVLSLTANGLEISEDKNTIGQTCMTRDVDVENVTGCHSSFECFADDCLRKTCNTITEKYLSTFTSRLVVAQKDFNASFTEVLNITKELQSEYMNWWLYALDCIEENNISADDLIKKIDNSSSKSTTGLGSWGISSRVKSIAGLKYAIQADIDSLQSSRQHLMDRLLEVDKTMANPRDEDIEGQRYCPNCYDGTGSLCIQCELDELFQRYESRLFLVKKSNNGSVIDSVEEAHDLLRRKYELNHFFRNRKSKEGPEPDYDNNNPRSARENIQVYRHPSRTETALRVIWNHSKTVLGKQYSTMAKKHLLLFEAMRKEFPQARFLSIAQTQLLRAHDEIKMSISRLQLKEKEDDPSAANIVTREELIPYNVQFTSEKFMSLSSLARVRGQLRYLKGLAVCNKKTHNQHDESLAKAGDAVDTATSCSATGQTVSDFRNEPCPICQEKVFDQKMVFQCGHFVCCKCCLYMTEQTAAQFGKRKQWIMCPTCRQRTDIENIAFVVEKPWDKHEKSIEDLAESTISVQGSYGTKFEAVTRRILRITSTDGTAKVLVFSSWNDVLDVLEHSLAANNISYVRMKGGRKSQAALSQFKGQESNINVDKVNRAACKMQPVQVLLMLIQHGANGLNLLEAQHVILVEPLLNPAAEAQAISRIHRVGQDKSTFVHRFIVKKTIEESIYKLNRSRAVCSTINRKSKNFKDEPVLTLKDVESLFPMAGPDEPLEQADQNYGDSLRSLPPSVAAGLAAERRRLMEQ

SEQ ID NO: 191206 - protein, 304 aa, Zea Mays
MVQRENGNTLHQEYANSAPYCVPFDFVHKNSRMFYNPFNGNISSQPEPSPPYISGGILADEMGLGKTVELLACIFAHRRPISLDFSVFQNKTEMDQIKRQKVERVECICGAASESSAYTGLWVQCDICDAWQHADCVGYSPKRNILFADTTEDVVSTNKKSTMKSGFRRKKKPRCSIVETEDKYICALCLELIEATQTNILSHATLIVCPAPILAQWHSEITRHTRPGSLKVCIYEGARNLDPSTIQKNDMTEIITADVVLTTYDVLKEDLSHDFDRHDGDRRFLRFQKRQVMFSFHFSQRRLT

SEQ ID NO: 191207 - protein, 694 aa, Zea Mays
MPMENSVRRVRCPRCHSVLEEPSAPVYQCGGCGTSLRAKNRTGTGTGSTGDAAGASPARSWLPPQSRHLDASDVASTSRSGTPTPPDVGTSWHRDTDATGTRHGSGDLALVSAGTRGSGDVASTSSTPVATARSRRQDTDATTRGSGDVASTSSTPDASADTTRRGESGGPVPARNRVPEQAAAALIEKRGREQSAAGQEVRDDSEGRGTRDASGAESGVGGVGFSGGNRDATPELQDDTEKGMKRHDESNDAARKERRGEAAEQPRYDHDRRQELAPKSSAQPAAAQLAREDEAATAGEKAPSPSRHEVQEEHLRPLRKKILKTVDELKGDLSELFSKSPELNAPRARPPRLPRQEAYVSHAVAGAASGLPARARHVASAAEGHRGSVARAAKPRPAAAPPRGLPSRRYRQCRAHPCCHDVDPRPCHHGHGCCGHHGKPECSSCRGYCCRPRALEPSAPRKPPAAKEPKRRLPPRNHCRPVLKGAPFIVCSSCFKLVQVPADFAVSTRMVRRMRCGSCSTVLSYSYRDPARKKAYQDSVNRCSTDGSELHGGTGDQRSDPFAPFIDGFGLSSYSTEDERRLPVSRNTSFDTLDGTKGVGRLHRLMGYGSASELLRHSPDLYESFSERTTPDVRQHDTKGKGVCIDDDDYDYDLDDTDDEDIGALKRSARKGSGWTLPWIPGKRQGDSGAIRIK

SEQ ID NO: 191208 - protein, 124 aa, Zea Mays
MRPPQVLREGTKKTVFVNFMDLCKTMHRQPEHVMMFLLAEMGTSGSLDGQQRLVIKGRFAPKNFEAILRRYINEYVICNGCKSPDTILSKENRLFFLRCEQCGSSRSVAPIKAGFVAQVGRRKA

SEQ ID NO: 191209 - protein, 253 aa, Zea Mays
MELIERLGKHANLLPLRAYYYSKDEKLIVYDYIDTGSVSAMLHGIRGVTAKTPLDWNSRMKIILGTAYGIAHIHSEGGAKLTHGNVKSTNVLVDQDHNPSVSDYGLSALTSVPVNASRVVVGYRAPEIVENRKITQKSDVYSFGVLLMEMLTGKAPLQTQGNDDVVDLPRWVHSVVREEWTAEVFDVELMKHQNIEEELVQMLQIAMVCTAKSPDRRPTMEEVIRMIEGLRQSTSESRASSDEKSKESNPPSV

SEQ ID NO: 191210 - protein, 107 aa, Zea Mays
MQRRAQPAGQPVRVADEVRGLGSRPFRGHRPGDGCLARSSKRRRFLRWHQQQQRRPRRPSEAVGSGHPFAVLPHVDDQAVLRSRRRRDRDVKLYSPRCYLPNHRILN

SEQ ID NO: 191211 - protein, 223 aa, Zea Mays
MTMAATTTMMSAAAQAATSQLPPGFRFHPTDEELILHYLRNRAASAPCPVPIIADVDIYKFDPWDLPAKALYGDGEYYFFSPRDRKYPNGIRPNRAAGSGYWKATGTDKPIHDAATGEGVGVKKALVFYKGRPPRGSKTNWIMHEYRLAAVAGCTSPLAAYRPPSKFRNVSMRVSQSTSIIPESYPLHDLYICSSHYLSYPWCHVELSWWSHACTGRFHLIRS

SEQ ID NO: 191212 - protein, 117 aa, Zea Mays
MLLTMTSPCSGPRAATSATASAASAWSTTSTSTSTPSTATRPTAASMTVPRSCSGSGARATTSAGRSSLGERTKETTSWYPNNNSAGCGDPKIKEAGCDASRTSRVVFASDSQPLWG

SEQ ID NO: 191213 - protein, 73 aa, Zea Mays
MHLGLLEWCLRQTASHCGASVPTFVSLLARGRGVTDSREGPGHRLLHYEFLMMSYVCTLNQLCMRSHLLSPTE

SEQ ID NO: 191214 - protein, 135 aa, Zea Mays
MLELEHVRARRLARRAQHHRRRRRLRLAVPPYGLLLVLVRAVARRGQLRLRLRLGGLLVPAAVVVRRRGRPRRGEEGAGGVRCRVDERGQVVGVVEHQVVEEGQRVAALHAHGHGVRRYSCMTHGVLPPRGARPV

SEQ ID NO: 191215 - protein, 75 aa, Zea Mays
MRACPSKRRVTNCQQASPPAFGLPKWEPRPSKGCCCPFLQASSPVLLSASLSIPSGISMQTDMHQPRITIHSHQS

SEQ ID NO: 191216 - protein, 85 aa, Zea Mays
MDPCIHGSRARSMHACIAWRGFWRAHLAGTASSKAAAAAARGVRWPPRTRSRSHRRWRSPSAARWRTGRRRRRSPGRPSSPRTTA

SEQ ID NO: 191217 - protein, 119 aa, Zea Mays
MSVTGEKPCTHRESDVGQTNSCSLNNSSECENHTPSNDEISEPESNLEMAKTDQGGDVPSGEKVLKKPDKILPCPRCNSMDTKFCYYNNYNIKQPRHFCKSCQSHRSCLRDKTTRRHRL

SEQ ID NO: 191218 - protein, 1376 aa, Zea Mays
MGAPRELELSDEVEGEEDGTTDFVFRLAGDPIPLLPTDSNPLPLFDLLSPPARPLAVSDRHATVFLAHPSGFIAVRTKELIEASKEAREKGKSSTRCAQDCCVADVPLPGVSLIALSHDESVLAACTHTEIQFFSLASLLTHKDVVPSSSCSLERAVTVKDFKWLNHASAAYIVLSNGGLLCHGNLGEGLKDVMENVDAVDCCKEGNHIAVARGNKLTILSPDFTETCSMSLLFQLWSDGSDSKGTTIKVDSIGWVHGDSIVIGCVRLNEDDNEEGYLVQVIRTEESTFCESPGKTDVYTYNDFFHGIMDDVLPPGAGPNLLLGYLHRWGLMVASNKKSVDEHIALLKWPSAHDDEKTVTYLEMLEDKYSPRIDLQENGDDNVILGFGVENVSLFQKITVPVGPEQKEVAPQHILLCLTGEGKVAVYYLARISDPSDLPHATVSTNEDYGEKHISPATVSEKELTPSVAGSVYKSTLTEHGAEPSSAQTGSNQQESINVKNSSSASKEQETTDNSLFISSNKKPLDTKQVNVTGPPAALRSLALTGNTKPTIFSSFSTEGMNPTGGNAPNELASSLQPSSRSFGNNQTGKEGLDSVQSVGIFGGSQNSNKDGNVYGFKSSLFTSSGSVPAKIGERNEVGFGVPSLQTSYTADRKVFGAPVALSSVPSSSISPAKPSPIGYSSSGFRTANSEAPQSLRGSPPSQQSMGKSHNSRTQAPAEYSRNSKKGTGFDSEQDLSKKFYSINEMTKELDALLAYIEKDGGFRDACITIQQRPLSMFEDGLQNFLQLLQVFKGKVEEQCSKIEDLRNNMFQVSARQTYMKGIVSQSSDNQYWDIWNRQKLSPEFEVKRQNILRANQDLTNQLVELERHFNNLEMNRSSETGRVASNRRAVYSNKTSSSQTQLSSVYSALNSQLAAAEQLSECLSKQISVLNIGSPSRKQGMVTKKLFESIGLAHTTDATKFSGSTPKPVKRFPSVNEHSKGILGSSKGGEPETARRRRESLDMSLASLEPQKTTVKRITQQQRLKISSDLPFRSNKKIFDSQMAAISQEKSSDSSNSSIVESYVSRLRSLSEDVNDKLSGPQQNPLFKWVKESTGSSQTSEQKHFELPGQMKSTAQSSKLTPSSPPSFSYTRMGAQDSINPSSVPSFGTKHTVSKPNTLTFKTTISPKSNANTEPNILPSITAPKTSLSPLSVKTAGESGDLPTLTMKNRQDGQSMPSLGNIKGPGASLQNKGGIFRDLDKSSFNSEHSKPAALHEKTDQLSGVGDAVQNTVKDTSKMAPQPSAFLPAPVTQTNSYSLRPTVSSSATSGAKTSDVLSSSMQKVSPIVPGGTVSSSVPTPAKDSSTGLSQNASKPETLISKHQQHRNQFSLPQEKM

SEQ ID NO: 191219 - protein, 880 aa, Zea Mays
MGAPRELELSDEVEGEEDGTTDFVFRLAGDPIPLLPTDSNPLPLFDLLSPPARPLAVSDRHATVFLAHPSGFIAVRTKELIEASKEAREKGKSSTRCAQDCCVADVPLPGVSLIALSHDESVLAACTHTEIQFFSLASLLTHKDVVPSSSCSLERAVTVKDFKWLNHASAAYIVLSNVDCCKEGNHIAVARGNKLTILSPDFTETCSMSLLFQLWSDGSDSKGTTIKVDSIGWVHGDSIVIGCVRLNEDDNEEGYLVQVIRTEESTFCESPGKTDVYTYNDFFHGIMDDVLPPGAGPNLLLGYLHRWGLMVASNKKSVDEHIALLKWPSAHDDEKTVTYLEMLEDKYSPRIDLQENGDDNVILGFGVENVSLFQKITVPVGPEQKEVAPQHILLCLTGEGKVAVYYLARISDPSDLPHATVSTNEDYGEKHISPATVSEKELTPSVAGSVYKSTLTEHGAEPSSAQTGSNQQESINVKNSSSASKEQETTDNSLFISSNKKPLDTKQVNVTGPPAALRSLALTGNTKPTIFSSFSTEGMNPTGGNAPNELASSLQPSSRSFGNNQTGKEGLDSVQSVGIFGGSQNSNKDGNVYGFKSSLFTSSGSVPAKIGERNEVGFGVPSLQTSYTADRKVFGAPVALSSVPSSSISPAKPSPIGYSSSGFRTANSEAPQSLRGSPPSQQSMGKSHNSRTQAPAEYSRNSKKGTGFDSEQDLSKKFYSINEMTKELDALLAYIEKDGGFRDACITIQQRPLSMFEDGLQNFLQLLQVFKGKVEEQCSKIEDLRNNMFQVSARQTYMKGIVSQSSDNQYWDIWNRQKLSPEFEVKRQNILRANQDLTNQLVELERHFNNLEMNRSSETGRVASNRRAVYSNKTSSRQHS

SEQ ID NO: 191220 - protein, 1390 aa, Zea Mays
MGAPRELELSDEVEGEEDGTTDFVFRLAGDPIPLLPTDSNPLPLFDLLSPPARPLAVSDRHATVFLAHPSGFIAVRTKELIEASKEAREKGKSSTRCAQDCCVADVPLPGVSLIALSHDESVLAACTHTEIQFFSLASLLTHKDVVPSSSCSLERAVTVKDFKWLNHASAAYIVLSNGGLLCHGNLGEGLKDVMENVDAVDCCKEGNHIAVARGNKLTILSPDFTETCSMSLLFQLWSDGSDSKGTTIKVDSIGWVHGDSIVIGCVRLNEDDNEEGYLVQVIRTEESTFCESPGKTDVYTYNDFFHGIMDDVLPPGAGPNLLLGYLHRWGLMVASNKKSVDEHIALLKWPSAHDDEKTVTYLEMLEDKYSPRIDLQENGDDNVILGFGVENVSLFQKITVPVGPEQKEVAPQHILLCLTGEGKVAVYYLARISDPSDLPHATVSTNEDYGEKHISPATVSEKELTPSVAGSVYKSTLTEHGAEPSSAQTGSNQQESINVKNSSSASKEQETTDNSLFISSNKKPLDTKQVNVTGPPAALRSLALTGNTKPTIFSSFSTEGMNPTGGNAPNELASSLQPSSRSFGNNQTGKEGLDSVQSVGIFGGSQNSNKDGNVYGFKSSLFTSSGSVPAKIGERNEVGFGVPSLQTSYTADRKVFGAPVALSSVPSSSISPAKPSPIGYSSSGFRTANSEAPQSLRGSPPSQQSMGKSHNSRTQAPAEYSRNSKKGTGFDSEQDLSKKFYSINEMTKELDALLAYIEKDGGFRDACITIQQRPLSMFEDGLQNFLQLLQVFKGKVEEQCSKIEDLRNNMFQVSARQTYMKGIVSQSSDNQYWDIWNRQKLSPEFEVKRQNILRANQDLTNQLVELERHFNNLEMNRSSETGRVASNRRAVYSNKTSSSQTQLSSVYSALNSQLAAAEQLSECLSKQISVLNIGSPSRKQGMVTKKLFESIGLAHTTDATKFSGSTPKPVKRFPSVNEHSKGILGSSKGGEPETARRRRESLDMSLASLEPQKTTVKRITQQQRLKISSDLPFRSNKKIFDSQMAAISQEKSSDSSNSSIVESYVSRLRSLSEDVNDKLSGPQQNPLFKWVKESTGSSQTSEQKHFELPGQMKSTAQSSKLTPSSPPSFSYTRMGAQDSINPSSVPSFGTKHTVSKPNTLTFKTTISPKSNANTEPNILPSITAPKTSLSPLSVKTAGESGDLPTLTMKNRQDGQSMPSLGNIKGPGASLQNKGGIFRDLDKSSFNSEHSKPAALHEKTDQLSGVGDAVQNTVKDTSKMAPQPSAFLPAPVTQTNSYSLRPTVSSSATSGGGFAAAATGGGFAALASKSGGFVGAASSGGGFGGASQGGGFGSGGGGFGSFGGNQGAGFSAFGASGAGRPAADFLTQMRK

SEQ ID NO: 191221 - protein, 1707 aa, Zea Mays
MGAPRELELSDEVEGEEDGTTDFVFRLAGDPIPLLPTDSNPLPLFDLLSPPARPLAVSDRHATVFLAHPSGFIAVRTKELIEASKEAREKGKSSTRCAQDCCVADVPLPGVSLIALSHDESVLAACTHTEIQFFSLASLLTHKDVVPSSSCSLERAVTVKDFKWLNHASAAYIVLSNGGLLCHGNLGEGLKDVMENVDAVDCCKEGNHIAVARGNKLTILSPDFTETCSMSLLFQLWSDGSDSKGTTIKVDSIGWVHGDSIVIGCVRLNEDDNEEGYLVQVIRTEESTFCESPGKTDVYTYNDFFHGIMDDVLPPGAGPNLLLGYLHRWGLMVASNKKSVDEHIALLKWPSAHDDEKTVTYLEMLEDKYSPRIDLQENGDDNVILGFGVENVSLFQKITVPVGPEQKEVAPQHILLCLTGEGKVAVYYLARISDPSDLPHATVSTNEDYGEKHISPATVSEKELTPSVAGSVYKSTLTEHGAEPSSAQTGSNQQESINVKNSSSASKEQETTDNSLFISSNKKPLDTKQVNVTGPPAALRSLALTGNTKPTIFSSFSTEGMNPTGGNAPNELASSLQPSSRSFGNNQTGKEGLDSVQSVGIFGGSQNSNKDGNVYGFKSSLFTSSGSVPAKIGERNEVGFGVPSLQTSYTADRKVFGAPVALSSVPSSSISPAKPSPIGYSSSGFRTANSEAPQSLRGSPPSQQSMGKSHNSRTQAPAEYSRNSKKGTGFDSEQDLSKKFYSINEMTKELDALLAYIEKDGGFRDACITIQQRPLSMFEDGLQNFLQLLQVFKGKVEEQCSKIEDLRNNMFQVSARQTYMKGIVSQSSDNQYWDIWNRQKLSPEFEVKRQNILRANQDLTNQLVELERHFNNLEMNRSSETGRVASNRRAVYSNKTSSSQTQLSSVYSALNSQLAAAEQLSECLSKQISVLNIGSPSRKQGMVTKKLFESIGLAHTTDATKFSGSTPKPVKRFPSVNEHSKGILGSSKGGEPETARRRRESLDMSLASLEPQKTTVKRITQQQRLKISSDLPFRSNKKIFDSQMAAISQEKSSDSSNSSIVESYVSRLRSLSEDVNDKLSGPQQNPLFKWVKESTGSSQTSEQKHFELPGQMKSTAQSSKLTPSSPPSFSYTRMGAQDSINPSSVPSFGTKHTVSKPNTLTFKTTISPKSNANTEPNILPSITAPKTSLSPLSVKTAGESGDLPTLTMKNRQDGQSMPSLGNIKGPGASLQNKGGIFRDLDKSSFNSEHSKPAALHEKTDQLSGVGDAVQNTVKDTSKMAPQPSAFLPAPVTQTNSYSLRPTVSSSATSGAKTSDVLSSSMQKVSPIVPGGTVSSSVPTPAKDSSTGLSQNASKPETLISKVTSTIVSASSTSVISVTESKPSVPPTTGASLPSTHVSAPQTAPTTSESVFTSTGKNVGPNTDTISTDEDDMEEEAPSASAELNLGALGGFGLGSQPSSSPQKSNPFGASFGTSGNKSSGTPFTLTTSPGQLFRPASLSIPSAQPAQPSQSTSSSSFSNSFSSGLTGFGQPAQIGSGQQSAFGKPAQIGAGQHAGFGQTAQIQSGFGQPAQIQSGFGQSAQIGTGQQSGFGKPAQIGAVQSGFGQPAQFAAQQTLGSVLGSFGQPPQLGGIGSGGFGGFSSASTSAGFSSLSSASSGGGFGGASQGGGFGSGGGFGSFGGNQGAGFSAFGASGAGRPAADFLTQMRK

SEQ ID NO: 191222 - protein, 1690 aa, Zea Mays
MGAPRELELSDEVEGEEDGTTDFVFRLAGDPIPLLPTDSNPLPLFDLLSPPARPLAVSDRHATVFLAHPSGFIAVRTKELIEASKEAREKGKSSTRCAQDCCVADVPLPGVSLIALSHDESVLAACTHTEIQFFSLASLLTHKDVVPSSSCSLERAVTVKDFKWLNHASAAYIVLSNGGLLCHGNLGEGLKDVMENVDAVDCCKEGNHIAVARGNKLTILSPDFTETCSMSLLFQLWSDGSDSKGTTIKVDSIGWVHGDSIVIGCVRLNEDDNEEGYLVQVIRTEESTFCESPGKTDVYTYNDFFHGIMDDVLPPGAGPNLLLGYLHRWGLMVASNKKSVDEHIALLKWPSAHDDEKTVTYLEMLEDKYSPRIDLQENGDDNVILGFGVENVSLFQKITVPVGPEQKEVAPQHILLCLTGEGKVAVYYLARISDPSDLPHATVSTNEDYGEKHISPATVSEKELTPSVAGSVYKSTLTEHGAEPSSAQTGSNQQESINVKNSSSASKEQETTDNSLFISSNKKPLDTKQVNVTGPPAALRSLALTGNTKPTIFSSFSTEGMNPTGGNAPNELASSLQPSSRSFGNNQTGKEGLDSVQSVGIFGGSQNSNKDGNVYGFKSSLFTSSGSVPAKIGERNEVGFGVPSLQTSYTADRKVFGAPVALSSVPSSSISPAKPSPIGYSSSGFRTANSEAPQSLRGSPPSQQSMGKSHNSRTQAPAEYSRNSKKGTGFDSEQDLSKKFYSINEMTKELDALLAYIEKDGGFRDACITIQQRPLSMFEDGLQNFLQLLQVFKGKVEEQCSKIEDLRNNMFQVSARQTYMKGIVSQSSDNQYWDIWNRQKLSPEFEVKRQNILRANQDLTNQLVELERHFNNLEMNRSSETGRVASNRRAVYSNKTSSSQTQLSSVYSALNSQLAAAEQLSECLSKQISVLNIGSPSRKQGMVTKKLFESIGLAHTTDATKFSGSTPKPVKRFPSVNEHSKGILGSSKGGEPETARRRRESLDMSLASLEPQKTTVKRITQQQRLKISSDLPFRSNKKIFDSQMAAISQEKSSDSSNSSIVESYVSRLRSLSEDVNDKLSGPQQNPLFKWVKESTGSSQTSEQKHFELPGQMKSTAQSSKLTPSSPPSFSYTRMGAQDSINPSSVPSFGTKHTVSKPNTLTFKTTISPKSNANTEPNILPSITAPKTSLSPLSVKTAGESGDLPTLTMKNRQDGQSMPSLGNIKGPGASLQNKGGIFRDLDKSSFNSEHSKPAALHEKTDQLSGVGDAVQNTVKDTSKMAPQPSAFLPAPVTQTNSYSLRPTVSSSATSGAKTSDVLSSSMQKVSPIVPGGTVSSSVPTPAKDSSTGLSQNASKPETLISKVTSTIVSASSTSVISVTESKPSVPPTTGASLPSTHVSAPQTAPTTSESVFTSTGKNVGPNTDTISTDEDDMEEEAPSASAELNLGALGGFGLGSQPSSSPQKSNPFGASFGTSGNKSSGTPFTLTTSPGQLFRPASLSIPSAQPAQPSQSTSSSSFSNSFSSGLTGFGQPAQIGSGQQSAFGKPAQIGAGQHAGFGQTAQIQSGFGQPAQIQSGFGQSAQIGTGQQSGFGKPAQIGAVQSGFGQPAQFAAQQTLGSVLGSFGQPPQLGGIGSGGFGGFSSASTSAGFSSLSSGGGGFGSFGGNQGAGFSAFGASGAGRPAADFLTQMRK

SEQ ID NO: 191223 - protein, 1733 aa, Zea Mays
MGAPRELELSDEVEGEEDGTTDFVFRLAGDPIPLLPTDSNPLPLFDLLSPPARPLAVSDRHATVFLAHPSGFIAVRTKELIEASKEAREKGKSSTRCAQDCCVADVPLPGVSLIALSHDESVLAACTHTEIQFFSLASLLTHKDVVPSSSCSLERAVTVKDFKWLNHASAAYIVLSNVDCCKEGNHIAVARGNKLTILSPDFTETCSMSLLFQLWSDGSDSKGTTIKVDSIGWVHGDSIVIGCVRLNEDDNEEGYLVQVIRTEESTFCESPGKTDVYTYNDFFHGIMDDVLPPGAGPNLLLGYLHRWGLMVASNKKSVDEHIALLKWPSAHDDEKTVTYLEMLEDKYSPRIDLQENGDDNVILGFGVENVSLFQKITVPVGPEQKEVAPQHILLCLTGEGKVAVYYLARISDPSDLPHATVSTNEDYGEKHISPATVSEKELTPSVAGSVYKSTLTEHGAEPSSAQTGSNQQESINVKNSSSASKEQETTDNSLFISSNKKPLDTKQVNVTGPPAALRSLALTGNTKPTIFSSFSTEGMNPTGGNAPNELASSLQPSSRSFGNNQTGKEGLDSVQSVGIFGGSQNSNKDGNVYGFKSSLFTSSGSVPAKIGERNEVGFGVPSLQTSYTADRKVFGAPVALSSVPSSSISPAKPSPIGYSSSGFRTANSEAPQSLRGSPPSQQSMGKSHNSRTQAPAEYSRNSKKGTGFDSEQDLSKKFYSINEMTKELDALLAYIEKDGGFRDACITIQQRPLSMFEDGLQNFLQLLQVFKGKVEEQCSKIEDLRNNMFQVSARQTYMKGIVSQSSDNQYWDIWNRQKLSPEFEVKRQNILRANQDLTNQLVELERHFNNLEMNRSSETGRVASNRRAVYSNKTSSSQTQLSSVYSALNSQLAAAEQLSECLSKQISVLNIGSPSRKQGMVTKKLFESIGLAHTTDATKFSGSTPKPVKRFPSVNEHSKGILGSSKGGEPETARRRRESLDMSLASLEPQKTTVKRITQQQRLKISSDLPFRSNKKIFDSQMAAISQEKSSDSSNSSIVESYVSRLRSLSEDVNDKLSGPQQNPLFKWVKESTGSSQTSEQKHFELPGQMKSTAQSSKLTPSSPPSFSYTRMGAQDSINPSSVPSFGTKHTVSKPNTLTFKTTISPKSNANTEPNILPSITAPKTSLSPLSVKTAGESGDLPTLTMKNRQDGQSMPSLGNIKGPGASLQNKGGIFRDLDKSSFNSEHSKPAALHEKTDQLSGVGDAVQNTVKDTSKMAPQPSAFLPAPVTQTNSYSLRPTVSSSATSGAKTSDVLSSSMQKVSPIVPGGTVSSSVPTPAKDSSTGLSQNASKPETLISKVTSTIVSASSTSVISVTESKPSVPPTTGASLPSTHVSAPQTAPTTSESVFTSTGKNVGPNTDTISTDEDDMEEEAPSASAELNLGALGGFGLGSQPSSSPQKSNPFGASFGTSGNKSSGTPFTLTTSPGQLFRPASLSIPSAQPAQPSQSTSSSSFSNSFSSGLTGFGQPAQIGSGQQSAFGKPAQIGAGQHAGFGQTAQIQSGFGQPAQIQSGFGQSAQIGTGQQSGFGKPAQIGAVQSGFGQPAQFAAQQTLGSVLGSFGQPPQLGGIGSGGFGGFSSASTSAGFSSLSSGNAGFAGAASGGGFSAPTASAGGGFAAAATGGGFAALASKSGGFVGAASSGGGFGGASQGGGFGSGGGGFGSFGGNQGAGFSAFGASGAGRPAADFLTQMRK

SEQ ID NO: 191224 - protein, 1734 aa, Zea Mays
MGAPRELELSDEVEGEEDGTTDFVFRLAGDPIPLLPTDSNPLPLFDLLSPPARPLAVSDRHATVFLAHPSGFIAVRTKELIEASKEAREKGKSSTRCAQDCCVADVPLPGVSLIALSHDESVLAACTHTEIQFFSLASLLTHKDVVPSSSCSLERAVTVKDFKWLNHASAAYIVLSNGGLLCHGNLGEGLKDVMENVDAVDCCKEGNHIAVARGNKLTILSPDFTETCSMSLLFQLWSDGSDSKGTTIKVDSIGWVHGDSIVIGCVRLNEDDNEEGYLVQVIRTEESTFCESPGKTDVYTYNDFFHGIMDDVLPPGAGPNLLLGYLHRWGLMVASNKKSVDEHIALLKWPSAHDDEKTVTYLEMLEDKYSPRIDLQENGDDNVILGFGVENVSLFQKITVPVGPEQKEVAPQHILLCLTGEGKVAVYYLARISDPSDLPHATVSTNEDYGEKHISPATVSEKELTPSVAGSVYKSTLTEHGAEPSSAQTGSNQQESINVKNSSSASKEQETTDNSLFISSNKKPLDTKQVNVTGPPAALRSLALTGNTKPTIFSSFSTEGMNPTGGNAPNELASSLQPSSRSFGNNQTGKEGLDSVQSVGIFGGSQNSNKDGNVYGFKSSLFTSSGSVPAKIGERNEVGFGVPSLQTSYTADRKVFGAPVALSSVPSSSISPAKPSPIGYSSSGFRTANSEAPQSLRGSPPSQQSMGKSHNSRTQAPAEYSRNSKKGTGFDSEQDLSKKFYSINEMTKELDALLAYIEKDGGFRDACITIQQRPLSMFEDGLQNFLQLLQVFKGKVEEQCSKIEDLRNNMFQVSARQTYMKGIVSQSSDNQYWDIWNRQKLSPEFEVKRQNILRANQDLTNQLVELERHFNNLEMNRSSETGRVASNRRAVYSNKTSSSQTQLSSVYSALNSQLAAAEQLSECLSKQISVLNIGSPSRKQGMVTKKLFESIGLAHTTDATKFSGSTPKPVKRFPSVNEHSKGILGSSKGGEPETARRRRESLDMSLASLEPQKTTVKRITQQQRLKISSDLPFRSNKKIFDSQMAAISQEKSSDSSNSSIVESYVSRLRSLSEDVNDKLSGPQQNPLFKWVKESTGSSQTSEQKHFELPGQMKSTAQSSKLTPSSPPSFSYTRMGAQDSINPSSVPSFGTKHTVSKPNTLTFKTTISPKSNANTEPNILPSITAPKTSLSPLSVKTAGESGDLPTLTMKNRQDGQSMPSLGNIKGPGASLQNKGGIFRDLDKSSFNSEHSKPAALHEKTDQLSGVGDAVQNTVKDTSKMAPQPSAFLPAPVTQTNSYSLRPTVSSSATSGAKTSDVLSSSMQKVSPIVPGGTVSSSVPTPAKDSSTGLSQNASKPETLISKVTSTIVSASSTSVISVTESKPSVPPTTGASLPSTHVSAPQTAPTTSESVFTSTGKNVGPNTDTISTDEDDMEEEAPSASAELNLGALGGFGLGSQPSSSPQKSNPFGASFGTSGNKSSGTPFTLTTSPGQLFRPASLSIPSAQPAQPSQSTSSSSFSNSFSSGLTGFGQPAQIGSGQQSAFGKPAQIGAGQHAGFGQTAQIQSGFGQPAQIQSGFGQSAQIGTGQQSGFGKPAQIGAVQSGFGQPAQFAAQQTLGSVLGSFGQPPQLGGIGSGGFGGFSSASTSAGFSSLSSGGGFAAAATGGGFAALASKSGGFVGAASSGGGFGGASQGGGFGSGGGGFGSFGGNQGAGFSAFGASGAGRPAADFLTQMRK

SEQ ID NO: 191225 - protein, 222 aa, Zea Mays
MHWANAVAYEQSVPQGLATATVLTYGSYTLGAHGPESDIDLLCLGPCIATLQYHFFVVLRQILQGRPEVSEVHTVEKAKVPLMRFRFTGIAVDLTYAQLPVIDALKAINTFSPQLLQKIDTRSWRSLSGVRVNEQIVQLVPNAEKFQTLLRCIKLWARKRGLHCHYLGFFAGIHLAILAAYVCRKFPDASVSGLFAVFFQTFAHWPWQVPSIQISVCTIIWK

SEQ ID NO: 191226 - protein, 281 aa, Zea Mays
MAYMTAVAPVPWWPPPPELAHAGLLVASSPAGYPEPQTLPFLFAPLPPPPPAGCPLLPPPAPIVIQLQPHPSLLAEVDHRRSSSLVQFLKDEGAVLSPEDENKREKVIRELKKAHGPESDIDLLCLGPCIATLQYHFFVVLRQILQGRPEVSEVHTVEKAKVPLMRFRFTGIAVDLTYAQLPVIDALKAINTFSPQLLQKIDTRSWRSLSGVRVNEQIVQLVPNAEFCFTGNTMQKFQTLLRCIKLWARKRGLHCHVCGLIFSADCSALVQLYEHEVIILV

SEQ ID NO: 191227 - protein, 367 aa, Zea Mays
MHWANAVAYEQSVPQGLATATVLTYGSYTLGAHGPESDIDLLCLGPCIATLQYHFFVVLRQILQGRPEVSEVHTVEKAKVPLMRFRFTGIAVDLTYAQLPVIDALKAINTFSPQLLQKIDTRSWRSLSGVRVNEQIVQLVPNAEKFQTLLRCIKLWARKRGLHCHYLGFFAGIHLAILAAYVCRKFPDASVSGLFAVFFQTFAHWPWQVPDPLRHDFQWSWLFEPFPYDQKYQQFLRIALRAPTIAELGDWAGWVKSRFRFLILKLERAGIECDPCPSEEVDHTDNDPNVVFYWGLIPKRIIQVDTSSLKGDFMEDLTNDVYGTVKCTHSDVTISVVGLPQLPKSMCSRVYPPAVHAALYDGLRGHR

SEQ ID NO: 191228 - protein, 421 aa, Zea Mays
MHWANAVAYEQSVPQGLATATVLTYGSYTLGAHGPESDIDLLCLGPCIATLQYHFFVVLRQILQGRPEVSEVHTVEKAKVPLMRFRFTGIAVDLTYAQLPVIDALKAINTFSPQLLQKIDTRSWRSLSGVRVNEQIVQLVPNAEKFQTLLRCIKLWARKRGLHCHYLGFFAGIHLAILAAYVCRKFPDASVSGLFAVFFQTFAHWPWQVPVSLHDELTTCLHSEGRLMPIVMPCTPPEFCASTVTKGSLKKIREELTRGYVLTRDPLRHDFQWSWLFEPFPYDQKYQQFLRIALRAPTIAELGDWAGWVKSRFRFLILKLERAGIECDPCPSEEVDHTDNDPNVVFYWGLIPKRIIQVDTSSLKGDFMEDLTNDVYGTVKCTHSDVTISVVGLPQLPKSMCSRVYPPAVHAALYDGLRGHR

SEQ ID NO: 191229 - protein, 326 aa, Zea Mays
MIAMNPDMVLLSWKQMENGSGAVVPSNSSDRSDRSDKPLDQKTMRRLAQNREAARKSRLRKKAYVQQLESSKLKLAQLEQELQKARQQGIFISSSGDQTHAMSGNGALTFDIEYARWLEDQNKQINELRTAVNAHASDSDLRLIVDGIMAHYDEIFKVKGVAAKADVFHILSGMWKTPAERCFLWLGGFRPSELLKLLANHLEPLTEQQMLGLTNLQQSSQQAEDALSQGMEALQQSLAETLAGSLGPAGSSGNVANYMGQMAMAMGKLGTLENFLRQADNLRQQTLHQMQRILTIRQASRALLAIHDYFSRLRALSSLWLARPRE

SEQ ID NO: 191230 - protein, 164 aa, Zea Mays
MADASSRTDTSIVLDDNDKNHRMENGSGAVVPSNSSDRSDRSDKPLDQKTMRRLAQNREAARKSRLRKKAYVQQLESSKLKLAQLEQELQKARQQGIFISSSGDQTHAMSGNGALTFDIEYARWLEDQNKQINELRTAVNAHACGRHLLKGASYGLGVFVHLSF

SEQ ID NO: 191231 - protein, 191 aa, Zea Mays
MADASSRTDTSIVLDDNDKNHRVFVGYDQTISTNFEQAFLQLVLPLAYQMENGSGAVVPSNSSDRSDRSDKPLDQKTMRRLAQNREAARKSRLRKKAYVQQLESSKLKLAQLEQELQKARQQGIFISSSGDQTHAMSGNGALTFDIEYARWLEDQNKQINELRTAVNAHACGRHLLKGASYGLGVFVHLSF

SEQ ID NO: 191232 - protein, 161 aa, Zea Mays
MSPPFHHATPTHTNANRTHPPLPSVAYHPIPPPCAEFTAATTTTTTTDYTRPRGFWKLPLPCLPSQPKSPRLPPPASALGTTAGFASGWGWFCLPHHPPTPLLSSPPRLGLPRVVCPSTARHADEACPPPPIAHGHMIAMNPDMVLLSWKQLPPTVDPVKH

SEQ ID NO: 191233 - protein, 155 aa, Zea Mays
MPTRLAPHRRSHTMENGSGAVVPSNSSDRSDRSDKPLDQKTMRRLAQNREAARKSRLRKKAYVQQLESSKLKLAQLEQELQKARQQGIFISSSGDQTHAMSGNGALTFDIEYARWLEDQNKQINELRTAVNAHACGRHLLKGASYGLGVFVHLSF

SEQ ID NO: 191234 - protein, 293 aa, Zea Mays
MSPPFHHATPTHTNANRTHPPLPSVAYHPIPPPCAEFTAATTTTTTTDYTRPRGFWKLPLPCLPSQPKSPRLPPPASALGTTAGFASGWGWFCLPHHPPTPLLSSPPRLGLPRVVCPSTARHADEACPPPPIAHGHMIAMNPDMVLLSWKQMENGSGAVVPSNSSDRSDRSDKPLDQKTMRRLAQNREAARKSRLRKKAYVQQLESSKLKLAQLEQELQKARQQGIFISSSGDQTHAMSGNGALTFDIEYARWLEDQNKQINELRTAVNAHACGRHLLKGASYGLGVFVHLSF

SEQ ID NO: 191235 - protein, 109 aa, Zea Mays
MGASASMGAPLRLEREGRGTHGRGDGRPTDTPAGDPTDRHHPALRGSASLPLVTFLSQLSSNNTPFLFIITYTVYYNLLIHFFVHLFVYRLINVRCRRSTDILDRREMW

SEQ ID NO: 191236 - protein, 206 aa, Zea Mays
MGCHWWGLPVVPYRLPLSLSVRGRHPLPPRPDLFPAGASKAVAALFLHGCFGLHGCPVATGKGRQSLSCRGRRRPNVRGFLDTHFATPDDLAVAPALAELLRRARRLARLRPVTRGTHGRGDGRPTDTPAGDPTDRHHPALRGSASLPLVTFLSQLSSNNTPFLFIITYTVYYNLLIHFFVHLFVYRLINVRCRRSTDILDRREMW

SEQ ID NO: 191237 - protein, 111 aa, Zea Mays
MGQLDIKDFVPDSVESVSELMAPPSPDSSYGFHVPGEKEFSKEPPQLPSQLYLGVLNSRSTEEGCARPRHVVLDHLYIEKGWGAQPLVALGYTHRFRSKYVTCVLYKAIER

SEQ ID NO: 191238 - protein, 432 aa, Zea Mays
MGKHVWAAALMALAVIVGLGVPPGRIAEARTLEKDDLLGGGGDFGAGEGGGFGGGAGGGLGGGFGGGGGLGGGGGAGGGFGGGAGHGGGLGGGFGGGKGGGAGGGGGLGGGVGGGGGLGTGGGGGFGGGKGGGLGGGGGLGSGGGAGVGGGLGGGAGGGGDLGGGKGGGLGGGGGLGGGGGLGGGAGGGGGLGAGGGGGFGGGKGGGLGGGGGLGGGGGAGEGGGLGVGAGGGGGLGGGAGGGFGGGAGGGVGGGGGLGDGAGGGAGAGSGLGGGAGGGGGLGGGAGGGFGGGAGGGVGGGAGGGAGGGAGAGGGLGGGAGSGVGGGFGGGKGGGFGGGIGGGGGAGGGAGGGFGGGKGGGFGGGKGGGFGGGAGGGFGGGKGGGFGGGKGGGFGGGAGGGFGGGKGGGFGGGAGGGFGGGGGSGGGIGGGL

SEQ ID NO: 191239 - protein, 324 aa, Zea Mays
MGKHVWAAALMALAVIVGLGVPPGRIAEARTLEKDDLLGGGGDFGAGEGGGFGGGAGGGLGGGFGGGGGLGGGGGAGGGFGGGAGHGGGLGGGFGGGKGGGAGGGGGLGGGVGGGFGGGKGGGLGGGGGLGGGGGAGEGGGLGVGAGGGGGLGGGAGGGFGGGAGGGAGGGGGLGGGAGGGFGGGAGGGVGGGAGGGAGGGAGAGGGLGGGAGSGVGGGFGGGKGGGFGGGIGGGGGAGGGAGGGFGGGKGGGFGGGKGGGFGGGAGGGFGGGKGGGFGGGKGGGFGGGAGGGFGGGKGGGFGGGAGGGFGGGGGSGGGIGGGL

SEQ ID NO: 191240 - protein, 379 aa, Zea Mays
MHANPTRRGRPMASVGLPCPASCHLIYIYAASGRPLQSSKTKQKQPSSLQRLTPPHSTVMVVMGKEQQHEEEEVQGKVVQEEVQVVQETVVPVPSEEDKEAEAGALLRPAGLLRQPAGAPVALPLHQQLHPAEPAGARAAGAARAGPSAGARGLRRVRPAPAELPGARGAPPSGRLLRQLRHLRGGQRPGAAPGARRRRAPGAHGVPHLGRGGRDPGAGVVRRRVPGGAGGHGGRGEGPRGGAPREAHGPRRRAGGAERARRARVPVPRGGPRGDPARRIRRARRAPPGGGGDQLRDHRAQARCRRRARHRRGGARARARARRRAQPALPLLRDGGPGAPEDGGGGRRAAAVLGRRTPASSLSCPSGRPFDFRSCIYLI

SEQ ID NO: 191241 - protein, 352 aa, Zea Mays
MHANPTRRGRPMASVGLPCPASCHLIYIYAASGRPLQSSKTKQKQPSSLQRLTPPHSTVMVVMGKEQQHEEEEVQGKVVQEEVQVVQETVVPVPSEEDKEAEAAHYSDLLASFDNPLEHLSLFPYINNYILLSQLEHGLLARHVPGPAPARVAFVGSGPLPLSSLVLAARHLPGASFDNYDICGEANDRARRLVRGDGALQARMAFRTSDVADVTRELASYDAVFLAALVGMAAEEKARVVAHLGRHMAPGAALVVRSAHGARGFLYPVVDPEEIRRGGFDVLAVHHPEGEVINSVIIARKPVAVDAHATGGVGHAHAHAHGAVLNRPCLCCEMEARAHQKMEEVAVEQLPS

SEQ ID NO: 191242 - protein, 80 aa, Zea Mays
MPLASSNPHEDFSVDALGPRIIFWLIDLLCHRGVLTHAVVSDGVDLCLGSVFRVVANVRRRLALVGHSIYRVDGARLATM

SEQ ID NO: 191243 - protein, 353 aa, Zea Mays
MESRNVVVCDNGTGYVKCGFAGENFPTSVFPCVVGRPLLRYEESLQEQELTDIVVGAACADLRHQLDVSYPVTNGIVQNWDDMGHIWDHAFYSELKVDPSECKILLTDPPLNPVKNREKMIETMFEKYNFAGVFIQIQAVLSLYAQGLLTGLVIDSGDGVTHVVPVVDGYSYPHLTKRMNVAGRHITSYLVDLLSRRGYAMNKSADFETVREIKEKLCYISYDYKREYQLGLETTILVKSYTLPDGRVIKVGTERFQAPEALFTPELIDVEGDGMADMAFRCIQEMDIDNRMTLYQHIVLSGGSTMYPGLPSRFEGKQRWPKEITAEDRGSSSEKAHGVSGRCSACWDHEGCT

SEQ ID NO: 191244 - protein, 146 aa, Zea Mays
MIETMFEKYNFAGVFIQIQAVLSLYAQGLLTGLVIDSGDGVTHVVPVVDGYSYPHLTKRMNVAGRHITSYLVDLLSRRGYAMNKSADFETVREIKEKLCYISYDYKREYQLGLETTILVKSYTMLKVMGWRIWHSVAFRKWILTTG

SEQ ID NO: 191245 - protein, 211 aa, Zea Mays
MNVAGRHITSYLVDLLSRRGYAMNKSADFETVREIKEKLCYISYDYKREYQLGLETTILVKSYTLPDGRVIKVGTERFQAPEALFTPELIDVEGDGMADMAFRCIQEMDIDNRMTLYQHIVLSGGSTMYPGLPSRLEKEILDRYLDVVLKGNKDGLKKLRLRIEDPPRRKHMVYLGGAVLAGIMKDAPEFWITRQEYQEEGVACLRKCGQS

SEQ ID NO: 191246 - protein, 74 aa, Zea Mays
MHLLFPNCTALATTTSKFEPPLQSRQLQVLLLLLHLPLDPPRDISSSSPRTSPESAGRTPLGTAGCRGRTRTVG

SEQ ID NO: 191247 - protein, 1172 aa, Zea Mays
MKMVSLMGANFSKSLAANIITHLICYKFEGEKYELAKRVNIKLVNHRWLEECLKAWEILPVDHYTKSGWEVEIMGAQAKDSEDETEYAGTCSLSSRRIDRRTPIREISTKSHVDSALHAPSGGPTVSASNVVGATGKHLSTPEQFMKAHDASTKSSDIRTDSGTAPDTKCAAMSVDNDTLKPTRSHIYHNENDEVPADKASRDEAKDDHRRELDTRDSTLRTPSVHKSIAPTIPGDNIENTNRNCFHGFSQINVNSDLQLNSSEENFSKKILHSTNLSRKVDQKDDGHVPDPKPNISQSSVEENLNMCEFNPRSEGNSASRNDQPLGYSRRRSSKSGSLNVHRKKSILSSVSSKAPNEAPDSGSGISSATASDVGRSPTEPTKVDGHVNSGPTMNSTENQMSGCKSNLLSYRRTSLKLVSSAEVEKLPENSVNDKNMVEPDVVKTPALHEATTEEPSPSVCSEVRKESLGVHQNRDAEMTDAQLLSKTEDAAPCSKPDKVVSCQNSGLEGCKDVPVNKITDEHGIFPSKISTSRVKKVGAKRSRNAGSKAASEFTNSRSEVAALKPKHDKVASHENVEAQQGEGCCSPNAAECTPPSPAEALNNKSTNEVLTSSQGPNHKTNESLVASKAESVNMTLQRNKKGNRRKLPNTSNADENQRSSSRTVPNSKSGNGEEKHKRLSSSANADDPEACTANKVPNNRVRKVVAKRKLSDVQSHKSGSEPCKTAKVLVSEVKVVSPARVAQSSRNANKVTVVQDLQNTNTGRTNDTVGSFCKDVTEDCSKDMQSSKTRSSRRQKIADLVDGSTDHDKENILVDSNFTSNTKRGNNSMSSKSNTKTLQSSKAVLDESSVIKRNGYGTLDVPEPTWFILSGHRLLRKEYRAILRRLRGRVCRDSHHWSFQATHLVTTEMRRTEKFFAAAAAGRWILKPDYLTASNEAGKFLEEEPFEWHGEGLNIGDTISLDAPRKWRQLRQRTGYGAFYGMQVIIYGECIAPTLDTLKRAIRCGDGTILATSPPYTRFFKSSVDFAVVSAGMPSADAWVQEFMRHSIPCISADYLVEYVCKPGHPLGKHVLFNMHDLAERSLQKLMKNQEDAPGSCSACGSDNREVPMLVCGGDGRSQSSGCGVRTHADCCNPPVEGCDGGEWLCGRCDQQKSAKKAKKTAAKPRVLKQR

SEQ ID NO: 191248 - protein, 1247 aa, Zea Mays
MPCAVCSDDPVCVAARKAGKKVVVDQWVEDSFDLGELADADRVLYAPVRDFKGIPGCDKLHICLTGYQKNWRDDIMKMVSLMGANFSKSLAANIITHLICYKFEGEKYELAKRVNIKLVNHRWLEECLKAWEILPVDHYTKSGWEVEIMGAQAKDSEDETEYAGTCSLSSRRIDRRTPIREISTKSHVDSALHAPSGGPTVSASNVVGATGKHLSTPEQFMKAHDASTKSSDIRTDSGTAPDTKCAAMSVDNDTLKPTRSHIYHNENDEVPADKASRDEAKDDHRRELDTRDSTLRTPSVHKSIAPTIPGDNIENTNRNCFHGFSQINVNSDLQLNSSEENFSKKILHSTNLSRKVDQKDDGHVPDPKPNISQSSVEENLNMCEFNPRSEGNSASRNDQPLGYSRRRSSKSGSLNVHRKKSILSSVSSKAPNEAPDSGSGISSATASDVGRSPTEPTKVDGHVNSGPTMNSTENQMSGCKSNLLSYRRTSLKLVSSAEVEKLPENSVNDKNMVEPDVVKTPALHEATTEEPSPSVCSEVRKESLGVHQNRDAEMTDAQLLSKTEDAAPCSKPDKVVSCQNSGLEGCKDVPVNKITDEHGIFPSKISTSRVKKVGAKRSRNAGSKAASEFTNSRSEVAALKPKHDKVASHENVEAQQGEGCCSPNAAECTPPSPAEALNNKSTNEVLTSSQGPNHKTNESLVASKAESVNMTLQRNKKGNRRKLPNTSNADENQRSSSRTVPNSKSGNGEEKHKRLSSSANADDPEACTANKVPNNRVRKVVAKRKLSDVQSHKSGSEPCKTAKVLVSEVKVVSPARVAQSSRNANKVTVVQDLQNTNTGRTNDTVGSFCKDVTEDCSKDMQSSKTRSSRRQKIADLVDGSTDHDKENILVDSNFTSNTKRGNNSMSSKSNTKTLQSSKAVLDESSVIKRNGYGTLDVPEPTWFILSGHRLLRKEYRAILRRLRGRVCRDSHHWSFQATHLVTTEMRRTEKFFAAAAAGRWILKPDYLTASNEAGKFLEEEPFEWHGEGLNIGDTISLDAPRKWRQLRQRTGYGAFYGMQVIIYGECIAPTLDTLKRAIRCGDGTILATSPPYTRFFKSSVDFAVVSAGMPSADAWVQEFMRHSIPCISADYLVEYVCKPGHPLGKHVLFNMHDLAERSLQKLMKNQEDAPGSCSACGSDNREVPMLVCGGDGRSQSSGCGVRTHADCCNPPVEGCDGGEWLCGRCDQQKSAKKAKKTAAKPRVLKQR

SEQ ID NO: 191249 - protein, 1099 aa, Zea Mays
MGAQAKDSEDETEYAGTCSLSSRRIDRRTPIREISTKSHVDSALHAPSGGPTVSASNVVGATGKHLSTPEQFMKAHDASTKSSDIRTDSGTAPDTKCAAMSVDNDTLKPTRSHIYHNENDEVPADKASRDEAKDDHRRELDTRDSTLRTPSVHKSIAPTIPGDNIENTNRNCFHGFSQINVNSDLQLNSSEENFSKKILHSTNLSRKVDQKDDGHVPDPKPNISQSSVEENLNMCEFNPRSEGNSASRNDQPLGYSRRRSSKSGSLNVHRKKSILSSVSSKAPNEAPDSGSGISSATASDVGRSPTEPTKVDGHVNSGPTMNSTENQMSGCKSNLLSYRRTSLKLVSSAEVEKLPENSVNDKNMVEPDVVKTPALHEATTEEPSPSVCSEVRKESLGVHQNRDAEMTDAQLLSKTEDAAPCSKPDKVVSCQNSGLEGCKDVPVNKITDEHGIFPSKISTSRVKKVGAKRSRNAGSKAASEFTNSRSEVAALKPKHDKVASHENVEAQQGEGCCSPNAAECTPPSPAEALNNKSTNEVLTSSQGPNHKTNESLVASKAESVNMTLQRNKKGNRRKLPNTSNADENQRSSSRTVPNSKSGNGEEKHKRLSSSANADDPEACTANKVPNNRVRKVVAKRKLSDVQSHKSGSEPCKTAKVLVSEVKVVSPARVAQSSRNANKVTVVQDLQNTNTGRTNDTVGSFCKDVTEDCSKDMQSSKTRSSRRQKIADLVDGSTDHDKENILVDSNFTSNTKRGNNSMSSKSNTKTLQSSKAVLDESSVIKRNGYGTLDVPEPTWFILSGHRLLRKEYRAILRRLRGRVCRDSHHWSFQATHLVTTEMRRTEKFFAAAAAGRWILKPDYLTASNEAGKFLEEEPFEWHGEGLNIGDTISLDAPRKWRQLRQRTGYGAFYGMQVIIYGECIAPTLDTLKRAIRCGDGTILATSPPYTRFFKSSVDFAVVSAGMPSADAWVQEFMRHSIPCISADYLVEYVCKPGHPLGKHVLFNMHDLAERSLQKLMKNQEDAPGSCSACGSDNREVPMLVCGGDGRSQSSGCGVRTHADCCNPPVEGCDGGEWLCGRCDQQKSAKKAKKTAAKPRVLKQR

SEQ ID NO: 191250 - protein, 1303 aa, Zea Mays
MPPHGPEEDAADAHLFAGVRFALHGFDQISASQFRLEIERCGGVHAGGWDADCTHVIVSNTLYDDPVCVAARKAGKKVVVDQWVEDSFDLGELADADRVLYAPVRDFKGIPGCDKLHICLTGYQKNWRDDIMKMVSLMGANFSKSLAANIITHLICYKFEGEKYELAKRVNIKLVNHRWLEECLKAWEILPVDHYTKSGWEVEIMGAQAKDSEDETEYAGTCSLSSRRIDRRTPIREISTKSHVDSALHAPSGGPTVSASNVVGATGKHLSTPEQFMKAHDASTKSSDIRTDSGTAPDTKCAAMSVDNDTLKPTRSHIYHNENDEVPADKASRDEAKDDHRRELDTRDSTLRTPSVHKSIAPTIPGDNIENTNRNCFHGFSQINVNSDLQLNSSEENFSKKILHSTNLSRKVDQKDDGHVPDPKPNISQSSVEENLNMCEFNPRSEGNSASRNDQPLGYSRRRSSKSGSLNVHRKKSILSSVSSKAPNEAPDSGSGISSATASDVGRSPTEPTKVDGHVNSGPTMNSTENQMSGCKSNLLSYRRTSLKLVSSAEVEKLPENSVNDKNMVEPDVVKTPALHEATTEEPSPSVCSEVRKESLGVHQNRDAEMTDAQLLSKTEDAAPCSKPDKVVSCQNSGLEGCKDVPVNKITDEHGIFPSKISTSRVKKVGAKRSRNAGSKAASEFTNSRSEVAALKPKHDKVASHENVEAQQGEGCCSPNAAECTPPSPAEALNNKSTNEVLTSSQGPNHKTNESLVASKAESVNMTLQRNKKGNRRKLPNTSNADENQRSSSRTVPNSKSGNGEEKHKRLSSSANADDPEACTANKVPNNRVRKVVAKRKLSDVQSHKSGSEPCKTAKVLVSEVKVVSPARVAQSSRNANKVTVVQDLQNTNTGRTNDTVGSFCKDVTEDCSKDMQSSKTRSSRRQKIADLVDGSTDHDKENILVDSNFTSNTKRGNNSMSSKSNTKTLQSSKAVLDESSVIKRNGYGTLDVPEPTWFILSGHRLLRKEYRAILRRLRGRVCRDSHHWSFQATHLVTTEMRRTEKFFAAAAAGRWILKPDYLTASNEAGKFLEEEPFEWHGEGLNIGDTISLDAPRKWRQLRQRTGYGAFYGMQVIIYGECIAPTLDTLKRAIRCGDGTILATSPPYTRFFKSSVDFAVVSAGMPSADAWVQEFMRHSIPCISADYLVEYVCKPGHPLGKHVLFNMHDLAERSLQKLMKNQEDAPGSCSACGSDNREVPMLVCGGDGRSQSSGCGVRTHADCCNPPVEGCDGGEWLCGRCDQQKSAKKAKKTAAKPRVLKQR

SEQ ID NO: 191251 - protein, 1179 aa, Zea Mays
MPPHGPEEDAADAHLFAGVRFALHGFDQISASQFRLEIERCGGVHAGGWDADCTHVIVSNTLYDDPVCVAARKAGKKVVVDQWVEDSFDLGELADADRVLYAPVRDFKGIPGCDKLHICLTGYQKNWRDDIMKMVSLMGANFSKSLAANIITHLICYKFEGEKYELAKRVNIKLVNHRWLEECLKAWEILPVDHYTKSGWEVEIMGAQAKDSEDETEYAGTCSLSSRRIDRRTPIREISTKSHVDSALHAPSGGPTVSASNVVGATGKHLSTPEQFMKAHDASTKSSDIRTDSGTAPDTKCAAMSVDNDTLKPTRSHIYHNENDEVPADKASRDEAKDDHRRELDTRDSTLRTPSVHKSIAPTIPGDNIENTNRNCFHGFSQINVNSDLQLNSSEENFSKKILHSTNLSRKVDQKDDGHVPDPKPNISQSSVEENLNMCEFNPRSEGNSASRNDQPLGYSRRRSSKSGSLNVHRKKSILSSVSSKAPNEAPDSGSGISSATASDVGRSPTEPTKVDGHVNSGPTMNSTENQMSGCKSNLLSYRRTSLKLVSSAEVEKLPENSVNDKNMVEPDVVKTPALHEATTEEPSPSVCSEVRKESLGVHQNRDAEMTDAQLLSKTEDAAPCSKPDKVVSCQNSGLEGCKDVPVNKITDEHGIFPSKISTSRVKKVGAKRSRNAGSKAASEFTNSRSEVAALKPKHDKVASHENVEAQQGEGCCSPNAAECTPPSPAEALNNKSTNEVLTSSQGPNHKTNESLVASKAESVNMTLQRNKKGNRRKLPNTSNADENQRSSSRTVPNSKSGNLVAKGSRTADFNISDSPTVDETETVPSNSSFNEAVPPGNGEEKHKRLSSSANADDPEACTANKVPNNRVRKVVAKRKLSDVQSHKSGSEPCKTAKVLVSEVKVVSPARVAQSSRNANKVTVVQDLQNTNTGRTNDTVGSFCKDVTEDCSKDMQSSKTRSSRRQKIADLVDGSTDHDKENILVDSNFTSNTKRGNNSMSSKSNTKTLQSSKAVLDESSVIKRNGYGTLDVPEPTWFILSGHRLLRKEYRAILRRLRGRVCRDSHHWSFQATHLVTTEMRRTEKFFAAAAAGRWILKPDYLTASNEAGKFLEEEPFEWHGEGLNIGDTISLDAPRKWRQLRQRTGYGAFYGMQVIIYGECIAPTLRRHVFITIWLRCP

SEQ ID NO: 191252 - protein, 271 aa, Zea Mays
MVSVMKVEKAPLESYADIGGLDAQIQEIKEAVELPLTHPELYEDIGIRPPKGVILYGEPGTGKTLLAKAVANSTSATFLRVVGSELIQKYLGDGPKLVRELFRVADELSPSIVFIDEIDAVGTKRYDAHSGGEREIQRTMLELLNQLDGFDSRGDVKVILATNRIESLDPALLRPGRIDRKIEFPLPDIKTRRRIFQIHTSKMTLADDVNLEEFVMTKDEFSGADIKAICTEAGLLALRERRMKVTHADFKKAKEKVMYKKKEGVPDGLYM

SEQ ID NO: 191253 - protein, 474 aa, Zea Mays
MQHRRKPASAAAPPAAKQPAARRPTARLSLAGLVVSIFLVATFLYNEDVVKAASGSSSSATTADAAEVGVSGRARSPDLRVLQEAAHQGVEAEEREVGDRTEAEQKQKPLTLPIPIPVVALAEEELVENTKGRQKQQQQEEEQTQKPPPPPPPPPQVAGCDLYRGRWTFDAAGEQAPLYRESECEFLTEQVTCMRNGRRDDSYQKWRWQPDGCDLPRYDARLLLERLRNKRLMFVGDSLNRNQWESMVCLVQSVVPWGHKTLHKFVNNGSLNVFTAHDYNATVEFYWAPFLVESNSDDPQAHSVMNRVIAWRAIAKHAKNWKGVDYLVFNSYIWWLNTFEMKVIRRHQHQLEKEEEGVRWSKYALVDRPVAYREVLKTWARWVDRHIDPNRTRVFFMGMSPNHVTPWAWGNDGGIKCAMETQPISNNRTGRLDSPTPGTTSSTRTSSRSPRPPRITNHFCPASQCQALPFNSSP

SEQ ID NO: 191254 - protein, 268 aa, Zea Mays
MHQSQNSFNVIPPTSRATNYVVLRYYDVKGDPEGFKSGVIDESHCHYMVVFQYGSIVLFNVSDHEADGYLKIVEKHASGLLPEMRKDDYAVVEKPTLETWMQGGLDYIVLRDLSIDGIRTIGSVLGQSIALDYYIRQVDGMVAEFTDINRGMEKTGTFTMERKKLFQLVGKANSNLADVILKLGLFERSDIAWKNANYAQIWEYLRDEYELTQRFGNLDFKLKFVEHNIRFLQEILQNRKSDFLEWLIIILISVEILISVYNIIQEQM

SEQ ID NO: 191255 - protein, 709 aa, Zea Mays
MASPAGGESPAKPVLLHGDLDLWILEARLLPNMDMFSEHVRRCFAACRPPSSCGTKHPPPAAAGRRHHHHHRNIITSDPYVTLSVSGAVVARTAVIPNSQDPVWEERFAVPLAHRAADLEFQVKDNDTFGAQLIGTVAVPADRVVSGDEVEDWFPVIGTNGKPYKPDTALRLRFKFQPIADNPAYRHGIAGDPDHRGIQDSYFPLRHGGQLTLYQDAHVREGDLPEIELDNGKTFQHNACWEDICHAILEAHHMIYIVGWSVYDKVRLVREPSPSRPLPEGGDLTLGDLLKFKSQEGVRVCLLVWDDKTSHDKFFIKTGGVMATHDEETRKFFKHSSVICVLSPRYASNKLSIFKQQVVGTLFTHHQKCVLVDTQARGNKRKITAFIGGLDLCDGRYDTPEHRLFKDLDTVFQNDYHNPTFSAGAKGPRQPWHDLHCRIDGPAAYDVLTNFEQRWRKATKWRDRFRRVSHWKDDALIKLERISWILSPSPNVPNNHPSLWVSKEEDHENWHVQVFRSIDSGSLKGFPSDCKAASKLNLVCRKNLVIDKSIHTAYVRAIRSAQHFIYIENQYFLGSSYAWPSYVNSGADNLVPIELALKIASKIKAGERFAVYVVIPMWPEGVPTAASVQEILFFQAQTMEMMYKIIADELKATDNKDMHPEDYLNFFCLGNREEPPSNGSPESEKSTDKSAAGYPISNNSYRSQVIVDH

SEQ ID NO: 191256 - protein, 515 aa, Zea Mays
MASPAGGESPAKPVLLHGDLDLWILEARLLPNMDMFSEHVRRCFAACRPPSSCGTKHPPPAAAGRRHHHHHRNIITSDPYVTLSVSGAVVARTAVIPNSQDPVWEERFAVPLAHRAADLEFQVKDNDTFGAQLIGTVAVPADRVVSGDEVEDWFPVIGTNGKPYKPDTALRLRFKFQPIADNPAYRHGIAGDPDHRGIQDSYFPLRHGGQLTLYQDAHVREGDLPEIELDNGKTFQHNACWEDICHAILEAHHMIYIVGWSVYDKVRLVREPSPSRPLPEGGDLTLGDLLKFKSQEGVRVCLLVWDDKTSHDKFFIKTGGVMATHDEETRKFFKHSSVICVLSPRYASNKLSIFKQQVVGTLFTHHQKCVLVDTQARGNKRKITAFIGGLDLCDGRYDTPEHRLFKDLDTVFQNDYHNPTFSAGAKGPRQPWHDLHCRIDGPAAYDVLTNFEQRWRKATKWRDRFRRVSHWKDDALIKLERISWILSPSPNVPNNHPSLWVSKEEDHENWHVQVN

SEQ ID NO: 191257 - protein, 180 aa, Zea Mays
MVRHLLLLSFPRHSSAPAAPLLQIHGAQHLERPCRCSSTGISSSTRRPGLSHHGCPSSISSLPTRLPRFHGRRRPSHLPGGRPRPCPSHSSPFGPAAASTQPLPWHTPHLQHRRPPTRNPMIWGKTKSKHNPRQSLDEKSKPKPSAFSWVPEGFYVGKVLCGVISNSLLLMSYSIMTLGL

SEQ ID NO: 191258 - protein, 184 aa, Zea Mays
MVRHLLLLSFPRHSSAPAAPLLQIHGAQHLERPCRCSSTGISSSTRRPGLSHHGCPSSISSLPTRLPRFHGRRRPSHLPGGRPRPCPSHSSPFGPAAASTQPLPWHTPHLQHRRPPTRNPMIWGKTKSKHNPRQSLDEKSKPKPSAFSWVPEGFYVGKVLCGVISNSLLLMSYSIMTLGKDVFL

SEQ ID NO: 191259 - protein, 186 aa, Zea Mays
MVRHLLLLSFPRHSSAPAAPLLQIHGAQHLERPCRCSSTGISSSTRRPGLSHHGCPSSISSLPTRLPRFHGRRRPSHLPGGRPRPCPSHSSPFGPAAASTQPLPWHTPHLQHRRPPTRNPMIWGKTKSKHNPRQSLDEKSKPKPSAFSWVPEGFYVGVVRCDLQFPIADVLLHHDLREGCFPLNYS

SEQ ID NO: 191260 - protein, 131 aa, Zea Mays
MVRHLLLLSFPRHSSAPAAPLLQIHGAQHLERPCRCSSTGISSSTRRPGLSHHGCPSSISSLPTRLPRFHGRRRPSHLPGGRPRPCPSHSSPFGPAAASTQPLPWHTPHLQHRRPPTRSCSRPVVLVLGVD

SEQ ID NO: 191261 - protein, 251 aa, Zea Mays
MANAADDLDLLLSLGEAVPETPPASPRTADVPVCDGAFTPPRTAPPGGTDMSVFRDAVKDYLEAAPETTSPLANRPKRPKATEILVDKYSGLRIKHLTLSPLEISNRFADIRFVRITALKNSVGSDRFSGCWATAGVLLDKGVQRVSAKGSSYSIWKMGALDETDVSLFLFGDAHVHYSGAAVGSVFAVFNGNVRMDNGGKGFSMSVASVGQMLKMGVASDFGLCKGKRKDGVACTMAINKKHHKSILLAE

SEQ ID NO: 191262 - protein, 177 aa, Zea Mays
MSSMDKGMIFVNGEGVGRYWVSYRTLAGTPSQALYHIPRPFLKSKDNLLVVFEEEMGKPDGILVQTVTRDDICLFISEHNPGQIKTWDTDGDKIKLIAEDHSRRGTLMCPPEKTIQEVVFASFGNPEGMCGNFTECLGKPSCMLPVDHTVYGADINCQSTTATLGVQVRCGGGKKGA

SEQ ID NO: 191263 - protein, 163 aa, Zea Mays
MLQAHIFELPEENLCLSFLSNNNTGEDGTVIFRGEKHYVPSRSVSILAGCKNVVYNTKRVFVQHNERSYHTSEVTSKNNQWEMYSEKIPKYRDTKVRMKEPLEQFNQTKDASDYLWYTTSFRLESDDLPFRNDIRPVLQVKSSAHSMMGFANDAFDAHAEASR

SEQ ID NO: 191264 - protein, 546 aa, Zea Mays
MRSAEDIAYAVLRFFAKGGSLVNYYMYHGGTNFGRTGASYVLTGYYDEAPMDEYGMYKEPKFGHLRDLHNVIRSYQKAFLLGKHSSEILGHGYEAHIFELPEENLCLSFLSNNNTGEDGTVIFRGEKHYVPSRSVSILAGCKNVVYNTKRVFVQHNERSYHTSEVTSKNNQWEMYSEKIPKYRDTKVRMKEPLEQFNQTKDASDYLWYTTSFRLESDDLPFRNDIRPVLQVKSSAHSMMGFANDAFVGCARGSKQVKGFMFEKPVDLKVGVNHVVLLSSTMGMKDSGGELAEVKSGIQECLIQGLNTGTLDLQVNGWGHKAALEGEDKEIYSEKGVGKVQWKPAENGRAATWYKRYFDEPDGDDPVVLDMSSMDKGMIFVNGEGVGRYWVSYRTLAGTPSQALYHIPRPFLKSKDNLLVVFEEEMGKPDGILVQTVTRDDICLFISEHNPGQIKTWDTDGDKIKLIAEDHSRRGTLMCPPEKTIQEVVFASFGNPEGMCGNFTECLGKPSCMLPVDHTVYGADINCQSTTATLGVQVRCGGGKKGA

SEQ ID NO: 191265 - protein, 291 aa, Zea Mays
MRSAEDIAYAVLRFFAKGGSLVNYYMYHGGTNFGRTGASYVLTGYYDEAPMDEYGMYKEPKFGHLRDLHNVIRSYQKAFLLGKHSSEILGHGYEAHIFELPEENLCLSFLSNNNTGEDGTVIFRGEKHYVPSRSVSILAGCKNVVYNTKRVFVQHNERSYHTSEVTSKNNQWEMYSEKIPKYRDTKVRMKEPLEQFNQTKDASDYLWYTTSFRLESDDLPFRNDIRPVLQVKSSAHSMMGFANDAFVGCARGSKQVKGFMFEKPVDLKVGVNHVVLLSSTMGMKAKKIWLY

SEQ ID NO: 191266 - protein, 394 aa, Zea Mays
MTVRAAAVLVAAAVLVLLLPGWAAAEWNLTKKGSVVTYDGRSLMIDGKRDLFFSGAIHYPRSPPEVWPKLIERAKEGGLNTIETYIFWNAHEPEPGKYNFEGRFDLIKYLKMIQEHDMYAIVRIGPFIQAEWNHGGLPYWLREIDHIIFRANNDPYKKEMEKFVRFIVQKLKDAELFASQGGPIILTQIENEYGNIKKDHATDGDKYLEWAAQMALSTQTGVPWIMCKQSSAPGEVIPTCNGRHCGDTWTLRDKNKPMLWTENWTQQFRAYGDQVAMRSAEDIAYAVLRFFAKGGSLVNYYMYHGGTNFGRTGASYVLTGYYDEAPMDEYGMYKEPKFGHLRDLHNVIRSYQKAFLLGKHSSEILGHGHTSLSCLKKIFASLSFPTITRAKMEQ

SEQ ID NO: 191267 - protein, 249 aa, Zea Mays
MTVRAAAVLVAAAVLVLLLPGWAAAEWNLTKKGSVVTYDGRSLMIDGKRDLFFSGAIHYPRSPPEVWPKLIERAKEGGLNTIETYIFWNAHEPEPGKYNFEGRFDLIKYLKMIQEHDMYAIVRIGPFIQAEWNHGGLPYWLREIDHIIFRANNDPYKKEMEKFVRFIVQKLKDAELFASQGGPIILTQIENEYGNIKKDHATDGDKYLEWAAQMALSTQTGVPWIMCKQSSAPGEVIQSIWRSSSYAFS

SEQ ID NO: 191268 - protein, 567 aa, Zea Mays
MTVRAAAVLVAAAVLVLLLPGWAAAEWNLTKKGSVVTYDGRSLMIDGKRDLFFSGAIHYPRSPPEVWPKLIERAKEGGLNTIETYIFWNAHEPEPGKYNFEGRFDLIKYLKMIQEHDMYAIVRIGPFIQAEWNHGGLPYWLREIDHIIFRANNDPYKKEMEKFVRFIVQKLKDAELFASQGGPIILTQIENEYGNIKKDHATDGDKYLEWAAQMALSTQTGVPWIMCKQSSAPGEVIPTCNGRHCGDTWTLRDKNKPMLWTENWTQQFRAYGDQVAMRSAEDIAYAVLRFFAKGGSLVNYYMYHGGTNFGRTGASYVLTGYYDEAPMDEYGMYKEPKFGHLRDLHNVIRSYQKAFLLGKHSSEILGHGYEAHIFELPEENLCLSFLSNNNTGEDGTVIFRGEKHYVPSRSVSILAGCKNVVYNTKRVFVQHNERSYHTSEVTSKNNQWEMYSEKIPKYRDTKVRMKEPLEQFNQTKDASDYLWYTTSFRLESDDLPFRNDIRPVLQVKSSAHSMMGFANDAFVGCARGSKQVKGFMFEKPVDLKVGVNHVVLLSSTMGMKAKKIWLY

SEQ ID NO: 191269 - protein, 103 aa, Zea Mays
MGWARHATKNAPSFPRPPAPPQAPRAKEPQPHKMAVAPEPSKKRVAPGTGLEEWTETADSLYSVSPPPSSVPMPTSLLLTVTPPTACAVDVGATDELRRILKL

SEQ ID NO: 191270 - protein, 826 aa, Zea Mays
MSLDTKLILNAISELFDKFDARWSMRDAAREASRRVPVPTQCTVVGADVVADNWGNLFDSGVDSDEQRYEEPINADNWGGFFDGADVSANAEFAGHWDNPSSNPDATAYVTPEVAVESVHPAARGRFFNDDSGAPLDSDDDSSVHGGHGSVMSHLLEREADTAFLPHLDQRDGVEAWLILRRCTPASFNVASTDPNNEVSSAVTADALAKAAPALFASRAPRPSLKYLELLLQAEIDFDHIDLPTAAAAEHIVAQVTGNNAVSVVEDQLRCTLFLTRNFLSSHHQAVSKEWDMVAVVHPVCNVGEKKVDAICTGQIEHLLLHHLKRSPTSIGAKAVFDEMQQSTNSATTTPASSALTTTTTTTMAAPATWLDAQPAVSTCSSASSAQEDTPIPLLFLRGGLSMMDNVLPANSTFLSTNISLSNMECLREFMLHLKLGTARFTICDESVVNLWSSPVERVVQQQTWLQLELTNSGLDLWPISWQSQQVYFGTHHGFAAWPRSHGTILVFDFSNTLSWNNSMSIVASCSTNTLLAKDDGDSMNRCFSWCWKPPWLHPGVCRSLHMITKFSKQYFVGLFLLITREKFMSGRIMLALLPLLKLFTSGGARIVNASSLASELKRMPNEKLRNDLSNIDIWDEDRIQAVLNTFLEDLRSGRLEEAGWPVMLPAYSLSKMVINLYTRIIARRYPEMRINCVRPGFVTTDISWNLGVLTPKQGARGPVMLALLPDDGPTGWYRDEMGDKMGSLLFFKMVKYSSLVEGFCGVQFSFPNILLCKSWSQELATNTESHLLPEMLEAANGYICHELHLMLTSIGVTHMIDCEDTPSFL

SEQ ID NO: 191271 - protein, 942 aa, Zea Mays
MSLDTKLILNAISELFDKFDARWSMRDAAREASRRVPVPTQCTVVGADVVADNWGNLFDSGVDSDEQRYEEPINADNWGGFFDGADVSANAEFAGHWDNPSSNPDATAYVTPEVAVESVHPAARGRFFNDDSGAPLDSDDDSSVHGGHGSVMSHLLEREADTAFLPHLDQRDGVEAWLILRRCTPASFNVASTDPNNEVSSAVTADALAKAAPALFASRAPRPSLKYLELLLQAEIDFDHIDLPTAAAAEHIVAQVTGNNAVSVVEDQLRCTLFLTRNFLSSHHQAVSKEWDMVAVVHPVCNVGEKKVDAICTGQIEHLLLHHLKRSPTSIGAKAVFDEMQQSTNSATTTPASSALTTTTTTTMAAPATWLDAQPAVSTCSSASSAQEDTPIPLLFLRGGLSMMDNVLPANSTFLSTNISLSNMECLREFMLHLKLGTARFTICDESVVNLWSSPVERVVQQQTWLQLELTNSGLDLWPISWQSQQVYFGTHHGFAAWPRSHGTILVFDFSNTLSWNNSMSIVASCSTNTLLAKDDGDSMNRCFSWCWKPPWLHPGQSKFRDFLWWSFWYFQFVRSKYYGCRASQLLTPWTPPMTLCLVGDDLVVMLVIPSMLLLSRCYFSGVECVLAAADPLFSTFHAERELFWKPPWQHLVPNTRSEIQLLMEFVYLNTGVCRSLHMITKFSKQYFVGLFLLITREKFMSGRIMLALLPLLKLFTSGGARIVNASSLASELKRMPNEKLRNDLSNIDIWDEDRIQAVLNTFLEDLRSGRLEEAGWPVMLPAYSLSKMVINLYTRIIARRYPEMRINCVRPGFVTTDISWNLGVLTPKQGARGPVMLALLPDDGPTGWYRDEMGDKMGSLLFFKMVKYSSLVEGFCGVQFSFPNILLCKSWSQELATNTESHLLPEMLEAANGYICHELHLMLTSIGVTHMIDCEDTPSFL

SEQ ID NO: 191272 - protein, 67 aa, Zea Mays
MYGSDNDSSMNESEEFWNIELVSQASISGIRFWMPGAGLGCLAGASRPGCQPNKLGLWWCQGSRKIC

SEQ ID NO: 191273 - protein, 115 aa, Zea Mays
MIQGGDIVRGDGKGSESIYGGIFPDENFTVKHTHPGVVAMANSGLDSNGSQFYITTIKTSWLDGEHVVFGRVIQGMDTVYAIEGGAGTYNGKPRKKAVITDAGEIPKEKWGDQEA

SEQ ID NO: 191274 - protein, 163 aa, Zea Mays
MASARYRAPSAVVITGVCTCMMEPRGSCRIGVGCYQTQFGCQGVAEVQLPAVTHRVYLDVEIDGQHIGRIVIGLYGEVVPKTVGVVAMANSGLDSNGSQFYITTIKTSWLDGEHVVFGRVIQGMDTVYAIEGGAGTYNGKPRKKAVITDAGEIPKEKWGDQEA

SEQ ID NO: 191275 - protein, 334 aa, Zea Mays
MASLMISLSSFVILSFFQGAAGGITFTFTNRCGGTVWPGLLANSGSSPLQTTGFELGPGETRSLTAPPGWSGRFWARTGCAFDAASGKGACATGDCGSGEVECRGRGATPPATLAEFTLGGGGKDYYDVSLVDGYNLPMVVEAAAPGCPVTGCLVDLNERCPVELRAGGQACRSACEAFGTPEYCCSGQFGNPDTCHPSPYSQMFKAACPRSYSYAYDDATSTFTCTGTDYSITFCPPRAGTSSRRRPRAPCRRPGTCSSRATRGWRAWPPARRTPRRRRRRRRCSRPHRQRPQSLPCFYDRIDDGGGWMRTAKHIFFSLLSLWIVKLFVGKVA

SEQ ID NO: 191276 - protein, 321 aa, Zea Mays
MAIHRLMLPISILLMSSLSGAVSTTFTLANSCGYTVWPGLLSSAGSAPLPTTGFALAPGESRVVDAPAAWSGRIWGRTRCAADNQASGRFACATGECGSGAVECAGGGAAPPTTLAEFTLDGAGGNDFYDVSLVDGSNLPMAVVPQGGAGTSCGATGCLADLNGPCPADLRVVGSDGAGIACKSACGAYGRPQDCCSGDYGTPATCQPSASSQFFKNACPRAYSYAYDDATSTFTCTSGTASYLVTFCPSISSLKSSVSRTNPGLPLVNDTVSFAGRGDGSSYPYAYASAPPRSSAPCPLALAATAFTWLFAAPYRRRLRL

SEQ ID NO: 191277 - protein, 62 aa, Zea Mays
MIGSDVDTERKSKIAFFSLHLSPLIQNLNHPWNQLLSCLLSLLPSVTPRDPQTPQNATKLHI

SEQ ID NO: 191278 - protein, 58 aa, Zea Mays
MRIGTRKTKYNACTYIYANIYIVPDQGPFVFGHGSSSQSMLDLSPGMRLLFVDVGKVN

SEQ ID NO: 191279 - protein, 83 aa, Zea Mays
MWGKVGRDSGIWPMLRSGALFFFFFFCLSFSFLFLFSFLTFKFNLSSMFNSNFLWLFRIQICMFYSSEHSMNKFYLFTNLFCF

SEQ ID NO: 191280 - protein, 337 aa, Zea Mays
MLLHASLPPTYWAEGLLTACYLHNRRPSSSIQHEIPYTRLHNQPPTYSHLRVFGSLCYPNMQATSKHKLAPRSTACIFLGYPSSHKGYRCLDLSTRRIIISRHVTFDETTFPFAATLDVSSSASLEFLLDDDMVSVPCPTVVAGGTPSSTPMVAPSHSDVEQPPPDVAASHDSPSATPGGRGPVPPPGPGVVPFPQVYVRRSRTTSTSEPAAVPAAPMTSSPPPPPRVTRTMTGAIPRVCYEGLAATTSSSPSPLPTNYRSALADANWRAAMMDEYQALVDNNTWQLVPRPPGANVVTGKWIFRHKFHADGSLARHKARWVVRGFSQRESVDYDETF

SEQ ID NO: 191281 - protein, 104 aa, Zea Mays
MVPALCHLRSAPRLRRLHLRHVSFRSTRGDKSRLPTVVRRRHHPHRLVIGPPTTHYDSVELRVCHDGSWHPPSLPRHRCHALLRWSLPLPATVRGRASSARRHG

SEQ ID NO: 191282 - protein, 112 aa, Zea Mays
MSIYPSRMHDASITLNDTTHLHAHTAWCVHACIYDLKLARTRKPYSTYMIRRSDSLLLAACTAARTPRPTRPCLGRPACVCVRVTLCLPRAAAVQPRRRWGVLLLRRIRRRH

SEQ ID NO: 191283 - protein, 55 aa, Zea Mays
MCIIKYFFIFSFFLLSDAAIYAIETVTVSMSPIGEWSNLGRLFCWLLPCLLPRLY

SEQ ID NO: 191284 - protein, 50 aa, Zea Mays
MYGNIRIKHKPISCSSIHIHVYMRKIMTSKGCNQSNDIEFLNDNPIPHTY

SEQ ID NO: 191285 - protein, 75 aa, Zea Mays
MYAYECNAYVLCLHTSKGMKPHRTAPRATYDAKLYRYGRTIGHDKTSDANESCNVYGMLHLSIHFTSFRYNTNLK

SEQ ID NO: 191286 - protein, 67 aa, Zea Mays
MVYVLTTIMPNDLFHDIRGRKIILEIRMPRNRSKSQKDPRARPTLIRKLGNKEVRNPHSIFPCNTNK

SEQ ID NO: 191287 - protein, 96 aa, Zea Mays
MIYLVVRKYWYMFLLPICVLVCFMLLFLQVMMERISWMYNLSRLDPSYISEVHRFIVVTTNHAWRTKTKHIYCPCMDCKNAVVFDDTEQIISHLVC

SEQ ID NO: 191288 - protein, 75 aa, Zea Mays
MRTFLGERAFGHVSGKILSSSSCLPYRCQHHECFVRHRRFAACCGINPAAACTVFCLYGLQLQPSEQLQVLWLQG

SEQ ID NO: 191289 - protein, 75 aa, Zea Mays
MRHASSGESGSKSRCCLLGAGCSSQEISQKGKEVAPNEGGSSDDRKRSPDWGDSSQIVTIRSLGPFGGTWHDHDS

SEQ ID NO: 191290 - protein, 81 aa, Zea Mays
MSQGCSRRGEQEVNLGEAKIGREMILGKEGQRSCLSPVGLSLLDPQLVPSLLSSVSRRPEPPAAPYPNSHPSAQFVASRIP

SEQ ID NO: 191291 - protein, 51 aa, Zea Mays
MNKTGVRLRLAPNKWSTRRRSRVLRALRRCLAPSSSFLRHSRCPFAGSRRM

SEQ ID NO: 191292 - protein, 76 aa, Zea Mays
MGIEICLWLKYRSPIVLLSSSLSYGHVLFISSGHNLFGSLLVTILTGGVSPCIMSPLPNSFVSREISYWLCLIMVL

SEQ ID NO: 191293 - protein, 98 aa, Zea Mays
MFYTRIRSIFATSSLAFKSSLTLFKLEIVSWQVDNSQESISFLLTSKARDFWTSTKLSCSSYKRSSCFSNNLFLSFKASINSLILSILVLSKPLNKLA

SEQ ID NO: 191294 - protein, 71 aa, Zea Mays
MMMQHLKRRHKKKHRSPRLKNKRSPKESVKTSKKMAISQRLVVHGTVNSICPMCTGLSGGTPGQSAQRGLQ

SEQ ID NO: 191295 - protein, 182 aa, Zea Mays
MLLLCLTLGGGLRVPSLPPPLSLSLSLSLSLCDRGGGGGGDEGTEARQATGQQPTATARRKEGRRRPAVRDERGKGGKRNNNEDGNEKLEVYCTRTGVFLYSCRRAVVASPSHRPVERCVVRLVGWIGPGGGGVQRNGMGVAFDLLTEWASPSPSTYRWSKLLGKKRKELPIEFTHIFPISF

SEQ ID NO: 191296 - protein, 404 aa, Zea Mays
MCSLVAFWGVCGSRGVTSTDSPMFINEQIHKNAQATTVLLASLCRDEYHKVSGLDNAKQIWDTLKISHEGNDVTMLTKMELVEGELGRFAMIRGEEPTQTYNRLKTLVNKIRSYGSTRWTDHDVVRLMLRSFTVLDPHLVNNIRENPRYTKMTPEEILGKFVSGRMMIKEARYVDDALNGQINEPQPLALKATRSKDTLPSKVAQIEAAGLNDEEMALIIKRFKSALKGRKGKPSKTKTKGKRSCFKCGKLGHFIANCSDNDSDQDQGNKREKKKNYKKAKGEAHLGKEWDSDCSSSDSDNEGLAATAFNKSSLFPNERHTCLMAREKKVCTRNSTYASSSEDESSDEDEIDYSCLFKGLDRTKVDKINELIDALNDKNRLLEKQEDLLYEEHDKFVEAQNLMP

SEQ ID NO: 191297 - protein, 52 aa, Zea Mays
MFHLTLALLNAGACCSSRGVGSSSTSTFTLIIMLPRHSHDLIRNFLSKDVCF

SEQ ID NO: 191298 - protein, 61 aa, Zea Mays
MISCFISFHVIPVRHLLVAYRSHLSSYQRLGCVYVCIQSIARVKCKRLLYSRLAFHEWSCD

SEQ ID NO: 191299 - protein, 76 aa, Zea Mays
MLFTDVASSIQLASVPRACPVDPILPLFDLGLGCQLSPIHRARRPLGHDGEKLQMLKRGHGARQHAVTARQQPPSG

SEQ ID NO: 191300 - protein, 68 aa, Zea Mays
MSLDFASNGPQLFPHIHAPKINLWQHFFGILHSTPLKKNSSSNSTTPSKTPKVPHIAPPFETWVHYWS

SEQ ID NO: 191301 - protein, 103 aa, Zea Mays
MRYFKEFKSPRFKSSTLFLFKWGSVPARFLLWRKRRRPVTSLWRTRSSKLISFWMRSGHPSFVDEAPKDQSSKESMWEFARERFACWHQCFLNKLAAKRKPVA

SEQ ID NO: 191302 - protein, 208 aa, Zea Mays
MPRCNSNHPISIQRHSQHLTQSVPSLQSTRFNLPSTAKGSIFYPDADPSGASSSQHLLPYPSAIGQALKSPMAAAMAGVSDPAQRRSNRTKNLSYVTRRTQRTNKRGRTCDRNNDRVCPHHKIFTQRHTTAGNDIKHPPVTHHDPTMRTERQHRRNSKAVVLLSFSRFDFLLWPSAELMGRPDEGMLCLFIYIRARKSVAEKLGQRPN

SEQ ID NO: 191303 - protein, 95 aa, Zea Mays
MLRYEWKEGKVFFASGSKEKFRPQQSGLCTYSRNKIYYKVCTNLHELFHNYTTKVSSEFLQEIILQQLSSFRLGFVRLQLHHSSALSSYEYQRAE

SEQ ID NO: 191304 - protein, 65 aa, Zea Mays
MNSNLRSSRADSFSLSCFFLQDLRRRSMVPTTFVSNRKYASRGEYLSFIRRGYLCFNFFLPFTVF

SEQ ID NO: 191305 - protein, 82 aa, Zea Mays
MPMTFTINHKVDYQGLSSLFSFKSVPSFTFAIILSRSSFSHNFSVHSSCFHIIPSYYTYLRLKAEAPCNILCYNEKHVSHVF

SEQ ID NO: 191306 - protein, 87 aa, Zea Mays
MKHLSKLIVLTRYLNHIELINILKESQSRSEILVDIELSSHNITNTISFPRTTTIGCITLPCINNTCKYHFNVCIGMQCVGHLSSYL

SEQ ID NO: 191307 - protein, 77 aa, Zea Mays
MCIRFVWWYIRTGRSCSPLLGRHAVVPVRPRTVRHRKSDGPRKGQTVRVAARTVRPRPGSPICQTGTAAVLGRPRTV

SEQ ID NO: 191308 - protein, 52 aa, Zea Mays
MCIPSLAFPSREFSVITATSLTTPAPALSSSPKPNVLFAPSMTPFVRSFFRQ

SEQ ID NO: 191309 - protein, 65 aa, Zea Mays
MDKVANKLPGWRAPLLSKTRRLVIVTLVISAIPIHLMIALDLPKWFFKAIDNIKAHIGPYTYLYI

SEQ ID NO: 191310 - protein, 60 aa, Zea Mays
MAHRRRRKAVEEVGGGVQGLCPVAGRERRLKEKAADHISGGVNHALGPVVMSKGVGAREA

SEQ ID NO: 191311 - protein, 62 aa, Zea Mays
MEQNTNPPLNILRRLDSANAHSDHCVFYFEHFLSRELPVLCLCAHLLTCVRGIAVILVLVCV

SEQ ID NO: 191312 - protein, 51 aa, Zea Mays
MTVKVDVLLLSTPLDEQQVPRVSPRKSARDGGRTSPRSSLPLQSILLLLFS

SEQ ID NO: 191313 - protein, 56 aa, Zea Mays
MGSLSLPVIMGFWRLWIMGIKGLEVGLDMGLGFDLEFSLCRMADSTISVHGSFPWS

SEQ ID NO: 191314 - protein, 116 aa, Zea Mays
MLPKVYFRCVDVGKELWAVGCKVKRHLMRRFFFPQNPSGRPPIFPFSWPPTPPFLHPWPPLPLLLAATLHYFLLPLDLPPRSRDREEEEQDGLKRKRGSRRCSTPISCRFSWGNHR

SEQ ID NO: 191315 - protein, 78 aa, Zea Mays
MQEKQIFLGKRKRSRSQYSGGKGWNVGLWPCFMAVTKHMKLRRGPVSTNKLSVDLSCLARKWLAPHSSKCERGILKVK

SEQ ID NO: 191316 - protein, 52 aa, Zea Mays
MEYSHPHDGHQAGRLHLGEEEVGGRLGLRGGTAIFWGRRRGIGVAARVEERK

SEQ ID NO: 191317 - protein, 66 aa, Zea Mays
MKLSNSAAAAWWVMGRGVVRDGLGLCVGAALVISDCYVNMCTKFHRYLNLAWGKEGSSSTFTYTFK

SEQ ID NO: 191318 - protein, 86 aa, Zea Mays
MNKRKGKVIITLTNMNDEKESFVYFYILKIRQYITLLCFCGNYKIFIFPTIVYRFRIIDNSVPILSTVDFRFHFCPDQKNMKTKTI

SEQ ID NO: 191319 - protein, 71 aa, Zea Mays
MSFWLLISTMDGRSNGHHSTIPLRVAYFLKRPWIILESTRHPVDCALCLRNFTQRPLDFPEIEAHSRIVLN

SEQ ID NO: 191320 - protein, 61 aa, Zea Mays
MAPTRLPHNRGRQLSARDAVTPSPPPPLGIDCKHQWRSSVWLGEGAVAAAVLRSSTRSWQT

SEQ ID NO: 191321 - protein, 146 aa, Zea Mays
MKGRYFHDISIVRAGGESTIPLPEADEVVVFKSFMKARLRFPLHKMLVEVLKIFEIYLHQLTPESLIKVGVFICAMRSQGLEPNAKCFCNIHELSYQTKAIGKKQYHNNFGCYSFVPRSDVRYLVPTFRKKWSGSWMKQWFYVKMI

SEQ ID NO: 191322 - protein, 199 aa, Zea Mays
MQELKKKVVEATENFNVEVVKHEIYGIERSRAQKNIDELRAAKEKCYEMVMDCAKILKNSFSKVGAFSSEQKFIRDNPEVIQWINGEVEAFKEILSDRGDFCAFVGACGAVSILEKAGCDHAKVVAQPDFTFSADDVRNPSVEANSLGGKFYSEVWLKGGRDIAYEAIRKNEKESHDALEEAKRAKEAAEWAWLIVISL

SEQ ID NO: 191323 - protein, 82 aa, Zea Mays
MSPRKEDTRYKKWLSADAPVAHRTACAKSSTNDSWAADGPDGTVAHRTKVQRLVANDRLAWLSHQTVWWYIVPAIVSIASNS

SEQ ID NO: 191324 - protein, 88 aa, Zea Mays
MHRGLPGINTMLVFVRRRSLDDHPLSWHSFRFPFSGSSINIILWRSLHAATSCVRLNFGPPYHVINKRTYMICIMHMNAYKQEYHKPK

SEQ ID NO: 191325 - protein, 147 aa, Zea Mays
MSIGDVCPKESEEPPNAQDQPSSSTQASPPTQNEDEAQVDEEEDQSNEPPQDDGNDQGGDANDQDKEDEEQRLPHPRVHQANQRDHPVNTILDDIHKGVTTRSRVAHFCEHYSFVSSIEPHKIEEALQDSDWVVAMQEELNNFTRNE

SEQ ID NO: 191326 - protein, 79 aa, Zea Mays
MARSFDFTAPCIHGGPQLPLTAIVELSAHASVPSLLLSSPSVPVSVAPTRCRLPAWIPLAELPPPSAACPCACAPLPVL

SEQ ID NO: 191327 - protein, 55 aa, Zea Mays
MMHAHSSRLLRPNYFSGASTASFLIVVVAFMAYINSHLATHLFPKASRPRSNLSS

SEQ ID NO: 191328 - protein, 66 aa, Zea Mays
MSSTFYLGRTHVVDMHNAFIIHCIEVFVAILWSDRTGTMSIICFPRRGMMQLHILRGMKAEVMLHL

SEQ ID NO: 191329 - protein, 99 aa, Zea Mays
MSKHLDSNQNLLGKYKTLKASYDKETLLPQPYIISPYIMLTKFLHLINIHVSYSLHSIDCNLADGEYVLIPEQGVAQLVVQEPAPEPAIEDLSAPAFEG

SEQ ID NO: 191330 - protein, 78 aa, Zea Mays
MAKHHKILFIKGYQGRVINFPRKEIHQLFSTQLLSPNASNKVIKILKPQGGGQCTGACLDNTRLVFVRRRPLDDHPLY

SEQ ID NO: 191331 - protein, 85 aa, Zea Mays
MWKDRVEHAKDIWAIYPCQTAHLTVRCMNALYRLQVMRGEAMSHLMALLEATKITLDNREELVVDLSTEMAEKDLQVEQLSNEIQ

SEQ ID NO: 191332 - protein, 96 aa, Zea Mays
MTGRAIYGRRHDRARRASSQPRSRRSGSRWALDPPRATSATRRLRWCARHGAPAPPSPPACSKAPRTSMTQLVCARSCHSRSRCRGSQLPCGAGPN

SEQ ID NO: 191333 - protein, 59 aa, Zea Mays
MIPFLAIHAKGGESMSPKQKDRTTTLICKINDFQLVNFKLVSLCVLKGEQVVFSKLENA

SEQ ID NO: 191334 - protein, 179 aa, Zea Mays
MLRACALQHCSSWDKSLPYAEFSYNNSYQPSLKMSPFEALYGRKCRTPLYWDQTGERQLFGPEIIQEAEEQVQQIRENLRTAQSRKKSYADTRRRLFEFKEGDYVYLKVSPLRGMRRFKVKGKLSPRFIGPFFILKRVGEVAYQLELSDHLADVHDVFHVSQLKKCLRVPEEQITNGGP

SEQ ID NO: 191335 - protein, 68 aa, Zea Mays
MLSSWRMYEMHLALFLKAGCDTGGVPGTLALPSEAAPLLGVPSLSSPCSGGTSQRTNPTALRSGQNSL

SEQ ID NO: 191336 - protein, 62 aa, Zea Mays
MCTHPCFTTKHQVVHIATTAQEKMKPWKETSRSSKTTTSSRCGLAATPSQLPVKALSLLRFA

SEQ ID NO: 191337 - protein, 58 aa, Zea Mays
MMLFAYNSLVFYAFYFALFYIILRVQSRRLNLRNCIMLTFVRSSLNPGGNNASADEGH

SEQ ID NO: 191338 - protein, 80 aa, Zea Mays
MEVCRCRKVLGSDCLLFSDERFIYRFRPGNCSGFSPLVELCKGLAVYPRLLTLIVFKGPINLRRQREYVLWVKMCNLCRV

SEQ ID NO: 191339 - protein, 58 aa, Zea Mays
MSVSEYRDKFIQLSRYAPEEVAEDERKQKQFLEGLIGPLQYQLMFHSFPSFQRFCIRL

SEQ ID NO: 191340 - protein, 56 aa, Zea Mays
MNKQCRSCSLEEKPADVMTEMNLSNQARRACFRPYNTRRRRQTCPEVVTGHNIEIQ

SEQ ID NO: 191341 - protein, 99 aa, Zea Mays
MQCVGTLSSYLWGYKTTSSANITSMNAYECNAYVLCLHTSKGMKPHRTPSRATYDAKLYRYGRTLGHDKTSYANESCNVYGMLHLSINFTSFRYNTNLK

SEQ ID NO: 191342 - protein, 145 aa, Zea Mays
MAAAPHASLSARTVSRAELLLSSFSAAPELPPILLLGHASSPVCSRSSLDARPWSQHRARRAPWNSLHRAQSLLQPRLGVSPARISLASACPSLCLPRPAERSCALRFPPLDPSPKLCSSRPAPASIPARLCPHPSFLYAQRAPS

SEQ ID NO: 191343 - protein, 60 aa, Zea Mays
MLCPKSLDFGRHSCREGPRRCTVGEVSHLQNTRKAAASASRGKKEKRKKKKKKESLAQRT

SEQ ID NO: 191344 - protein, 145 aa, Zea Mays
MTSLTCAQNKEDMGSGRGWKQAAAGEGLCHENRGISRGGSTTSCEEASHGEGESCARSGEEGHMVEQSTMAITWRSWEHVVQWDVPCYSSTDRGTKKGLGCEEEECLHLGRRVKGVEVRANDGGRQPRREQEGVLPCWLEEGRCW

SEQ ID NO: 191345 - protein, 66 aa, Zea Mays
MALDGYARVPGNLTRLSRVQQLELIIPRISHIHVYYSNHIRYTHFGDKSRRLYKIFFSFLKLKVIT

SEQ ID NO: 191346 - protein, 52 aa, Zea Mays
MAATHHFFLLPRSPPSPTQQGSRRGGARWIEEEERIKEMFYPHLLQIFLGKP

SEQ ID NO: 191347 - protein, 135 aa, Zea Mays
MAPPPPSAQTFLSSAPPPGIAAAPPPSASCAQEQKLHGRRAPFHGRASLPSGALKHLLATSPSQGRSLGPPMAPSSLVSLAQGSHGRAPLEQALPAAMAPSLGCSSLFLPRELAQGTTPSLPLAPPSGRAAGSST

SEQ ID NO: 191348 - protein, 138 aa, Zea Mays
MAPPPPSAQTFLSSAPPPGIAAAPPPSASCAQEQKLHGRRAPFHGRASLPSGALKHLLATSPSQRRTLGPPMAPSSLVSLAQGSHGRAPLEQALPAAMAPSLGCSSLFLPRELAQGTTPSLPLAPPSGRAAGSSTPLC

SEQ ID NO: 191349 - protein, 53 aa, Zea Mays
MSLHIYLMSANVCKCKDDLCLHTSKDMKSHRTPPRATYDAKNVLVRSDHKITR

SEQ ID NO: 191350 - protein, 79 aa, Zea Mays
MVWHAGAIAEQRGSTACRGAGRTRRTDGVAAVSHDRTRGGQPPSRAARRGLNDSREMDSRRWSLTAAMEGLGRVKQSRG

SEQ ID NO: 191351 - protein, 94 aa, Zea Mays
MEGEMDAVNSINAENRSRGIAWMLERRGCSSSGLGAGLGDLGALAARQRGLGRHRVLGSGLGSERSHGTGRGAGAQGAGEEKQGTTINEIELGG

SEQ ID NO: 191352 - protein, 136 aa, Zea Mays
MKGILTFLAPFIFDSFLQQFSHWLGNPGEIQNKPSIIPCQPQKTTDLPYSGRRFPIHHFLDFLRINRYPILRNGVAQELDFPQPEFTFGQFSIQLMVARSLKYGMQMLSVLGFIPGINQNVINEDYHKLVQLWHKD

SEQ ID NO: 191353 - protein, 78 aa, Zea Mays
MTRVWARGRPRARGGARALGAFPSAYPCRTRGGLVLPVFKGLFIALACRSQQKSCVRSLLCTISYLFHVSSKRRYGRG

SEQ ID NO: 191354 - protein, 305 aa, Zea Mays
MGDQPPHRSSQHPTVFQLPLQGTISLRSSSSAREMGTSASLVALWASMPRIAQEISRGRCQHQIKTREESRRCKSDNGSSTSLLWRELPKGAPIMTGIFSVYNQPTLILFDSGASHSFISQNFSAKCQLPFYHTKGSFMIATPGDKIATNQLNQSVPIQLGSHIIKTTLLVLGLENVDIILGANWMTRHQVVLDVASRIVEINSPICGSFTLFLPSQDSTQSCAFAMMELPLKKVLVVCDYANVFPDELPGMPPDWDIKFAIELQPGTTPISKRPYRMPPAELAELKKQLQELLDKGFIRPSTCL

SEQ ID NO: 191355 - protein, 50 aa, Zea Mays
MVAILHCFLPQDLPLRSKDREKEGHVELKRKRGSRRRSSPSPLEDFLGKP

SEQ ID NO: 191356 - protein, 79 aa, Zea Mays
MCLGFGSRFVQRLKKVFNSVEASSEKFTPSAENISSTFEHIEGEVEALAEVIAGHGDFCALLASRGTAATFLKAGCMHA

SEQ ID NO: 191357 - protein, 109 aa, Zea Mays
MGHGRPLGLPVSSSLETPCLAPSKGNMALSPLLLAERRRRGVCKKVESVLDRPLTLCRGSGAALANPAPAKPLTMSTYQLENLGPDRTPGLRPARMREQPDRPRHHETH

SEQ ID NO: 191358 - protein, 81 aa, Zea Mays
MVIPSDLAHSDGLPSGDSVCNLKDLHWLHNVGQVLLDFKTFHWQLLFWHTQALLQLRHMKDIMHRRQILWWTELIGHFSTP

SEQ ID NO: 191359 - protein, 107 aa, Zea Mays
MIAASRLGSTDLALTILHLLTLPLCHDCSINQVLKCREGVIHQLVLQRVNQASQETVLPLGVSVDIFRSIARQLQKLVSFSLTDNGPCLRARNSSFFTVIRPARTWY

SEQ ID NO: 191360 - protein, 109 aa, Zea Mays
MGRATHPSGSWSAEKSVSWLKLSSPPPSFGSPPAATLEAGAPPREAQGSSSSQTLSPVGARKKSPTAPAPVVDAPAPHAGGGAVSPSGWTVRPRDGEADAQQGGRVRRG

SEQ ID NO: 191361 - protein, 104 aa, Zea Mays
MSSQREQYGDTVHLYIGTGRSPCKITLIPFTFINNSMIILRGLIWFFIFKSVSFCAAIPKLFYTQLRLCANLRVLCASSYRGSDPSPKIPVNVLYSRNIVKSCF

SEQ ID NO: 191362 - protein, 83 aa, Zea Mays
MEWISHEVEAFEEILNSRGDICAFSGARGIAAVLERKGCEHVKSLAQSEATLSSEDIKNPSPEASMVGGKFFTNIWDNGGREL

SEQ ID NO: 191363 - protein, 98 aa, Zea Mays
MSKQTRVEIKIKNYEYLQDKSICVCVAPPKYVHEFCDININLICQFATYLERVNNQHHTQNNEGFNTIIECDDRKSKITHTNSLLQSIRYEKLLLLLQ

SEQ ID NO: 191364 - protein, 80 aa, Zea Mays
MSCWCISRWLLASSSSSCTSWSWISRISMVLSQIFTCYSRVAMRWLSCSTYRPFSTNSEDKLTTKSSRVTPGFKGQSRVH

SEQ ID NO: 191365 - protein, 51 aa, Zea Mays
MELCYNASEELTPDVPDFAPNTVKNLFCALQRTPLTGHEVAITTAMTSPAL

SEQ ID NO: 191366 - protein, 64 aa, Zea Mays
MFGVMLFYVLVVYFYVLLRVAVRSRESEDQLGTWNLKSKVSCAIDHFSLPNNVPINHCEILRLI

SEQ ID NO: 191367 - protein, 58 aa, Zea Mays
MMLLGKRQCGTGSGKHTSCRGMMGRETQCVQDVKARRRFTATASPNHIPCESILYKTR

SEQ ID NO: 191368 - protein, 75 aa, Zea Mays
MTRRRRRTRRTAARRSGGRPSGWPRTARRTARKRRRTRRTEAADAQTDGEGEGRDGGWRADRTGEGRDGGRAGKP

SEQ ID NO: 191369 - protein, 171 aa, Zea Mays
MCGGMKGLCPVGGRERRLKEKAADHVGGGANHALGPAVLSRGVGTRETQLDAVSEEERAGCVVVELATIVALQGTNRAPKLGGYPGEEVSEGGKRVGLQPKGESPKEMGVVIQNDQVVFVAGEAKDRRCPEITVDKIKGLNSPGRGSGKGKTGVTAELTSMTEALRRAPSV

SEQ ID NO: 191370 - protein, 64 aa, Zea Mays
MQVLLTQGSVIEPIVVVRGNEMVLVILGLLSSISTSISDLNCDSFKMLINSICGLNILSKQFAC

SEQ ID NO: 191371 - protein, 90 aa, Zea Mays
MRRFFFPQNPSGRPPYFSLFLAATPPPFPHPWPPLPLPLAATLHYFLLPLYLPPRSKDREEEEQDGLKRKRGSRRCSTPISCRFSWGNPR

SEQ ID NO: 191372 - protein, 59 aa, Zea Mays
MVRPYRYNLASYVARGGVRCGFIPLKVRRQRTYALHLYAFIEVILADDVVLYSQRYEGR

SEQ ID NO: 191373 - protein, 67 aa, Zea Mays
MNPQRTRCSTKARMKKSKRDLEMKHKNRSSQTHSNISLQRFEMEEARDVCERAGGVPQVRNGVWVVL

SEQ ID NO: 191374 - protein, 240 aa, Zea Mays
MRKQKTTSPRQGSSVRSELELRERVAGEKSRGCVAAKRAASRHATTTARELRAGTMGKLHGGSRGLDRAKGKAAGRQRTEQISATARRELRELEQAIPRHGRELRAMERARAGASSMRIWPSSAMRAIHGEQRSAQKIERGGRREEQGHAARGAGRRRRALCGGREICREIGRPSWALEKWRGWARRKLKLAGNPALGASSRGSTSDQAPGRRGAEAGRGTRERRPRHGGSIGSRARARA

SEQ ID NO: 191375 - protein, 76 aa, Zea Mays
MVSLSEFQIHSLLLPSTSSPKRFSPGKHSRHALCPCRAREDVVELSSFVSTPWVQQCCRSLHGTRRRPYLPDPGVG

SEQ ID NO: 191376 - protein, 97 aa, Zea Mays
MIRTTTNMLCCLLFQASLPASYWAEALHTATHLLNCLPSKAVRHPTPHFALYGTAPSYDHLRVFGCACYPNTSATAPHKLSPRSTRCLFLGYSPDHK

SEQ ID NO: 191377 - protein, 83 aa, Zea Mays
MSIHRWWSCHSNIHELLAPVTSSLSGRHHAISNSRATALESYQLSVPSAPLCSQAPNTPTRASDYPLESPNSRLPPNRSRAPY

SEQ ID NO: 191378 - protein, 82 aa, Zea Mays
MTCTSHHPSCILKLCRDLMVRPYRYIFSIVCCPRRGTMRLHILRGMKAEVILAFADICTHEEYMKCDITMLLLWFLPARCGN

SEQ ID NO: 191379 - protein, 74 aa, Zea Mays
MAAPLHGFLLPLDLPPRSKDREEEEHVELKGKRGSRRCSSPSLLQEFLGETLGMDEILVPPCNYILLEVLDHGN

SEQ ID NO: 191380 - protein, 136 aa, Zea Mays
MLSRSHMWCRFFSPEKKTLVVAFFPFCPYFAVTPSPPPPLPHLAAPPSFPLGLAVLSSLGSPSPRLPPPSRSPPPPPPRSKDREEEEHVELKGKRGSRRCSSPSLLEEFLGETLGMDEILVPPCNYMLLEVLDHGN

SEQ ID NO: 191381 - protein, 56 aa, Zea Mays
MYLIHCIRIDCNLADREYVLIPEQGVAQEGVQEPAPEPAIEDLSAPAFEGKPRFYA

SEQ ID NO: 191382 - protein, 72 aa, Zea Mays
MCHVTIQKQKEIAEAAAQQNQSKQVLHTTSYHSPYIPEYVGNHPAASVALSSQPQASWPQPPPPPPLQPAYS

SEQ ID NO: 191383 - protein, 62 aa, Zea Mays
MARVRSTARVEREGGEAEGSETVPISEAMQRSGLVTSEAIRTAETEQTVAETEEVVAEAEEG

SEQ ID NO: 191384 - protein, 386 aa, Zea Mays
MSNEILGNYSKKEDQLMTAAFGTRPKRRLNRVLDAIGFEYADYGRLGGDAGGPKRKRIASTTDEEVIKAAKKKKKDSDNISAEELNTEPKVATTKKRKSASPEPETPVQEEETPASPSAVEVEEIMKVMTEPLPFRLSPLALELTKFFQKDKAASAIESPAKPKKRRIIQVTDVIHQTPPPATVSKTVFAETAEAEATEMKTAEAESGEAETTGAEARATEESNLKTTLEVIDNILLKMAEEEATVATMNTATEKGNEQIDEISEEEDFNFQDLLGQELTDAEKEELRKYAISCGYKSGAMLFGGVNEGKLRCLRNRTEAKIVRTLSKSIGLPKLEADLCRYQRHHIAGSLLYANFKVTNIFVILLLLLLTSVLCSDEDHFDRAYC

SEQ ID NO: 191385 - protein, 91 aa, Zea Mays
MSTISNITCSVLVLLMNPKATDIEILPSATIYLPPKPQRGCVASRILSSGSCICLKALANMISAALPVSTKTLWTRNPLITQEITIASLCG

SEQ ID NO: 191386 - protein, 108 aa, Zea Mays
MSSARLDWFLRSPTVPTPSIRLGNLRPGPRRRWQRVGGAAAHPYALSLSLSLYSICAAQAHAMKASVVERIYLGAGMTSYTRGEAGGPNNHSRRPRISARLRHAWRVR

SEQ ID NO: 191387 - protein, 174 aa, Zea Mays
MSSSSSFAANTPLGESLSEDTFSDLAVMELHPGHTVEFGVSRISSVRVQDMQQLGYFGNGVGRVPGAEEIPEPEGEIVVFEAFFTAGLRLPAHHFVAEVLQRYDVQIHQLTPNVVVALAKYVWAVTSYGGQPTIEVFAKNYCLHWQKRKIGSKIAQFGSCTFTLRTGKTSTEVV

SEQ ID NO: 191388 - protein, 93 aa, Zea Mays
MLTEEGDEVAGGRWPPVAGVRRNIARSRGGRRETESSRAGGNERGLWLGRAGGRFLKREMGTPDSLQCLSGAHRTAHSSCPVNHRTAHRKIGF

SEQ ID NO: 191389 - protein, 60 aa, Zea Mays
MGFLLLEKNFFFLESNLMPSLFSFFNILVVFLTIKAMFASRSSSLEDSSSTCIFAFSFLS

SEQ ID NO: 191390 - protein, 63 aa, Zea Mays
MRCTMHMYEHKYNEYNIDNLLKRIKHLKPSIKHYGYHSRASTTSINQIDMITLEYLFLFLAFY

SEQ ID NO: 191391 - protein, 91 aa, Zea Mays
MDELEEVLSRGNSRLGKQWPRKSAMGWNWGSRLEMELGRMAAMGREHGRARPEQRDESTGASAASRGGRGGQGRAAGARRGGTQGERSRVR

SEQ ID NO: 191392 - protein, 113 aa, Zea Mays
MLENIFFSFPQQRAATEKHCSLDSRSSSKFLRTLSCSTSAISRFALSHSKFSLTSSSFFLILVLRTYVILHGPIVQILNQQYASNQLSFLLVLKLLSSLWKKFPIQPGFPSTC

SEQ ID NO: 191393 - protein, 95 aa, Zea Mays
MAHKGKATSDVTYNPDDGPEAYTTPPSTTAFMTTPPWRRRSLAQNTIRAPSRSTPMSSEGRRRQETWAVLDCRRGNRLVVHSHSLRCEQGAWAQV

SEQ ID NO: 191394 - protein, 86 aa, Zea Mays
MTNTNNEQIIKIIGPRLSAMHTRSFMYFVSHFSTSRSRACNGLRCGVEGGEMPSKLANPAAGKEMRFPVATIFHYTTEFFSSRWIY

SEQ ID NO: 191395 - protein, 94 aa, Zea Mays
MMSPARGKPGCGRRTLIRRRRRMVVVTGARRPRVTRNGSLTWVERRENVTGAGWSGVTENGSLTRIGRRRSRGIVGVIKLLGIILRSNEWHTKF

SEQ ID NO: 191396 - protein, 148 aa, Zea Mays
MLRRWLIRRSRASRPCGSPLCTSSWVAGINLVWYIAGVFDRLLEASLVDHFDHIHNKGCMTTLEWRPGSTKDVFPNHIKHIYASKTVRIKEKKENPTLPKDIDLISTLRENGHPRQGVKVTIVPMHVGNYPKLPLLRNMNKFSFFPHG

SEQ ID NO: 191397 - protein, 52 aa, Zea Mays
MIEDSHHDDDDPSGNDWHLGRRGLRGGAARVWWLQEWREEEMGRGAAAKGER

SEQ ID NO: 191398 - protein, 90 aa, Zea Mays
MGTEGPASALAWAVSASATFFVGAGVKAFVVSMIASSMLAILLLLGVVTGAFITFGNSTSAGGLRIFGIITVFPILALWSYHLWLRLARL

SEQ ID NO: 191399 - protein, 57 aa, Zea Mays
MIELWNLNSICHMHCLGFVINFVLLLLLWFGIYLHLVTTNKILTNLLKAMLSFNPCH

SEQ ID NO: 191400 - protein, 54 aa, Zea Mays
MRQEDNIYNNRVYRDKCHKTSEYYYIAEVLLQNKRINIKRTKDHRRQCQLRNAT

SEQ ID NO: 191401 - protein, 122 aa, Zea Mays
MHLRQPSRMFWMKPDLDSGTAVPPAALLPEVVCVQAVLDQRHKECVRGQRHGGHGIPPSNLPSEFSWRRCCPILSLVSSPWRGSRRGTGASMQGGQEVSSTATVITQSGSTVWLPADRILGS

SEQ ID NO: 191402 - protein, 99 aa, Zea Mays
MHLRQPPCMFWMKPDLDSGTAVPPAALLPEVVCVQAVLDQRHKECVRGQRHGGHGIPPSNLPGEFSWRRCCPILSLSRLISMARLSAWHRGVDARRSRG

SEQ ID NO: 191403 - protein, 59 aa, Zea Mays
MIYMVRKLIKSAFQRIQLHLIWRFLEEVIIKILKATQKSNSHTEISSAQLSKRLLHIST

SEQ ID NO: 191404 - protein, 228 aa, Zea Mays
MEASKRAIYIKKIHEKTKEAIELKAVRKAASMNKHRKKVLFEPGDLVWIHLRKERFPEQRKSKLMLRGDCPFYILAKINDNAYKIDLPPSYGVSNTFNVADLLPYTSKDTSESRTGEEDDMTTPSNMLQPPSHTTSTQVQPTSSPTQVFDGPITHSRAKKLQQEVHALLYEFQLNTNENFMLPKSCMLILLRFTKEEGQNISRANQQEEPCPSQSSSTEPSRRNSHIF

SEQ ID NO: 191405 - protein, 95 aa, Zea Mays
MAQRSGAQHQQQLHVLWTNSKRPRGKVVHQERVDRSGQKHETNGGDPRLQRQSFSPRRRSDGWSACSHQHRLSCRDRRSPRTRRDKPRAPARSRP

SEQ ID NO: 191406 - protein, 115 aa, Zea Mays
MFGHYLHKTKHGTSPMIHGDEEAVHASTGSVVLATPEVVAPTPSVTVPSTLEMAESPPVAGRPMAPIPGLAAILGVVELSKCLEVPTSTQHRSTVAATLELVLATVPILVPASHF

SEQ ID NO: 191407 - protein, 84 aa, Zea Mays
MSYIKVILGEALKRSQFILCLSDKFTNISQAIKEQLQRQIRLKAYLGLRSCGSRRCIAAKPRWCLDIRSGSTKRLSLPSSAPPR

SEQ ID NO: 191408 - protein, 64 aa, Zea Mays
MKAEYMLLQYFFLKNYTESKSNKSTGEKKLCKNGLVDFGKLNNFHVWRIPSFRGKVGVKSLIQF

SEQ ID NO: 191409 - protein, 57 aa, Zea Mays
MVKRKKKRKPCAWAATAHFRPTLTSHLRGPGHHFRCLAPPHDPVSPRIGTHQSAVAL

SEQ ID NO: 191410 - protein, 69 aa, Zea Mays
MHSFASTINIARDTSATALLHAANSSASNASELISYLDCDTVNQLTDDFNILHGWHQHKLTYPVLSIVA

SEQ ID NO: 191411 - protein, 62 aa, Zea Mays
MVRSGIRTHFFNWDTWNRLCTCHTRVSRHQDPGANIITRCARTKSHIYDESWHMIECHIFTI

SEQ ID NO: 191412 - protein, 72 aa, Zea Mays
MAKDGKRKNVKSRSSTKYETSNDEDNASNEEDNLRILFANLNMQQKEKLNELISDIHEKDDLLDTQEDFLIK

SEQ ID NO: 191413 - protein, 57 aa, Zea Mays
MKPHRTPPRATYDAKLYRYGRTIGHDQTSDANESCNAYGMLHLSIHFTSFRYKTNLK

SEQ ID NO: 191414 - protein, 62 aa, Zea Mays
MSANETRPNHKPHKTDAVWQSTTKASCFLAPCRLAGSICFLSSCHKTSMQVHGNKQMRSFSA

SEQ ID NO: 191415 - protein, 112 aa, Zea Mays
MQCVSPLPSYLLEYKTTPSTNTTSMNAYECNAYVLCLHTSKGMKPHRTPSRATYDAKLYRYGRTIGHDKTSDASESCNVYGMLHLSIYFTSFTYNTTSNNTSFTFRYNTNLK

SEQ ID NO: 191416 - protein, 66 aa, Zea Mays
MTLVFILLLTLYCYSKHCAMMSHVGTMLRRRRSCRKKQLSAEAVRMRWPKVPLHEASVLQTDLKVE

SEQ ID NO: 191417 - protein, 94 aa, Zea Mays
MSTKQKDSIFGIIFTHLFMTKREESNARALMVPFLAIHAKGGENMSPKQKDRTHHHQFQKLSVSKSIFQLVSHCVQKGEKAVFQKLYIKNPLEH

SEQ ID NO: 191418 - protein, 82 aa, Zea Mays
MDDGCHRRRGRPAKGEKRGWRPRGGVKGKKRGGHLGFLWEKETTPQMTSIFASNGPQPFTSSTHQRLTFGQHFFWDITLYPP

SEQ ID NO: 191419 - protein, 68 aa, Zea Mays
MWGMPPYPFGMPQYPAWGAPQTSVFNRLTPPVQDRLRAPQSGPRAQAQRDCRTIRPQRLTNPVGGHTA

SEQ ID NO: 191420 - protein, 58 aa, Zea Mays
MEPARSVLPSLRPAGARSVPLFLRVLPQRSLFSSSPSRCRARETARSRYRVRDARNCS

SEQ ID NO: 191421 - protein, 69 aa, Zea Mays
MATQEAASCRLSHQSESTTPALPRGTCRTLPSHLRRRRVSLPRDVSAPSGLMTPAPSQRTCWALPSYLR

SEQ ID NO: 191422 - protein, 116 aa, Zea Mays
MTPVALSPLRQQGDVSRVLAALQGVLLQDSGAPPAATPSHVQGPSSPPTATLACTHGLGTPLPDTLAHSYAPRCTTGLSPCLYKREVQGHPNGGSREGSSGRALCPPLSLPHATRL

SEQ ID NO: 191423 - protein, 67 aa, Zea Mays
MMRTMLGEFKTPERFWSEAVNTACHTINRVYLHRLLNKTSYELLTGNKPNVSYFRVFGSKCYILVKK

SEQ ID NO: 191424 - protein, 73 aa, Zea Mays
MVARSGGRGGRRAGWPRRVPPRRRQWRPPPRHGRVAPLSWNGTSTRLPSCRAATASPSSSVRTQSWWRMINDG

SEQ ID NO: 191425 - protein, 92 aa, Zea Mays
MNFVSISQILDMCPSSMDFINEKSIVVQGNMRWHPSISNYIDFYNILDILISITFWYIHGHGERLRACKILTTIVLANKKIGNKCKFPSQSN

SEQ ID NO: 191426 - protein, 57 aa, Zea Mays
MKLKACHSCNQHSNFTPSNLDAAIHQHQCLKTTLFYEGVICTKHNPYQLQPLILIKW

SEQ ID NO: 191427 - protein, 57 aa, Zea Mays
MRLLMGKEEQTVEREKYEPMSIRRWRRRVRGVTDEAALSPQRCRHVNPSHFFSSCVS

SEQ ID NO: 191428 - protein, 114 aa, Zea Mays
MVVFKFVLHHYPLDQEALHQQQLQVHLPPWLASFGVDELLQELDDLRLMGLLEWRIYHPPPLRPHQRPHLSSTRFLLHHPFLVVSLHLLQASLWPHKVVLHFLQYHWKHALASH

SEQ ID NO: 191429 - protein, 67 aa, Zea Mays
MPVGSHRCLRGLDVLHPKPLEKILSVLRSGDESAVLELLHLESKKVCQLAHHRPFEFLHHHPAKLLT

SEQ ID NO: 191430 - protein, 63 aa, Zea Mays
MSSVREPLLPTLDHGLGNSSHEPSAVGTSKPQLFPLASTHIPNLCSKHRNTPKRACAHQARLG

SEQ ID NO: 191431 - protein, 60 aa, Zea Mays
MFGPRRSQKTYAHYKINCSCRVRHQWGSSSTLGVDSTFGGIRPGLGRQHGWRISTLKEPV

SEQ ID NO: 191432 - protein, 290 aa, Zea Mays
MTPEGPTQIALAEFRVIAEHIGTRDLVQEFLAFKMFPTMKEWAMPKLEGKKKEGELVRLPYHYKFKRHFKVPCQEWLDTIEVMCNEILGNYSKKEDQLMTAAFGTRPKRRLNRVMDAIGFEYPDYERLDKGAEGQKRKRVASALNKDDEDQPKKKKQQSEAKTVAPKKRKASIPKQKSIDEKERTSVTSSATEIEEILKIMTETLPVKLSPLGLHLTKLFQKENKPIKTKAPRPKRQRIVTVTEVIEATPPGASAPKVPAIESMTATEAVPLEAAAEEAKAEDTKSEDIN

SEQ ID NO: 191433 - protein, 55 aa, Zea Mays
MFVCIATSSSEVTSHLKTKLVKYLGILSLSQVVALITPFYLIMFVVNHCDRLRLI

SEQ ID NO: 191434 - protein, 123 aa, Zea Mays
MIGNPRMFTSLDENVDLHDKITFGDNSKGKVQGLGKVAISNDLSISNVLLVAPLSFNLLSVGQLCDLGLQCLFTPTEVIVSKMDDESMVFKGFRYNNLYLVDFTFEDADLRTCLFIKASLGWL

SEQ ID NO: 191435 - protein, 61 aa, Zea Mays
MSFFKILLLHIFIFLLLFFSYTNFGLYTLGTRLSGAHRTVQCTLYQWGQPGPGKRVPCAEI

SEQ ID NO: 191436 - protein, 56 aa, Zea Mays
MGSLFLPIIMCFWRLWIMMIEGLEVGLDVGLGFDLEFNFCRMADSTVSVYASFPWP

SEQ ID NO: 191437 - protein, 50 aa, Zea Mays
MLAFGNQGKAHQSSRTHFAEKLTRSGSLRPSFISQVSLLPESSSLNLAVS

SEQ ID NO: 191438 - protein, 62 aa, Zea Mays
MFYDIYLYTLCYCICCLLGACMRCTRLCSLKPGVTEVVLEEMLTVGRNLDRNGQNTYLLISL

SEQ ID NO: 191439 - protein, 55 aa, Zea Mays
MRARAGWAGNRPSRGRGRSFSFSFSFSNYNPFLLLFFLFCFFLILFLWRPKIFSK

SEQ ID NO: 191440 - protein, 52 aa, Zea Mays
MFHLTLALLNAGACCSSREVGSSNTSTFTLIITLLRRSHDLIRSFLSKDVCF

SEQ ID NO: 191441 - protein, 54 aa, Zea Mays
MNPEAASLSSAAPSLLALNRKLAQRSKDPAFDFFLSLSSSLSNPPSPVSASKLK

SEQ ID NO: 191442 - protein, 61 aa, Zea Mays
MQKKMPIDFTSQLYADSAWTGPGATHERLLFPARVRSSIARFGFGAANARARMELGTNLSG

SEQ ID NO: 191443 - protein, 53 aa, Zea Mays
MFTGTHTKVNRFHRLKIGLVHTQVHKRSFSSHKFIGFRDAHMSSPSPIQVSQI

SEQ ID NO: 191444 - protein, 119 aa, Zea Mays
MRQRRWLELIKDYDLEVHYHPGKANVVADALSRKAQCNCMNMDARVTTLCDELCKLNLEVVPSGELSYISVEPTLQEQIVQAQIGDKGVQVIKDMLKQKAEKYQCFRQDSKGILWFGDR

SEQ ID NO: 191445 - protein, 64 aa, Zea Mays
MTHETMTRSCLERAGEVGGRTKDDGFDDLTVNASTHETRWTTNTQRRTSTSAVSRARLPEKHGA

SEQ ID NO: 191446 - protein, 118 aa, Zea Mays
MRSLFLVSPQNQIQHNTCTSTIQRSCPWIELILQSPGRRAVVVEISWSRCFRCPTHQKNILASLPGDCVMVHAYHLSLVQADSQAVHEMIHGIQAPLRSTHRYVQFQTAVCDVRSRER

SEQ ID NO: 191447 - protein, 64 aa, Zea Mays
MKLTQFEWIKLELQCQSYGLNKFYELIDVNFISGIASRGFSANARGLYAIPYYCRDDGFNCRKG

SEQ ID NO: 191448 - protein, 60 aa, Zea Mays
MVGQCHTRFLEGKPNANHVRARISYSRTQQLHNMDIITQCSNSIKRGNNSRLHHTSETSI

SEQ ID NO: 191449 - protein, 74 aa, Zea Mays
MGHNGSDDTCLHQSDAQGLQPCRTRRVRSLGRRSLTVDSSKRGNKSRSNRKPKRRRTSTSKETYICIRTLHHTR

SEQ ID NO: 191450 - protein, 159 aa, Zea Mays
MWLASPSSVLSFPHACTHYRGGPAIIDWLHGRGGLDQLGTGLVRAGQGHAGPTRRGHARGLGAGHRQLTGEPTERLGAARDCWPRWPRAAGRRAKELGRGLSCAGAGHQWDSAGDRTRDARERPSHRASHGQHRPMETQGQAHELLLPRARRGSARGTR

SEQ ID NO: 191451 - protein, 74 aa, Zea Mays
MSFFSTFLSVLIPTCASFLCHIHPSDALIKRQVLKFAFSEVKSTKYRLLYLNPLNTIDSSSIFDTTTSVGVNKH

SEQ ID NO: 191452 - protein, 87 aa, Zea Mays
MKHLSKLIVLTRYLNHIELINILKESQSRSEILVDIELSSHNITNTISFPRTTTIGCITLPCINNTCKYHFDVCIGMQCVGPLSSYL

SEQ ID NO: 191453 - protein, 52 aa, Zea Mays
MDKGCTQPLSSDPMINLNTTVFYFQVLFPFARNLHKLEPRALTMLITQKAQK

SEQ ID NO: 191454 - protein, 102 aa, Zea Mays
MHRNAMCRYSIFIPWGYKTTSSANITSMNAYECNAYVLCLHTSKGMKPHRTSPRATYDAKLYRYGRTIGHDKTSDANESCNVYGMLHLSINFTSFRYNTNLK

SEQ ID NO: 191455 - protein, 110 aa, Zea Mays
MKNWHEQKLSNLPFCRKLNSRSKPNPTSNPTSNPLIPMIHNLQKHIITGRNKDLIHTLGFHQEILQEEMGKNISLILSSPSIQRAPPLLDPCCAGEDLEGGGSRGEGLPW

SEQ ID NO: 191456 - protein, 102 aa, Zea Mays
MKRRKKINQKRIKRKKRESQTPFSAHLGIDPARPRHQPLSFSRSLHWQAGPPRQSPLHLNAVSPSRVTHLPAHVAAPPGASESVASALYLSAFTNRRSNDLA

SEQ ID NO: 191457 - protein, 83 aa, Zea Mays
MSKEFEMSMIGELTYFLDFQVKQMKDGNFLSQEKYTKDLLKRFNMEKCKPIKTPMPTNGHLDLDEGGNSVNQTLYRSMIGSLL

SEQ ID NO: 191458 - protein, 386 aa, Zea Mays
MSAQIALRVHRLLDLPAFLLAAGADSEVHLTYLPGLLTLLTTSGRYVEDWVRVFYVSVWIDPDHHWMRFRFEREDVTITATQIRQLFGFHESSTRLHSLCYGTSDPPRRPHGGVAPGTAHVAALFRPPFSDGSRRSLVDFTTAAKFLFQLMIQTLLPRMGYREATTHIQLWLLGALVSHSEFDVVDFLICEIEDTVLDGMCARRQLPYAHYLCHIFAQLIRPPQFQGTLEASRLVFGSYHPAPEAPVPASAPVFYTQVEDAALHQFEAQDAAIDDDDDDDDFGIPPPPLPPMPPRSHDHEAGSSSATPAAPPAIDPALASILQTLTQQQAHLAAEQTRQAAAHQQLSERMLSMFQTIQDRHDSLQQQLLQDRAKSRAFMTLMLQRS

SEQ ID NO: 191459 - protein, 58 aa, Zea Mays
MKYLKQTLGYKGKHKKDESMRDFKEMSILIPRDKKMSKDSDLTIEEERVSKDRKIMDI

SEQ ID NO: 191460 - protein, 76 aa, Zea Mays
MMYMLNLVELWSLIIFLEKGSYLKVFPIVLKITKNSTATELPAPMASVSFLTPIYSHIPLFMKLLEKVLIAIPYQT

SEQ ID NO: 191461 - protein, 104 aa, Zea Mays
MIPLCLASQSIPRITSIPWDGKMVKSARNTTPLKRILTWEHLSLHRRSDPGVRVTKGIARGVEGMPCFSTNLVAIKEWDAPESKSTVAGVNSTRNSPSTTPGAC

SEQ ID NO: 191462 - protein, 96 aa, Zea Mays
MGVFPRSSSQSPIPRTTSITGITSTLHRRPTQSTERAVTREADGDVQPVLRSSELTFATVNDSSWCYKAVVGVGSEGRHERVFPPLIQRSQGIGRR

SEQ ID NO: 191463 - protein, 54 aa, Zea Mays
MRKVVYYETDSSSPSTSGSDATSVTSKRQERKKYSKIPLHYPRISKHAPLLSVP

SEQ ID NO: 191464 - protein, 61 aa, Zea Mays
MVPTPTHEDELIGRPVASPKSTPGRLCVRGAPDPTPWSIWKEQNYSIVFRSRQSTITPRQK

SEQ ID NO: 191465 - protein, 170 aa, Zea Mays
MMNPNGDKVDDANNKYPTSIVVKRKDESHGYLLNGMKNNKRTRRMFGYNIKPPQPQAKSSKFTNTQMGESNQDQLFNMQTTDQPSSAGNQVRPTRREAKERGACFYYKEEGHFIHQCPNKLLEWLEKKVSKQNSTDNNQEEIVFTRSKYKVIQTSNEGDRLLDISVEPRE

SEQ ID NO: 191466 - protein, 75 aa, Zea Mays
MYAYECNAYVLCLHTSKGMKPHRTPPRATYDAKLYRYGRTIGHDKTSDANESCNVYGMLHLSIHFTSFRYNTNLK

SEQ ID NO: 191467 - protein, 55 aa, Zea Mays
MSMQAPPASRNGTRPPRRQLQNDVARHERALVGAQRRLEEEATGDDADIDVNVNN

SEQ ID NO: 191468 - protein, 62 aa, Zea Mays
MKQHVMKLKACHSCNQHSNFTPSNLDAAIHQHQCLKTTLFYEGVICTKHNPYQLQPLILIKW

SEQ ID NO: 191469 - protein, 107 aa, Zea Mays
MFWPREDEEGNGLRKPVADADRRISARRQAHRHLGPRHAVRQPPAASRQPIPSCFYLFIRPGPSARLHTFRAHPGSRKRLRRRVPLLRPPDATPRTWRERSAWLPQG

SEQ ID NO: 191470 - protein, 73 aa, Zea Mays
MPPTGHGRCLGASDTPFLLSCRLGGSPLDWNLHPPPPYQSPRSSWLPPIPGLPLIPPLFPVCASNPSRLLVNV

SEQ ID NO: 191471 - protein, 104 aa, Zea Mays
MTFRSLVESDKILSLDGKFMSILSIVLTSMLIKFSFALCTLLDSLSEATSLDNDFLGDNNSLISDTFANNSSVNFIMPLHEVGLISLTSESNSSDDSGIIELTI

SEQ ID NO: 191472 - protein, 72 aa, Zea Mays
MVAGFIKEVFHPEWLANPVLVRKKGGKWRMCVDYTSLNKACPKVPYPLPRIDQIVDSTAGCETLSFLDAYSE

SEQ ID NO: 191473 - protein, 64 aa, Zea Mays
MSSKFLYIFSLRSNHDQSKRSMRLPFLQLRVRIVTFFVSWLLRVLFSRTGSTKGTSQVDIQQSK

SEQ ID NO: 191474 - protein, 374 aa, Zea Mays
MTKEHEELKCSHDDLVQRYDLVLIEQRNNDGDLSCVARLKMENAVLERQVELLNLEKLALGEKYDMLSYSHNKLVDGHIMLDIAHEVVITSLNSCEPHSCTCALLDNIPPCANPCCSKESQCLNEHQATGSKEKLLINKERNKKTKQLRRRRRARLPQDIYKHVVNKLEEEGTAARVKLCEKEAPKAIIEAINMNKEKGKDLVSHVVCTNHLSMLSKSKRRRGKRRCFKCNKSSHLIASCPYKDKDEGIRRCFGCNDKDHMITSCPLMKNQRCTPSKMTLTKEKDKQQVPCQVERCFCYMCAEQGHLSKVCKKGKVPKQVNLSQSYSLRRPKPYTCARSAMRSPRTSTIVIWVPMALLDDRYGPIPRWVPNCAN

SEQ ID NO: 191475 - protein, 65 aa, Zea Mays
MDNFPILDTRNQSKQQQIRSVAAPSHNTTESNTTLRVCSISTTMIISLLPGTRYPQRSQIDTQSL

SEQ ID NO: 191476 - protein, 85 aa, Zea Mays
MQNMGPLLVLINTRTSTSTNCLRKLHHLTSSMNQHVRKLKPSHRCNKHYDFTTLNLDATIHQHQCLKTTLFYEGIIRTKHNLYQL

SEQ ID NO: 191477 - protein, 71 aa, Zea Mays
MERVGGGCQWGGEQEREGAAATNWGEGEGGRLGLGRRGGAPIHWIEINGPNSLSPLSSRPQRKNAKRSTVF

SEQ ID NO: 191478 - protein, 118 aa, Zea Mays
MAPEAGLGCCQPHPGGWHSSRSSAGGAVFLSGQSVEGRSDCGHFGLVNWKARVRIRCQAILALNAPAIRSAGEAIWPRLLLREACPSWALGESKVRPLLEETLGRGVNLPWSAVPARG

SEQ ID NO: 191479 - protein, 52 aa, Zea Mays
MKTSCINMRNHLLVLKHQTSCSVTSQFFYCNMRNYLLKQDQVPQHHKLTTMT

SEQ ID NO: 191480 - protein, 57 aa, Zea Mays
MWAQEHNECSTWSYQCSLLEQSSCALTSEICVESACRGSFLHKRRWTRCAAQHGCTV

SEQ ID NO: 191481 - protein, 97 aa, Zea Mays
MTLKTLVSAFRTRGDRQPTSKFVVACPCPDGLMQDGTQAGGMRLILSCTGVLVVGVTSVARERGRERERERERVSACCLSRLPRVPAFPLSPHPAST

SEQ ID NO: 191482 - protein, 116 aa, Zea Mays
MPAPLASPRCVPTVVCVPGKCLIPLMFCAEFSTPLILTVGIFVRPQGLRMYKPDRPPISEDAVDRAARTCRGEGEGEEGRGKGLSSREDASSGSLGEVLSEVGEGWAPEGVIAGDA

SEQ ID NO: 191483 - protein, 85 aa, Zea Mays
MRTNPRFWARRGYSSTQPPAFPTFSHPLCFCYDVVACSVLGDEGIGWADGNGSPPPLIMVRAVASFKLRFHVAADPLGKTWRHRD

SEQ ID NO: 191484 - protein, 57 aa, Zea Mays
MMGSKSQSLLIRAAFVFDNTLVIRLGSHTMMDQGDTERLPALSPGICLPLGRTSAPY

SEQ ID NO: 191485 - protein, 193 aa, Zea Mays
MGIVLVYPLPWKQQKRAEADQNSSERFAWMPCNVRACLSVSSSRALAAGALAPAPPSAPTSSGRNERGRSLQKSFSSLAQPQADRPPRSIGEGKKRRGASLHVPRFFFPHAGRRGPARVVIDDGDGATTGGAEHMHGARRSGSAASSPLSAGVDGSLDAVPLAQLGRLLLPETQTPRQRQPAACRSVWTFDRL

SEQ ID NO: 191486 - protein, 150 aa, Zea Mays
MSPSSRACCPSRECSCRSRLSPRSPRHEGRRVHNVCAVQHTAGDSAGHVACTIPVTGSTCLLRAARTQNHLPFARSWRENGIGSLIWRLDQAASPKKRKKKEKKTYMCSPSSHAWRHGPVVFPCMAPWTPSMHGPMHAQLFQLLDGIIED

SEQ ID NO: 191487 - protein, 86 aa, Zea Mays
MLAQLVIKLKRAESSRAELATSRASSRATSILPSPTHAIIGAATSRGHALGTRFAQMFANIKIPTILFAASVVASRPGNASASHAS

SEQ ID NO: 191488 - protein, 213 aa, Zea Mays
MKNLHKLLKGEHILGLTNVHFEKDRICSACQAGKQVGTHHPHKNIMTSDRPLELLHMDLFGPIAYISIGESKYCLVIVDDYSRFTWVFFLQKKSHTQETLKGFLRRAQNEFGLRIKKIRSDNGTEFKNSQKESFLEEEGIKHEFSSPYTPQQNGVVERKNRTLLDMARTMLDEYKTPDRFWAEAVHTACYAINRLYLHRILKKTSYELLTGKK

SEQ ID NO: 191489 - protein, 297 aa, Zea Mays
MTQKFEMSMMGELKYFLGFQVKQLQEGTFLSQTKYTQDILSKFGMKDAKPIKTPMRTNGHLDLDTGGKSVDQKVYRSMIGSLLYLCASRPDIMLSVCMCARFQADPKEAHLTAVKRILRYLAYTPKFGLWYPRGSTFDLIGYLDADWVGCKINRKSTSGTCQFLGRSLVSWASKKQNSVALSTAEAGYIAAGHCCAQLLWMRQTLRDYGYKLTKVPLLCDNESAIKMADNPVEHSRTKHIAIRYHFLRDHQQKGDIEIAYINTKNQLADIFTKPLDEQTFNKLRHELNILDSRNFFC

SEQ ID NO: 191490 - protein, 56 aa, Zea Mays
MAVAYLLTPELTSRNFLKFSQCTCRKFHYSPNPMMQFTHLVTIYTPYISIWRPTLH

SEQ ID NO: 191491 - protein, 157 aa, Zea Mays
MNGGVVGVFIAPTTKLDRWLEASARWRTGQSGAHRTVRCPLPRHHCRWILAVGAPDMWARLGVRCTPDRYCLMSGVPAWAILTSARADGALNARQRAVGAETTVVPELHRTVRCTPNSPVNYSGRAVGFSRSWRVPEADLLWRTGHCPVYTGQSGEF

SEQ ID NO: 191492 - protein, 153 aa, Zea Mays
MPYLVPREIVELLLHCHHPIRILKCFLYPVWLNRGNKGVMFTKMSNTRSSGYPLMNVTEDGVDGVISLDCLVDSWVWQSWFFLILLFLIIFISPLIIAIVLRWLIFLILPFIILSLILILGWWRCLHGGGWLILCIWRLFGFLRAHIPNGHVP

SEQ ID NO: 191493 - protein, 68 aa, Zea Mays
MVANDYGITDKIFAIVLDNASSNKTAMEVLKPVFSGYIGHLIPMPSRNEYDLSAILLHQRCGCHIINL

SEQ ID NO: 191494 - protein, 72 aa, Zea Mays
MWGCSYALTCLAEECMSHVYMPTWLSEKCLSPVYAITWPSEKCLSPVYAITWSSEKCLSPVEAQLSVLLGSC

SEQ ID NO: 191495 - protein, 97 aa, Zea Mays
MLPKFRSFVRTIIRSFVRSFVQIIFSWRYAAEIPIVRSSDHSIVRPFVHSSYSSFIVRSYELFTITIHHYYSSLLFTYTIHHRYYLSLLFIIVTIHR

SEQ ID NO: 191496 - protein, 119 aa, Zea Mays
MGSLQQPLRPGAVLRFGTLEFMSFDGSYDMTLLPPPRDNDNGGRQPARRRRNRRHLPRVVEEQHSSSLRSLPRQRRRRRGHQGQAGGRASLAVERIDAPGAPTEGTPDVDLAFKTKASA

SEQ ID NO: 191497 - protein, 250 aa, Zea Mays
MANFDQALEDMVPENLLLEPADADATETCAAVPDAGLRSSCASSTLEHDLEGRDADLDRSDPMEVVEGPSTLEVVTAESLGPKNGADICPAPEDVVGSDLARAKSVGHCPAPEGVAGDDPAQVGSADCDLAPEGARAGSPSCTSMDVHAGSPPHSGGMVVAQTPDQGVALEGSIPTGLALGSAECTELVPAGLLQAASGGGLTPDYPLISPDLGISSFFSNLQVIVLYCSLISTLYELLPFYSSVLLIRL

SEQ ID NO: 191498 - protein, 99 aa, Zea Mays
MSNDIIRIFRRCFGSRGFDFFAHISLKSYINIWRYFFGPLLGCGKLRLNRHCGFGFGPSLNCCSFTFYLPSISFSLCLGTFGNLLYGRGAFGVCCFQNV

SEQ ID NO: 191499 - protein, 145 aa, Zea Mays
MCWTSNQQNTYRNGPGHISLSVCTRDTPKYTSSSDEEYDDDGVDYSNLFKDLDRSRVDKINELIDALNEKDRLLEKQEDLLYVEHDKVVEVEKSLALEIKKNEILAFELSSCHSSITSLKSFNDDLNARIEKLCIASSSILTLYS

SEQ ID NO: 191500 - protein, 82 aa, Zea Mays
MQKKKKMSSGAGGIRPGPWHIFCLGFGPHLVLVAIEKSNSHAPSTISKQFDRGTATSNWMSTMRAQFLPAAKGFAVFVDAGW

SEQ ID NO: 191501 - protein, 154 aa, Zea Mays
MLLLSMMILPSTLFLEAPPLPYIHLLIHSSISVWIFIWCSSYAPFPAWCFSPNMFVFLNMVFILSSHKRECTRTCDVAWNQFAYSCVPCIHRALGDVREGLNGWHTPVFHPYLDTRTRVQLPAWGIAWTHHGLNGWHPGIHSIPYGRAAAADDD

SEQ ID NO: 191502 - protein, 237 aa, Zea Mays
MEPPSTKKGAQRLAGRLASLNRFISRSAERNLPFFEILKSADVFQWGPAQQKAFEELKQYLIDLTTLTPPLPGAPLLLYVAASHSAVSVALVQEKLDGQVKKQAPVYFVSKVLSLSKKNYTELEKVLYAVLMASRKLRHYFQAYHIIVPSSQPLKDIMRNKEATGRIGKWATELNEFTIDYVHRSSIQPQALADFIVDWTLGAQEEETNKDVEAWTVFCDGSWGTFGAGAAAVLVAP

SEQ ID NO: 191503 - protein, 68 aa, Zea Mays
MLSDSDTLVREKQRQSFIHSSRVVGCTCIQQGLKRLHHDAHVGSKVSFILHTQCSNSCKLFEQQREQE

SEQ ID NO: 191504 - protein, 522 aa, Zea Mays
MFLVFGAVYFLSLPVSSYLFSIAGCRLIRRIRLMTFEKVVNMEVEWFDHPENSSGAIGARLSADAAKVRGLVGDALQLVVQNSSTLVAGLVIAFVSNWELSLIILALIPLIGLNGWIQMKFIHGFSADAKMMYEEASQVANDAVGSIRTVASFSAEEKVMDLYKKKCEGPLRTGIRTGIISGIGFGVSFFLLFGVYAASFYAGARLVEDRKTTFPKVFRVFLALAMAAIGVSQSSTLTSDSSKAKSAASSIFAIVDRKSRIDPSEDAGVTVEALQGNIVFQHVSFKYPTRPDVQIFRDLCLTIHAGKTVALVGESGSGKSTAISLLQRFYDPDVGHILLDGVDIQKFQLRWLRQQMGLVSQEPALFNDTIRANIAYGKDGQATESEIISAAELANAHKFISSALQGYDTVVGERGAQLSGGQKQRVAIARAIVKDPRILLLDEATSALDAESERIVQDALDRVMVNRTTVIVAHRLSTIQNADLIAVVRNGVIIEKGKHDALINIKDGAYASLVALHSAASS

SEQ ID NO: 191505 - protein, 929 aa, Zea Mays
MKAFAGGQAAAHKMFETINRTPEIDAYSTTGRKLEDVRGDIEFRDVYFSYPTRPNEQIFKGFSLAIPSGTTIALVGQSGSGKSTVISLIERFYDPQLGDVLIDGVNLKEFQLRWIRSKIGLVSQEPVLFAASIKENIAYGKDNATDQEIRAAAELANAAKFIDKMPQGFDTSVGEHGTQLSGGQKQRIAIARAILKDPRILLLDEATSALDAESERIVQEALDRVMTNRTTVIVAHRLSTVRNADTIAVIHQGTLVEKGPHSELLRDPEGAYSQLIRLQEANQQNNGKVDANARPGKQISINKSASRRSSRDNSSHHSFSVPFGMPHGIDIQDGSSNKLCDEMPQEVPLSRLASLNKAEIPVLILGSIASVISGVIFPIFAILLSNVIKAFYEPPHLLRRDSQFWASMFLVFGAVYFLSLPVSSYLFSIAGCRLIRRIRLMTFEKVVNMEVEWFDHPENSSGAIGARLSADAAKVRGLVGDALQLVVQNSSTLVAGLVIAFVSNWELSLIILALIPLIGLNGWIQMKFIHGFSADAKMMYEEASQVANDAVGSIRTVASFSAEEKVMDLYKKKCEGPLRTGIRTGIISGIGFGVSFFLLFGVYAASFYAGARLVEDRKTTFPKVFRVFLALAMAAIGVSQSSTLTSDSSKAKSAASSIFAIVDRKSRIDPSEDAGVTVEALQGNIVFQHVSFKYPTRPDVQIFRDLCLTIHAGKTVALVGESGSGKSTAISLLQRFYDPDVGHILLDGVDIQKFQLRWLRQQMGLVSQEPALFNDTIRANIAYGKDGQATESEIISAAELANAHKFISSALQGYDTVVGERGAQLSGGQKQRVAIARAIVKDPRILLLDEATSALDAESERIVQDALDRVMVNRTTVIVAHRLSTIQNADLIAVVRNGVIIEKGKHDALINIKDGAYASLVALHSAASS

SEQ ID NO: 191506 - protein, 1257 aa, Zea Mays
MPESWRPAEADALQPAAGTASASGPSARSPGNGAKGRGAGEPPGAAATRVPFHRLFAFADSADVALMLLGALGAVANGAALPFMTVLFGNLIDAFGGALSVHDVVSRVSMVSLDFVYLAMASAVASFVQVTCWMITGERQAARIRNLYLKTILRQEIAFFDKYTSTGEVVGRMSGDTVLIQDAMGEKGWLLTLVMMATIPPLVLAGAVMSNVVTKMASLGQAAYAESSVVVEQTIGSIRTVASFTGEKRAVDKYNMSLKNAYKSGVREGLATGLGMGTVMVLLFCGYSLGIWYGAKLILEKGYTGAKVMNVIFAVLTGSLALGQASPSMKAFAGGQAAAHKMFETINRTPEIDAYSTTGRKLEDVRGDIEFRDVYFSYPTRPNEQIFKGFSLAIPSGTTIALVGQSGSGKSTVISLIERFYDPQLGDVLIDGVNLKEFQLRWIRSKIGLVSQEPVLFAASIKENIAYGKDNATDQEIRAAAELANAAKFIDKMPQGFDTSVGEHGTQLSGGQKQRIAIARAILKDPRILLLDEATSALDAESERIVQEALDRVMTNRTTVIVAHRLSTVRNADTIAVIHQGTLVEKGPHSELLRDPEGAYSQLIRLQEANQQNNGKVDANARPGKQISINKSASRRSSRDNSSHHSFSVPFGMPHGIDIQDGSSNKLCDEMPQEVPLSRLASLNKAEIPVLILGSIASVISGVIFPIFAILLSNVIKAFYEPPHLLRRDSQFWASMFLVFGAVYFLSLPVSSYLFSIAGCRLIRRIRLMTFEKVVNMEVEWFDHPENSSGAIGARLSADAAKVRGLVGDALQLVVQNSSTLVAGLVIAFVSNWELSLIILALIPLIGLNGWIQMKFIHGFSADAKMMYEEASQVANDAVGSIRTVASFSAEEKVMDLYKKKCEGPLRTGIRTGIISGIGFGVSFFLLFGVYAASFYAGARLVEDRKTTFPKVFRVFLALAMAAIGVSQSSTLTSDSSKAKSAASSIFAIVDRKSRIDPSEDAGVTVEALQGNIVFQHVSFKYPTRPDVQIFRDLCLTIHAGKTVALVGESGSGKSTAISLLQRFYDPDVGHILLDGVDIQKFQLRWLRQQMGLVSQEPALFNDTIRANIAYGKDGQATESEIISAAELANAHKFISSALQGYDTVVGERGAQLSGGQKQRVAIARAIVKDPRILLLDEATSALDAESERIVQDALDRVMVNRTTVIVAHRLSTIQNADLIAVVRNGVIIEKGKHDALINIKDGAYASLVALHSAASS

SEQ ID NO: 191507 - protein, 75 aa, Zea Mays
MLVRPFLALSPVGSLPLATPTPRFAPETVRRSSSRRSAGERRFGQRPPTRSQVLTAKRSLQSRVGHHDHDHEASS

SEQ ID NO: 191508 - protein, 85 aa, Zea Mays
MLVRPFLALSPVGSLPLATPTPRFAPETVRRSSSRRSAGERRFGQRPPTRSQVLTAKRRAESDITTTTMRRRRRAIRAVFVAPPG

SEQ ID NO: 191509 - protein, 191 aa, Zea Mays
MPVLPGNKRRPRQHVQPLPGAPLVPRILPPPPTTNHLSSTYPAARRAVLILIAPIIPSPLRHDLYSRDAHTTPMIRSRPAARALPRSISSYPQHPSSFLEQCRLSYKPYMGSWVRTITTPFRKACTIFGPHKDGGGKKQTQQRPNSAAVVQHVDAERAKLHGEVMACAYDDVQVMWSMLDQARIRDLSASS

SEQ ID NO: 191510 - protein, 447 aa, Zea Mays
MEMASLIAGRVVALHRSLPPPVEGTVADIIVISSRPVLLNTPKYHLLGKRSEESEIQSTRRRIWNAPARRTYEAHASAHVPEPSPRAGAPPERMTRRCSHCSNNGHNSRTCPVRSAGGGSGGGGVRLFGVRLTTAPAPAVMKKSASMSCIVSSLGGGFGGSSPPVEGVGAGRGGEDSGTGYVSDDPAHASCSTNGRAERKKGTPWTEEEHRMFLMGLQKLGKGDWRGISRNFVVSRTPTQVASHAQKYFVRQTNSSRRKRRSSLFDMVPEMPMDESPAAVEQFTLQNTQDEDTSSNHVPTLHLGQRKETEFAKQLQTFQPGHHEKSEYAEPSLLLPDLEMNPSVPFKTITDPTGPAFYPSLVPVPLTLWPPSVSHVEEAARTHEILKPTPLNGKGVVKADDVVGMSKLSIDEASSGSMEPTALSLELIGSTDTRQSAFHVKADIVKM

SEQ ID NO: 191511 - protein, 130 aa, Zea Mays
MPTTPWRRNQTRTNTHQFLQCFTPVTVELRVVGFGKEVVLKQWWRMRWRLRLAMLLRLEAPTSGRRPIRWCRAPIHPAPIPPRLSSASTVAPPQRLAQSGLCHVLELPQHHDGVFTMLMDANRINGIKYL

SEQ ID NO: 191512 - protein, 657 aa, Zea Mays
MLHCTYLRRPFPVLCSPTPYLMSKEPCCSHHLHQAKRVSSVLSQLRAPTPGTMSDSSDFAELLWENGQAVVHARTRKHPPQQAAFPPFTFTCSSRAQQRQPVPPLLKTGGGLFADFSSATAGLDAPRDNADLDDTVPWIHYPIPIVDEASPAAPALADSFIPDFFSELHAAAATTSLGPLPPPPPPPPAVQHTGDDNDNRSTPVPNPTTGRGPEPSKETHRAPVPGPAGRPEPQPQAELAPARKPRQESGGGEALMNFSIFSRPAAMARASLRQRPPQTGTDKASNATTSTRVESTVLQSASASGPRTAAAPAVFVDQRTAWPSQQPKEKEVETRKASEAAGATATSSVCSGNGAGTGKDDESWRQQKRKTLQAECSASQDDDPDDESGGMRRSCSRGAKRSRTAEVHNLSERRRRDRINEKMRALQELIPNCNKIDKASMLDEAIEYLKTLQLQVQMMSMGSGLCIPPMLLPPAMQHLQIPPAAAHFPHLGMGLGYGMGVLDMNSAAAAAAAVPFPHMPGAHFPCPMIPGAPLPRGLGIGMPARNTMPVFGVPPGQPIQPPFPSLAGLPVRPNLAPPHASSAAMANMVQEQQQQQQHQSLNNGASTAAATASDPQTIVQAERQHFSVPSSAQTESDQFLDGGGNRAICTGRNEAET

SEQ ID NO: 191513 - protein, 679 aa, Zea Mays
MLHCTYLRRPFPVLCSPTPYLMSKEPCCSHHLHQAKRVSSVLSQLRAPTPGTMSDSSDFAELLWENGQAVVHARTRKHPPQQAAFPPFTFTCSSRAQQRQPVPPLLKTGGGLFADFSSATAGLDAPRDNADLDDTVPWIHYPIPIVDEASPAAPALADSFIPDFFSELHAAAATTSLGPLPPPPPPPPAVQHTGDDNDNRSTPVPNPTTGRGPEPSKETHRAPVPGPAGRPEPQPQAELAPARKPRQESGGGEALMNFSIFSRPAAMARASLRQRPPQTGTDKASNATTSTRVESTVLQSASASGPRTAAAPAVFVDQRTAWPSQQPKEVRFPCAAAAPPPTPTAGNLQQERPSNNNMTPPQKEVETRKASEAAGATATSSVCSGNGAGTGKDDESWRQQKRKTLQAECSASQDDDPDDESGGMRRSCSRGAKRSRTAEVHNLSERRRRDRINEKMRALQELIPNCNKIDKASMLDEAIEYLKTLQLQVQMMSMGSGLCIPPMLLPPAMQHLQIPPAAAHFPHLGMGLGYGMGVLDMNSAAAAAAAVPFPHMPGAHFPCPMIPGAPLPRGLGIGMPARNTMPVFGVPPGQPIQPPFPSLAGLPVRPNLAPPHASSAAMANMVQEQQQQQQHQSLNNGASTAAATASDPQTIVQCALFSTNRERSVFGWWWQQGYLYRKK

SEQ ID NO: 191514 - protein, 239 aa, Zea Mays
MACMPAVSAPSVLAPAPASTRTHLCYSTEMRRGALSLRPARAIPTLRLGGHRDARGAVVVRATAAEGAVELQAKVTSKCFFDVEVGGEPAGRIVIGLFGEVVPKTVDNFRALCTGYGYKGCSFHRIIKDFMIQGGDFQQNNGTGGRSIYGECFDDENFTLKHVGPGVLSMANAGPNTNGSQFFICTVKTPWLDNRHVVFGHVLEGMDVVKQLESQETSRSDTPKQPCRIVNCGEVPLDS

SEQ ID NO: 191515 - protein, 199 aa, Zea Mays
MAGLGKAMYAVGFWIRETGQALDRLGCRLQGKYFFHEQISRHRTIMNIFDKTPHVHRDAFVAPSASLIGDVQVGQGASIWYGCVLRGDANNIQIGSGTNIQDNSLVHVAKSNLSGKVFPTIIGNNVTIGHSAVLQGCTVEDEAFVGMGATLLDGVVVGKHGMVAAGSLVRQNTRIPCGEVEHNFSTALLLLVVKPYPAL

SEQ ID NO: 191516 - protein, 524 aa, Zea Mays
MDPSTIPAPLSINKISTVGDSHASRNPSKPNAYNYKDTPPPASFSAIPRVRRALGNARPAVGERRTRMECARELRVRSTFTAAAMASKKQVGPGGAVPAQEQMNGGDAARLVRKPMDTFPQPAAARGRRALVDVGNLMNGRPSLVNHQKQAVAAAATSHKPLNVGNKKPLVPQAAARGLRPLADVTNLMIKDRAAPANRQKPVDAVFNRNGKAVKLKECKVKPEVIVIIPDSEKEKKGKFPGGQRVCRRVPTLFDNLTKCSRASDGITTPKKKDPYDIDAPDSCNELAVVEYVEDIYRFYKSTEGTCLPLSSYMSSQAEISERMRAILIDWIIEYLSMESVPRKELQLVGISAMLIASKYEEIWAPLVKDLMCLDNAFTRDQILTKEKAILDMLHWNLTVPTMYMFIVRYLKAAMCDTELENMTFFYSELALVQYAMLVYPPSVTAAAAVYAARSTLGMNPQWTDILEHHTGLAEPQLLDCARRLISFHALAPESKQKAVYRKYSKPKLGSVALQSPDKKLLSG

SEQ ID NO: 191517 - protein, 236 aa, Zea Mays
MSATMAWYPLPQSGGTGTPSGGGELLDDQSGGWALWSFGSADDDHGAGVVRAETHGSSDERTEEGRPAPPQQQQQATDDIFMSQFSDEEVRKMDDAPFEALGMFPDSMHQLLSYENMLSGGALLSCCSSEDLLLNATLGVDAMDTCGFPLFSHDLQLQSAAPDLTLTPEDQDGASFAATKRSRSSVADEGGFLFQALVLRELEDVVFQAGREFECQVRRCERNAAAFLCNCNCNRR

SEQ ID NO: 191518 - protein, 382 aa, Zea Mays
MASAMELSLLNPAATHRHRGGLAGLPLARRSVVRFRVSASAAAAAPPKSSGPKKRGKTEIQETLLTPRFYTTDFDEMERLFNAEINKQLNQAEFDALLQEFKTDYNQTHFVRNPEFKAAADRMEGPLRQIFVEFLERSCTAEFSGFLLYKELGRRLKKTNPVVAEIFSLMSRDEARHAGFLNKGLSDFNLALDLGFLTKARKYTFFKPKFIFYATYLSEKIGYWRYITIFRHLKANPEYQVYPIFKYFENWCQDENRHGDFFSALLKAQPQFLNDWKAKLWSRFFCLSVYVTMYLNDCQRTAFYEGIGLDTKEFDMHVIIETNRTTARIFPAVLDVENPEFKRKLDRMVEINQKIIIIAAYLMPPIESGSVDFAEFEPRLVY

SEQ ID NO: 191519 - protein, 440 aa, Zea Mays
MLAGSHSPVCCSFEFSLYGGTQLLTRRHQHYVLTKQGLVETDPEGALAGFDQVVSMEPEKAEWGFKALKQTVKLYYKLGKYKEMMDAYREMLTYIKSAVTRNYSEKCINNIMDFVSGSASQNFSLLQEFYQTTLKALEEAKNERLWFKTNLKLCKIWFDMGEYGRMSKILKELHKSCQREDGSDDQKKGTQLLEVYAIEIQMYTETKNNKKLKELYQRALSIKSAIPHPRIMGIIRECGGKMHMAERQWDEAATDFFEAFKNYDEAGNPRRIQCLKYLVLANMLMESEVNPFDGQEAKPYKNDSEILAMTNLIAAYQKNDIMEFEKILKSNRRTIMDDPFIRNYIEDLLKNIRTQVLLKLIKPYTRIRIPFISQELNFPEKDVEQLLVSLILDNRIQGHIDQVNKLLERGERSKGMRKYNAIDKWNTQLKSIYQTLSNRV

SEQ ID NO: 191520 - protein, 526 aa, Zea Mays
MRLLLVGALLLCATAAVESKPPLDTLGIPPQDEAYYRGGVIKCRDGSGRFSREQLNDDFCDCPDGTDEPGTSACPEAKFYCKNAGHTPVTIFSSRVNDGICDCCDGSDEYDSNITCKNTCWEAGKAAREKLKKKVATYKSGVVIRNQEVERAKEAYAKDEAELAKLKGEEKILQGLVDKLKEQKRLIEKAEEEERLRKEKEEKRIKEAEKQAADEKGTPDASPDVDSKETHDHVQEDENKVAEEHDVHATDHDNHATDHDNHAAESGASVEQGSVNKDDISVEAGTLDELLHKESAVPTLEKDHSSDNPEGLSREELGRMVASRWTGESVSEVSKDDKKGHEDEQEIPEPAKEALEDELEIPEPAEENYDGYHSEVEDDRHKYEDEEFDHESEDEYVDDHDEHVESYKSDDDQKDLTEPGHASWLDKIQQTVQNVFQKFNFFRTPVDLSEASRVRKEYDDANSKLSKIQSKISNLAEKLKHDFGKDKEFYSFYDQCFETKEGKYTYKVCAYKKASQAEGHSSTNLG

SEQ ID NO: 191521 - protein, 497 aa, Zea Mays
MRLLLVGALLLCATAAVESKPPLDTLGIPPQDEAYYRGGVIKCRDGSGRFSREQLNDDFCDCPDGTDEPGTSACPEAKFYCKNAGHTPVTIFSSRVNDGICDCCDGSDEYDSNITCKNTCWEAGKAAREKLKKKVATYKSGVVIRNQEVERAKEAYAKDEAELAKLKGEEKILQGLVDKLKEQKRLIEKAEEEERLRKEKEEKRIKEAEKQAADEKGTPDASPDVDSKETHDHVQEDENKVAEEHDVHATDHDNHATDHDNHAAESGASVEQGSVNKDDISVEAGTLDELLHKESAVPTLEKDHSSDNPEGLSREELGRMVASRWTGESVSEVSKDDKKGHEDEQEIPEPAKEALEDELEIPEPAEENYDGYHSEVEDDRHKYEDEEFDHESEDEYVDDHDEHVESYKSDDDQKDLTEPGHASWLDKIQQTVQNVFQKFNFFRTPVDLSEASRVRKEYDDANSKLSKIQSKISNLAEKLKHDFEYVHGIRFNFKHII

SEQ ID NO: 191522 - protein, 527 aa, Zea Mays
MRLLLVGALLLCATAAVESKPPLDTLGIPPQDEAYYRGGVIKCRDGSGRFSREQLNDDFCDCPDGTDEPGTSACPEAKFYCKNAGHTPVTIFSSRVNDGICDCCDGSDEYDSNITCKNTCWEAGKAAREKLKKKVATYKSGVVIRNQEVERAKEAYAKDEAELAKLKGEEKILQGLVDKLKEQKRLIEKAEEEERLRKEKEEKRIKEAEKQAADEKGTPDASPDVDSKETHDHVQEDENKVAEEHDVHATDHDNHATDHDNHAAESGASVEQQGSVNKDDISVEAGTLDELLHKESAVPTLEKDHSSDNPEGLSREELGRMVASRWTGESVSEVSKDDKKGHEDEQEIPEPAKEALEDELEIPEPAEENYDGYHSEVEDDRHKYEDEEFDHESEDEYVDDHDEHVESYKSDDDQKDLTEPGHASWLDKIQQTVQNVFQKFNFFRTPVDLSEASRVRKEYDDANSKLSKIQSKISNLAEKLKHDFGKDKEFYSFYDQCFETKEGKYTYKVCAYKKASQAEGHSSTNLG

SEQ ID NO: 191523 - protein, 293 aa, Zea Mays
MVASRWTGESVSEVSKDDKKGHEDEQEIPEPAKEALEDELEIPEPAEENYDGYHSEVEDDRHKYEDEEFDHESEDEYVDDHDEHVESYKSDDDQKDLTEPGHASWLDKIQQTVQNVFQKFNFFRTPVDLSEASRVRKEYDDANSKLSKIQSKISNLAEKLKHDFGKDKEFYSFYDQCFETKEGKYTYKVCAYKKASQAEGHSSTNLGRWDKFEESYRVMHFSGGDKCWNGPDRSLKVRLRCGLSNELNDVDEPSRCEYVAVLSTPALCVEEKLKELQNKLDAMSSKQPGHDEL

SEQ ID NO: 191524 - protein, 581 aa, Zea Mays
MRLLLVGALLLCATAAVESKPPLDTLGIPPQDEAYYRGGVIKCRDGSGRFSREQLNDDFCDCPDGTDEPGTSACPEAKFYCKNAGHTPVTIFSSRVNDGICDCCDGSDEYDSNITCKNTCWEAGKAAREKLKKKVATYKSGVVIRNQEVERAKEAYAKDEAELAKLKGEEKILQGLVDKLKEQKRLIEKAEEEERLRKEKEEKRIKEAEKQAADEKGTPDASPDVDSKETHDHVQEDENKQGSVNKDDISVEAGTLDELLHKESAVPTLEKDHSSDNPEGLSREELGRMVASRWTGESVSEVSKDDKKGHEDEQEIPEPAKEALEDELEIPEPAEENYDGYHSEVEDDRHKYEDEEFDHESEDEYVDDHDEHVESYKSDDDQKDLTEPGHASWLDKIQQTVQNVFQKFNFFRTPVDLSEASRVRKEYDDANSKLSKIQSKISNLAEKLKHDFGKDKEFYSFYDQCFETKEGKYTYKVCAYKKASQAEGHSSTNLGRWDKFEESYRVMHFSGGDKCWNGPDRSLKVRLRCGLSNELNDVDEPSRCEYVAVLSTPALCVEEKLKELQNKLDAMSSKQPGHDEL

SEQ ID NO: 191525 - protein, 202 aa, Zea Mays
MQGFANKEALAKTISTRKATFFSRSRSSLWTKGETSMNFINVHDIFLDCDHDSIIYLGKPDGPTCHTGAETCYYTSVYDALQSSKPNEGRQVMTTLYSLEDTISRRHEEKVTDGGGKPSWTKKLLLDNQLLCSKIREEAGELIQTLLENEDQSRAASEMADLLYHAMVLLRVKDVKMEQVLEVLRKRFSQSGIEEKASRNKS

SEQ ID NO: 191526 - protein, 197 aa, Zea Mays
MCPGFEASPVPSPPPPPSAMPGSATTAVQPRPPSVTAPWWRKRWRHPQGATDGWDGFVLTTDGWDVHRGTFPAWMVSSQGNDSSLVLLNTRPGSAADGAGMAEHLQLHLGQTIVAAARRRSRTTRFCSWTTCEGSLTVPSHSEGPRLAALLHGGRGVGRHQLDLVMDEERRGPTPRPLLLATGLPRFLRQHYCQEHF

SEQ ID NO: 191527 - protein, 205 aa, Zea Mays
MLMGRVSHEGRENIRVKHDITDNLSLKINAQLTSEPHYSQGMLNFDYKGKDFRSQVQFGNNGFYGANYIQSVSKNLSLGTEAFWLGQQRKSGVGVVARYDTKKMVATAQIATTGMVALSYVQKVSEKVSLASDFMYNQMTKDVTASFGYDYMLRQCRLRGKLDTNGVISSLLEERLTPGVTFQLSAELDHWKKDYKFGFGMALGE

SEQ ID NO: 191528 - protein, 76 aa, Zea Mays
MLCWPRSLSTTSMETMSTLELPVVNTFGSAASALLILVILISSRLHRVSSKEAPAVGGSYCICSSVLLNSIYLLVN

SEQ ID NO: 191529 - protein, 761 aa, Zea Mays
MAMAMARFLSWLFTCFAALAVLEATVPARSWRAPSPTPRHEARRFEQKTDRFWEYQEQSNTWVQVRAPFDLMSCINGTCTKVGSIGRLAREPGRHGLPPVQSQEEEEEDTRRVQGDGAEEDPVLPVRRRISLTRMSESSVWVTGQSGSIYERFWNGVVWVIAPHELPASAGYATATFIVNTTILALSEAGTLYQLQLNEHAQPIWTEMAFNSSQQSANLGLKTQSQAMRIRNGIVSNDGRKLFLSIMNGSLLEVTEIQPLRWNYHGRPPGADVSYISDAGNLRPGTLFTCSSTGDLYEFDKETKPSWKKHIWSEELAKNISLKSSAGFALHGLSGSNSVSLFLISKDGLLVERRLHRRKWKWDKHGAPTGQRLSSIAEVQKDELNDATSMFLTTTTGKVYEYQFPKYTGGAQSNKIRGQWINHMSPEHAKVARNVPGVHVQVGRMVFPLDDGRLGELHFPGMGGTDFGPSAQSTIRRKLSNKYEWSILDAPETEGWNAEYCTEEHGPTNCISGAKNIAADTESNDLSNNPPSRRRKVEEKQHYLNVNRYQQSDETESYNFLSRTIDLNFHMRVMHADRSLFLIADNGLTFEYLNSNGVWLWLRHEHVTAMKGTLGSYNGSLYLVDVHGNLHIRERNGDELLWINCTAMKKGRQVASGSPWDGIPGLLRRVTTDDALFFVNKRGRLLQFTVALRKFKWKDCHSPPDTKIAFIVDQEVFRRNIIFVGRPCGHRRCPWPAPCSWCPSTGGWWSTTSAHRTGGSG

SEQ ID NO: 191530 - protein, 418 aa, Zea Mays
MAMAMARFLSWLFTCFAALAVLEATVPARSWRAPSPTPRHEARRFEQKTDRFWEYQEQSNTWVQVRAPFDLMSCINGTCTKVGSIGRLAREPGRHGLPPVQSQEEEEEDTRRVQGDGAEEDPVLPVRRRISLTRMSESSVWVTGQSGSIYERFWNGVVWVIAPHELPASAGYATATFIVNTTILALSEAGTLYQLQLNEHAQPIWTEMAFNSSQQSANLGLKTQSQAMRIRNGIVSNDGRKLFLSIMNGSLLEVTEIQPLRWNYHGRPPGADVSYISDAGNLRPGTLFTCSSTGDLYEFDKETKPSWKKHIWSEELAKNISLKSSAGFALHGLSGSNSVSLFLISKVALRKFKWKDCHSPPDTKIAFIVDQEVFRRNIIFVGRPCGHRRCPWPAPCSWCPSTGGWWSTTSAHRTGGSG

SEQ ID NO: 191531 - protein, 479 aa, Zea Mays
MLRLDMQCSSTGDLYEFDKETKPSWKKHIWSEELAKNISLKSSAGFALHGLSGSNSVSLFLISKDGLLVERRLHRRKWKWDKHGAPTGQRLSSIAEVQKDELNDATSMFLTTTTGKVYEYQFPKYTGGAQSNKIRGQWINHMSPEHAKVARNVPGVHVQVGRMVFPLDDGRLGELHFPGMGGTDFGPSAQSTIRRKLSNKYEWSILDAPETEGWNAEYCTEEHGPTNCISGAKNIAADTESNDLSNNPPSRRRKVEEKQHYLNVNRYQQSDETESYNFLSRTIDLNFHMRVMHADRSLFLIADNGLTFEYLNSNGVWLWLRHEHVTAMKGTLGSYNGSLYLVDVHGNLHIRERNGDELLWINCTAMKKGRQVASGSPWDGIPGLLRRVTTDDALFFVNKRGRLLQFTVALRKFKWKDCHSPPDTKIAFIVDQEVFRRNIIFVGRPCGHRRCPWPAPCSWCPSTGGWWSTTSAHRTGGSG

SEQ ID NO: 191532 - protein, 494 aa, Zea Mays
MESHNGEADDLPPPPPLAAGVEPLKADETKMPLKPRSLVQRNGFGRKGQQIKLITNHFKVSLMKAEDFFYHYYVNLKYEDDTPVDRKGSGRKVIEKLQQTYAAELANKDFAYDGEKSLFTIGALPQVKMEFTVVDEDVSTGKTPANGSPGNDSPPGSDRKRVRRPYNTKTYKVELSFAAKIPMSAISQALRGQESEHTQEAIRVIDIILRQHSAKQGCLLVRQSFFHNNPSNFVDLGGGVVGCRGFHSSFRATQSGLSLNIDVSTTMIVKPGPVIDFLIANQKVNDPSMIDWAKAKRSLKNLRIKTSPANQEQKIVGLSDRPCREQLFTLKHKNGESEEITVFDYFVKNRGIKLEYSGDLPCINVGKPKRPTYFPVELCSLLPLQRYTKALSTLQRSSLVEKSRQKPQERMSVLSDVLQRSNYDAEPMLKACGITIARNFIEVDGRVLQPPKLKAGNGEDILIYRLLLLLLVLVNGLLSQNTEHLSAPNHQKWK

SEQ ID NO: 191533 - protein, 116 aa, Zea Mays
MQCKQRNIGFGCMHAPSVKQCHCHASCMTPRSHQVRSCCAAWHLLASSRHPIDDHLSSQAYGNDAARDWPAYQIEQQGVCSLQVTDLASDDDGGDGAGGGEVVGDLHAGVARPHDE

SEQ ID NO: 191534 - protein, 369 aa, Zea Mays
MASPDAEQPAPTELERWRDLDMLLSRPGNLVEATFDPSPGLRDLLGSLVEVLVVGAGGLGCELLKDLALSGFKKLHVIDMDTIDVSNLNRQFLFRVQDVGKSKAEVAAKRVMERVNGVNIVPHFCRIEDKEIEFYSQFHIIVLGLDSIEARSYINSVACGFLDYDSSDNPLQETVKPMVDGGTEGFKGHARVIIPGTTPCFECNIWLFPPQVKFPLCTLAETPRTAAHCIEYAHLIKWDEVHPGKPFDGDDAEHMQWIYSEALKRAELFGISGVTYSLTQGVVKNIIPAIASTNAIISAACALEALKLISGCSKSVSNYLTYNGLEGTHIKVTEFVRDKDCLVCGPGTLVELDTSSTLSDNNACPLKSL

SEQ ID NO: 191535 - protein, 391 aa, Zea Mays
MASPDAEQPAPTELERWRDLDMLLSRPGNLVEATFDPSPGLRDLLGSLVEVLVVGAGGLGCELLKDLALSGFKKLHVIDMDTIDVSNLNRQFLFRIEDKEIEFYSQFHIIVLGLDSIEARSYINSVACGFLDYDSSDNPLQETVKPMVKFPLCTLAETPRTAAHCIEYAHLIKWDEVHPGKPFDGDDAEHMQWIYSEALKRAELFGISGVTYSLTQGVVKNIIPAIASTNAIISAACALEALKLISGCSKSVSNYLTYNGLEGTHIKVTEFVRDKDCLVCGPGTLVELDTSSTLSDFIKMLEEHPKLRMSKASVTHEGNNLYMQSPEVLEQMTRPNLSIPMFELLKEVPYTTVHATGMAENNGKKVSSLRKLRVAFKGIEDASKMDTTVSS

SEQ ID NO: 191536 - protein, 319 aa, Zea Mays
MDAAVRKAAGAGIARAPALVLALVAAGAFLISYNFFTMLFHGGGGIGAAVTAGTRDPVVAMPAWMRAAADTEARRRPFHVALTATDAPYSRWQCRVMYFWYKRMQARPGGEAMGGFTRVLHSGKPDGLMDEIPTFVVDPLPAGKDHGYVVLNRPWAFVQWLQKAKIEEEYILMAEPDHIFVKPLPNLAHDDDPAAFPFFYITPSEHEKIIRKYYAKERGPVTDIDPIGNSPVIIKKPPFDTKLQNTFIIHFTYGCDYSLKGELTYGKVGEWRFDKRSFPDRPPPRNLTLPPPGVPESVVTLVKMVNEASANLPRWDDGI

SEQ ID NO: 191537 - protein, 53 aa, Zea Mays
MYGRRSLLAWLPNAAGILVLEDGTCCRTCRYNRHWNLSISGADLFVPYCLFII

SEQ ID NO: 191538 - protein, 504 aa, Zea Mays
MAEAGADSSNAAVDGGGGSVQNDYPTIDPTSFDVVLCGTGLPESVLAAACAAAGKTVLHVDPSPFYGSLYSSIQLSSLASFLSREATPPTSTVAAAASDWHTVVDLHRRIVYSEVETSGAAPEPARRFTIDLVGPRVLYCADEAVDLLLRSGGSHHVEFKSVEGGSLLYWEGCLYPVPDSRQAIFKDTTLKLKEKNILFRFFKLVQAHIAAASASADETGQGDAPARILEEDLDLPFVEFLKKQGLPPKMRAVVLYAIAMADYNQDVLATRFIIQVLRMPVVALLMDEKHFVGARLVSGQDILCQQLIIDPSYKTILDVPFDGSDSHFPRKVVRGVCIISKSVKQGSSNVLVIFPPKSLEEQQVTAVRLLQLSSNLAVCPPGMFMSYLSTPCTDVSVGKQCIKKAIDALYSPQASDGSEDHLETASESTEDVKPTLIWSCVYVQEITQGTAGPLLSCPMPDEYLDYRNILGSTKKLFASIYADEEFLPKKSAPVYANDDSDSAE

SEQ ID NO: 191539 - protein, 228 aa, Zea Mays
MPVVALLMDEEKKHFVGARLVSGQDILCQQLIIDPSYKTILDVPFDGSDSHFPRKVVRGVCIISKSVKQGSSNVLVIFPPKSLEEQQVTAVRLLQLSSNLAVCPPGMFMSYLSTPCTDVSVGKQCIKKAIDALYSPQASDGSEDHLETASESTEDVKPTLIWSCVYVQEITQGTAGPLLSCPMPDEYLDYRNILGSTKKLFASIYADEEFLPKKSAPVYANDDSDSAE

SEQ ID NO: 191540 - protein, 259 aa, Zea Mays
MPVVALLMDEKHFVGARLVSGQDILCQQLIIDPSYKTILDVPFDGSDSHFPRKVVRGVCIISKSVKQGSSNVLVIFPPKSLEEQQVTAVRLLQLSSNLAVCPPGMFMSYLSTPCTDVSVGKQCIKKAIDALYSPQASDGSEDHLETASESTEDVKPTLIWSCVYVQEITQLVLYCHALCPMNTWTTETYWDQQKSYSQVSMLMKSSCLKSQLLYMPMMTLILQSKTIFLEGFIIWLENAVSPSLKFRGQKSVARGACGA

SEQ ID NO: 191541 - protein, 122 aa, Zea Mays
MFMSYLSTPCTDVSVGKQCIKKAIDALYSPQASDGSEDHLETASESTEDVKPTLIWSCVYVQEITQGTAGPLLSCPMPDEYLDYRNILGSTKKLFASIYADEEFLPKKSAPVYANDDSDSAE

SEQ ID NO: 191542 - protein, 274 aa, Zea Mays
MLAASTKVGSRLASPHASLSAGAAAAALASSPVLGSGMLPGAGFGETGSHHAADAPPALPCSSSGDSREYYQWKRLVNQRQSTLDGGKVPAALGHHVFGAGCSSRNQHIYRYFSSSHQGSIWAGSKVLHDLPGYVKIVEVGPRDGLQNEKDIVPTPVKVELIRRLATSGLPVVEATSFVSPKWVPQLADAKDVMEAVRTMGGVRFPVLTPNLKGFEAAIAAGAKEIAIFASASEGFSKSNINCTIKESIARYNDVALAAKEKEIPVRGHRGSDA

SEQ ID NO: 191543 - protein, 268 aa, Zea Mays
MPLSKGSEWNLLCQVVPIESLADAKDVMEAVRTMGGVRFPVLTPNLKGFEAAIAAGAKEIAIFASASEGFSKSNINCTIKESIARYNDVALAAKEKEIPVRGYVSCVVGCPVDGPVPPSNVAYVAKELYDMGCYEVSLGDTIGVGTPGTVVPMLEAAISVVPVEKLAVHFHDTYGQSLSNILISLQMGVSVVDSSVAGLGGCPYAKGASGNVATEDVVYMLNGLGVKTGVDLGKVMAAGEFICRHLGRQSGSKAATALSKVTANASKL

SEQ ID NO: 191544 - protein, 116 aa, Zea Mays
MVHIVATKTQIKNKWDRLKEFKAWKKLMRQTCTGHSKLWELQNMEELEICFGSITSIGVDHWSPHMATAFTIAEQGGTPHEAINCDTQEDGDTNECEVSPQKQLESLVNLLAATNR

SEQ ID NO: 191545 - protein, 52 aa, Zea Mays
MGAPGRPMWWSGSERADSALTHRETDHGRSASQRLNYGVVFTVKSLQGAQIL

SEQ ID NO: 191546 - protein, 95 aa, Zea Mays
MPMTCENIQYNKTWLAYNSFCRIDQFNNTRKQPDNVHNKQKIFHIPTSDISAYTKKTPTSAVTQWMPCQKVFSIISGIIHNEKTTRTVISLNLSK

SEQ ID NO: 191547 - protein, 153 aa, Zea Mays
MVLDNKVLYETTSASVRTSSPCAASVTFSHLISATMSGVTCCLCFSGQLNSDLRRLAVNLTPFPRLHFFMIWDAKNMICVVDPCHGRYLTASAMFCAKMSSREVDEQMLNVPNNDSYFGLDLQQRSVHGCASFGSELYFYSIRILCFFGSLFD

SEQ ID NO: 191548 - protein, 85 aa, Zea Mays
MVLDNKVLYETTSASVRTSSPCAASVTFSHLISATMSGVTCCLCFSDMGRQEHDMRRGPVPRSLPDGVRHVLRQDEQQGGGRADA

SEQ ID NO: 191549 - protein, 488 aa, Zea Mays
MPLVTYRYQALKESLAAAITSSPHAADPRRPHALAVVSGLAANGYLASLLVARYARLGEPDAARGVFDAAASSPYATPPKPLLYNAMLRGYLSLGLPREAVALLRAMLASGSCAPDRHTYHLAATACARAPDLGLGRRFEAAAAACGLAASDLLVATALIGMHAEAGDMGAARRVFDGMPCRDAVAWNAVIGGYARAGHLSEAVELFGMMRSAVGACPTEATLVSLVSGYAVFGSWKGHGMMHAAVIKSGFQRSLFVSNALLEMYTELGCLSEALLVFRQMEVKDSVTWSSMIGGLVRSNKPGYAVRLFHWMLSKSEVLVTRSILLNVILACSELGDWREGKWIEENFVMCNGSEFKRDPSVVTRLIYMYAKCGQLGSSETLLHESTEVRCDVVAWNALIKACGELGLVEKAIGFAIQMHRTGIYPDNVTFLEILHMISLIPSLKKGMEVHAHIVKRGFQNERAIANSLIYMFMHGVDLHQKLLSFLR

SEQ ID NO: 191550 - protein, 178 aa, Zea Mays
MMATGARLRAGLPRDDAPPQQEMVAANGTGQPQLVVDEHKTILEEVPREENGTLSAANYAAQGHENVAAEYYKQQEEQEKVVRSESLAIWLSNIANMVLFAAKVYASTCCHDISCGLLPFQCKRQIPIETQLEKRMQPLNQGMQVGIAWLVIRGIKELAEVSFPQDDKQTEKTTLKVT

SEQ ID NO: 191551 - protein, 286 aa, Zea Mays
MMATGARLRAGLPRDDAPPQQEMVAANGTGQPQLVVDEHKTILEEVPREENGTLSAANYAAQGHENVAAEYYKQQEEQEKVVRSESLAIWLSNIANMVLFAAKVYASTCCHDISCGLLPFQCKRQIPIETQLEKRMQPLNQGMQVGIAWLVIRGLICSGFHVGIKELAEVSFPQDDKQTEKTTLKRSADWAPQTVCGCGWDYRFGRKLVEARDELMKGRFAACMRPVPPFCSKAFDTPPGRGCRDLLCSADNACNQHRGCVGVIAIGLSDCCYAVFWCQIKTVFLA

SEQ ID NO: 191552 - protein, 84 aa, Zea Mays
MEANRIKEEGNTGSIRWKENILDQENELQNIKQENDDLQTKESAASEKIKELSSQLTNAKYGMINSNTKEIMRRGALKRTMNLL

SEQ ID NO: 191553 - protein, 105 aa, Zea Mays
MSLKIGFHRMVTSGHSNKSITSFCDVCFCWSFMFELMYVSDFRPIYAGNALCTVKYTDEDPCMMSIRSTSFSPTADAMSETKVAPITQAAREKIPLLLDLLFWHP

SEQ ID NO: 191554 - protein, 184 aa, Zea Mays
MLCLKQRLHLSPSTFFQTLGKSTWVNLTSQDTKRHDLANACVVVTGGRGLRSAENFKLLEQLAEKFGAAAGATRAAVEAGYVPNDLQSCRRRLQQLESQLMEANRIKEEGNTGSIRWKENILDQENELQNIKQENDDLQTKESAASEKIKELSSQLTNAKYGMINSNTKEIMRRGALKRTMNLL

SEQ ID NO: 191555 - protein, 133 aa, Zea Mays
MDWGGWKTNNFERTRNICSLLYTTSPHLFEADAEDAFIRVRNKVKVPLYGCDCYAYALLASGFVDIVVESGLKPYDFLSLVPVIEGAGGSITDWRGDKLHWPVTAESRPTSFNVVAAGDARVHKEALDALRWR

SEQ ID NO: 191556 - protein, 142 aa, Zea Mays
MASIKRPYQTASTSLSQQQRLRLCSLLFFLNPRRNRRALDQRRPAHLARGLTLGSGTTVQPRMTCRSIVDQRATPLMSDLDIYRRQTIIIYRQVVLGYTVAPAPDVRLCRLRRHVLFFPLSSSDDDDRAEGNLRKVNHIKSR

SEQ ID NO: 191557 - protein, 181 aa, Zea Mays
MASIKRPYQTASTSLSQQQRLRLCSLLFFLNPRRNRRALDQRRPAHLARGLTLGSGTTVQPRMTCRSIVDQRATPLMSDLDIYRRQTIIIYRQVVLGYTVAPAPDVRLCRLRRHVLFFPLSSSDDDDRAEGNLRKVNHIKSRLCVCVALLLPASAKAAMHAQIRRLQLLAAEPAAQHSRGD

SEQ ID NO: 191558 - protein, 134 aa, Zea Mays
MATVELMEEEDTSRLSELIALAKAGLHGEEEEDTSMLSELIALAEAGLRAQEEDEFMSQAAEEVEATYYKQKCDETKAEDQLFSRAADEAEANYYKRNAEKCHTGQCIKWNEVVVEDCTTNDSEDELLIDCDSD

SEQ ID NO: 191559 - protein, 165 aa, Zea Mays
MTCRSIVDQRATPLMSDLDIYRRQTIIIYRQVVLGYTVAPAPDVRLCRLRRHVLFFPLSSSDDDDRAEGNLRKVNHIKSRLCVCVALLLPASAKAAMHAQIRRLQLLAAEPAAQHVTLCPIPPPPPPPKKKLGTLQKRIQFIWSNCTSSLFPFFCHLIQFLPHDA

SEQ ID NO: 191560 - protein, 222 aa, Zea Mays
MRVNPILDWSYRDVWSFLITCKVKYCSLYDQGYTSIGSIHDTVPNALLSDSSSEKSFRPAYMLTDGRLERAGRTKKINPKVEMNSAASNGINDTEGGRMISRAASIIVVGDEILFGTTEDNLGAALCKKLHAIGWRVSHVAVVRNEIDSVAEEVERCKSTDDMTFLWLVSRKHLEFVWLLMKNLKITLVNSWETITLVTEMRWHSCQKVLQNYCITKRYHCH

SEQ ID NO: 191561 - protein, 236 aa, Zea Mays
MRVNPILDWSYRDVWSFLITCKVKYCSLYDQGYTSIGSIHDTVPNALLSDSSSEKSFRPAYMLTDGRLERAGRTKKINPKVEMNSAASNGINDTEGGRMISRAASIIVVGDEILFGTTEDNLGAALCKKLHAIGWRVSHVAVVRNEIDSVAEEVERCKSTDDMVFIFGGLGPLHSDVSLAGVAKAFGVRLRRLLMKNLKITLVNSWETITLVTEMRWHSCQKVLQNYCITKRYHCH

SEQ ID NO: 191562 - protein, 186 aa, Zea Mays
MVFIFGGLGPLHSDVSLAGVAKAFGVRLAPDEEFEDYLSQLMGNNYTGDRNEMAQLPEGITELLHHKTLPLPLIKCRNVIALAATNMDELDTEWDCLLGTQESGLMPSKPFVSKHLSTTLSDVQIASVLAKLCLEFSDVYIGCHRISRAGPLVVNLTGKDNQRVDAAAEKLTSSFEGQFSQLNSCK

SEQ ID NO: 191563 - protein, 477 aa, Zea Mays
MQTGFEEVAFSFNGGKDSTVLLHLIRAGYYLYKKDSGDVAQTDAVKNCPLRTIYFESPCAFPEINSFTYEIVSTYGLPLETIHSDFKSGLEGLLKEKPTKAIFIGTRIGDPNAVGQEQFSPSSPGWPPFMRVNPILDWSYRDVWSFLITCKVKYCSLYDQGYTSIGSIHDTVPNALLSDSSSEKSFRPAYMLTDGRLERAGRTKKINPKVEMNSAASNGINDTEGGRMISRAASIIVVGDEILFGTTEDNLGAALCKKLHAIGWRVSHVAVVRNEIDSVAEEVERCKSTDDMVFIFGGLGPLHSDVSLAGVAKAFGVRLAPDEEFEDYLSQLMGNNYTGDRNEMAQLPEGITELLHHKTLPLPLIKCRNVIALAATNMDELDTEWDCLLGTQESGLMPSKPFVSKHLSTTLSDVQIASVLAKLCLEFSDVYIGCHRISRAGPLVVNLTGKDNQRVDAAAEKLTSSFEGQFSQLNSCK

SEQ ID NO: 191564 - protein, 783 aa, Zea Mays
MKKRNETNEAQIIGFSKRKKISRRTGGAPPHGHGPAARHEAENLKTSRANCRLNSKSRQLSPPYPSPSSFPPFLPQTSASRISNPNLIGDEGSPASASCFSVMNNFHVYEAIGRGKHSTVYKGRKKKTIEYFAVKSVDKSQRSKVLNEVRMLHSLDHANVLKFYSWYETSAHFWLVLEYCVGGDLKGLLEQDKKLPENSIHDLAYNLVKALQFLHSQGIIYCDLKPSNILLDEFGCMKLCDFGLARRLKDIEKTNPGDVPQPMRGTPCYMAPELFREAGVHSYASDFWALGCVLYECYTGRPPFVGREFTQLVKSIILDPTPPLSDNSSRSFQNLIDCLLMKDPAERLQWSELCDHNFWKTSIPMISLPPQPAFDNMIELSATPYLAERNGDKPSRQLTPPKHREYSGLRRKDENSTKPSMTPVKNVQSVKKNCGKPKAEGFKGVNILRMSRIAKLNLQRERDKENYRRPPTETTENETEVNIDNNDMELDFGENPEADAPDDTYGSDNPGSAGNEKPQSTDANEENCMANQVDMLTDEGSVKPDIMVKTEQNSCSDNLDVEATPPSSTRKAQRAKVTPCPGTGSEPSNIFEAFWHPTDLAVKPVMPSRKADKAVDMVPTLPFEALTASDYIKLPLEQMNAFNSQILQSLSGTYQVSEKQNTIRYLEMLSMNSDAANKITNGPIMLLLIKMLRLSKTSVLRVQIASLMGLLIRYSTALDVELASSGIFNALSDGLRDKHDKLRRFCMATLGELLFYISTQSDQDTKEINTQEYPLKDNRFLVL

SEQ ID NO: 191565 - protein, 1293 aa, Zea Mays
MSTRPLAAASTRYETSAHFWLVLEYCVGGDLKGLLEQDKKLPENSIHDLAYNLVKALQFLHSQGIIYCDLKPSNILLDEFGCMKLCDFGLARRLKDIEKTNPGDVPQPMRGTPCYMAPELFREAGVHSYASDFWALGCVLYECYTGRPPFVGREFTQLVKSIILDPTPPLSDNSSRSFQNLIDCLLMKDPAERLQWSELCDHNFWKTSIPMISLPPQPAFDNMIELSATPYLAERNGDKPSRQLTPPKHREYSGLRRKDENSTKPSMTPVKNVQSVKKNCGKPKAEGFKGVNILRMSRIAKLNLQRERDKENYRRPPTETTENETEVNIDNNDMELDFGENPEADAPDDTYGSDNPGSAGNEKPQSTDANEENCMANQVDMLTDEGSVKPDIMVKTEQNSCSDNLDVEATPPSSTRKAQRAKVTPCPGTGSEPSNIFEAFWHPTDLAVKPVMPSRKADKAVDMVPTLPFEALTASDYIKLPLEQMNAFNSQILQSLSGTYQVSEKQNTIRYLEMLSMNSDAANKITNGPIMLLLIKMLRLSKTSVLRVQIASLMGLLIRYSTALDVELASSGIFNALSDGLRDKHDKLRRFCMATLGELLFYISTQSDQDTKEINTQEYPLKDNRSATSWQVPSAVIALVSSILRKGEDDLAQLYALRTVDNICSQGTEWTSRFASQDAIGHLCYIYKATGKQESTRLIAGSCLARLSRFSPSCIHLILEKISFKDIACTLIKGNTREQQISLNILNSALVNSHTVTSMNRYILSLSDDKQLVPGLISLIEQGTDVLRGKTLLFVALLCKNSRRWLPHFFCNAKLISAVDRLGKEKEGFIHQCTEAFVQLVASLVPGILDTVSSDIQQVMVGKRHGPVTALAGRAHPKSTIHLFPVILHLLGSASFKHRVVTGHVLLQLANLIKILEAPFQARDDFQMTLLRVLEAATEEPSVILNEHTVFMSRIIPSLSVLYKGNKDGDARFLCLKILADVMIVIFSDSSLTSDEQTITDLKSISQRHFLPLYPSFAEDEDPIPIYAQKLLVMLMEHGCVKVSDILHKATVSQCFEFLLGDLSNANVSNVKLCFALVSAPEMDTYILSQLQVVRRIGNLLEFVAAKDMDDFLEPTLELCRAFIIRGTGSNRSVALSKNPALLLDSAFSMSIAVDQQTCVMDICDFGGNMGIFLELVGNSDPQISDLASDCVVLLLKAAPREATVGLLTSLPKLSTVMDLLKHDSHRCLIRLLYGLAFSCRQYLAQGMILSISVPALMRVEALVSVFKGSNDSLLADAASYLSAELQRLPRCG

SEQ ID NO: 191566 - protein, 706 aa, Zea Mays
MEPPHAEQAVAAVAAGGEGGTASPGTGLEGPVLRRGLDGGGEGEDGELGAGQEANARLPERPGEADCGYYLRTGACGFGERCRYNHPRDRGGTEYYLKTGTCKFGSNCKYHHPKQDGSVQSVILNNNGFPLRLGEKECSYYMKTGQCKFGSTCKFHHPEFGGIPVTPGIYPPLQSPSVPSPHTYAPNWQMGRSPAVPGSYIPGSYTPMMISSGMVPLQGWSPYPASVNPVASGGAQQTVQAGPLYGIGHHGSSTAIAYGGTYLPYSSSAGQSSNNHQEHGFPERPGQPECQYYMRTGDCKFGTTCKYNHPRDWSTPKSNYMFSHLCLPLRPVNGVGKTTGMEYPERPGQPLCEYYAKNGTCKFGSNCKFDHPRESGFVPVALNNSGFPLRLGEKECSYYMKTGHCKFGGTCKFHHPELGFLTETPGMYPPVQPSPISSPHPYPHHSNWQMGRPAVVPGSFLPGPYPPMMLPPTVMPMQGWNPYVSPMNQTTPAGGQQAVPAGPSYGLSHQEPTSAVTYGSHYAQLYSSSGTSSSNIQEYVFPERPGQPECEHYMKTGTCKYGAACKYHHPQYFSGPKSNCILSPLGLPLRPGSQRCAYYAHHGFCKFGPTCKFDHPMGTPNYSLPAPSLTDVPVAPYPHTFSVTPIAPYLLPPDPRPQYTLAKDPSAYPPQAPGTTYGPVGAISKVYARHTLIRSPTSGAAGMQAS

SEQ ID NO: 191567 - protein, 399 aa, Zea Mays
MEPYAATKGGESDAGTGLEESMRKLGLGEDDEAGEEKLPERPGEADCTYYLRTGACGYGERCRYNHPRDRPAPVNGVGKTTGMEYPERPGQPLCEYYAKNGTCKFGSNCKFDHPRESGFVPVALNNSGFPLRLGEKECSYYMKTGHCKFGGSFLPGPYPPMMLPPTVMPMQGWNPYVSPMNQTTPAGGQQAVPAGPSYGLSHQEPTSAVTYGSHYAQLYSSSGTSSSNIQEYVFPERPGQPECEHYMKTGTCKYGAACKYHHPQYFSGPKSNCILSPLGLPLRPGSQRCAYYAHHGFCKFGPTCKFDHPMGTPNYSLPAPSLTDVPVAPYPHTFSVTPIAPYLLPPDPRPQYTLAKDPSAYPPQAPGTTYGPVGAISKVYARHTLIRSPTSGAAGMQAS

SEQ ID NO: 191568 - protein, 366 aa, Zea Mays
MEYPERPGQPLCEYYAKNGTCKFGSNCKFDHPRESGFVPVALNNSGFPLRLGEKECSYYMKTGHCKFGGTCKFHHPELGFLTETPGMYPPVQPSPISSPHPYPHHSNWQMGRPAVVPGSFLPGPYPPMMLPPTVMPMQGWNPYVSPMNQTTPAGGQQAVPAGPSYGLSHQEPTSAVTYGSHYAQLYSSSGTSSSNIQEYVFPERPGQPECEHYMKTGTCKYGAACKYHHPQYFSGPKSNCILSPLGLPLRPGSQRCAYYAHHGFCKFGPTCKFDHPMGTPNYSLPAPSLTDVPVAPYPHTFSVTPIAPYLLPPDPRPQYTLAKDPSAYPPQAPGTTYGPVGAISKVYARHTLIRSPTSGAAGMQAS

SEQ ID NO: 191569 - protein, 84 aa, Zea Mays
MLSAGPLANAYNVVRRACLIWPWSGPLPRPRPATQLTLAAFLPVNKSWAHRPVVHESSADERFGPFHGGFRGDARNIFKRWPAR

SEQ ID NO: 191570 - protein, 99 aa, Zea Mays
MLPLSLLKTAQGHPMLVELKNGETYNGHLVNCDTWMNIHLREVICTSKDGDKFWRMPECYIRGNTIKYLRVPDEVIDKVQEETSKSRSVCSMLVWTAVW

SEQ ID NO: 191571 - protein, 935 aa, Zea Mays
MALGVLVVEEGRQQQEAPPPLAVEALRDKIVEKVKANRVTLIVGDTGCGKSSLVPQFLLEENMEPILCTQPRRFAVVAIARAIANSRNWQLGEEVGYHIGHSNMSDLNSKRSKIVFKTAGVVLEQMCDRGIAALKYKVIILDEVHERSVESDLVLASIKQFLMKKSDLRLVLMSATADITRYKEYFRDLGRGERVEVIAIPCSPHTSIFQRKVLYLEQIADILKINSQLLSSKYCSGPDASADAEINYDVYELIHKLLLHIHQNEPDISKSILVFLPTYYALEQQWIRLLPFSSTFKVHILHRSIGTDEALQTMEISKSCRKVILATNIAESSVTIPGVAYVIDSCRSLQVYWDPIRKADAAGLVWISKSQAEQRKGRTGRTCDGQIYRLVTGTFYSSLNDHEYPAILRCSLREQVLMVCCAEPRSISDPSSLLQRVLNPPDPDAIEEALESLVQIHALEKTASGRYEPTFYGCLLNSLPLSFDSSVLALKFCELGAIHEGILISIMLDIQPLPILHTFGYRELCQKYIDNYFKGNGSVQIGKKEATTIGNLCAFQFWERVFKDKHRLEYLKYVAKTQEPEESHTFLTKPEEEWCAVHNLLPAAFKNISEIYDVVVMQLHRFRPSFLVKINPPKFLQPSEFNHTCLHREILDLEEDVDSLSLETENAHSDSQKRCAATPYVSPTDFETSTIVEMLKTLVKMKTQHAENKISYKGRLGSNVKPTLGTQACVFFANGSCNLGDVCRFSHSSLAPKPVCKFYLTLQGCRNGRSCPYSHDSGSLVSAPVTSGICSQESRGTSLCDTRLLPADGDGHILVVNDKTLQFSTTEQALLQKFFASIAIKILSEQLSGLQVILIMKNTRYIQLQVERLARECFFFLSESFLSDEANLGWFSDTSTHTRRMQVAAPVTYVFNLHPPSSTQFGDYPAELREALRRD

SEQ ID NO: 191572 - protein, 548 aa, Zea Mays
MSSTTPAIASPASEQAKSKKKKHRSKDDPSAAAADPPSLAEAEEKTDGYLIKPQSLVPSLDTSTWPLLLKNYDRLNVRTGHYTPLPSGHSPLKRPLAEHLRYGIINLDKPSNPSSHEVVAWIKRILRVEKTGHSGTLDPKVTGNLIVCIDRATRLVKSQQGAGKEYVCVARFHAAVPDTARVARALEALTGAVFQRPPLISAVKRQLRVRTIYESKLLEHDPERHLAVFWISCEAGTYVRTLCVHLGLLLGVGAHMQELRRVRSGILGEQDNMVTMHDVMDAMWSLDNYKDESYLRRVVMPLEVLLTSYKRLVVKDSAVNAICYGAKLMIPGLLRFENDIETGEEVVLMTTKGEAIAIGIAEMTTAVMATCDHGAVSKIKRVVMDRDTYPRKWGLGPVALKKKKLVAEGLLDKHGKPNEKTPTEWLRNVVLPTGGDVSIASIAAAPEPEKKIKVEEATEAVEGEKSEKKKKKKKDKGESEPAEVVEGKEEVATGDEKGSEKKKKKKKSKEASDAAKPESAQIGDGTGTEKSEKKKEKKKKSRDTEEAQ

SEQ ID NO: 191573 - protein, 51 aa, Zea Mays
MCMGTLACAGVQLKPNRAIFVACVEKQRNHVCGRPGLVEPCACRSCNQSCP

SEQ ID NO: 191574 - protein, 78 aa, Zea Mays
MLVARYFRSGPAHSDNSTCSLKAWKAAGVPKSDRELIATNSFISYFCCAARNDSWYPGGDWRSACGVAVYVVMMKSDT

SEQ ID NO: 191575 - protein, 1109 aa, Zea Mays
MSSLTRDIVFLVLQFLDEEKFKETMHKFEQESGFFFNMKYFEAKGHAGDWDEVEKYLSGFTKIDDNNYSMKIFFEIRKQKYLEALDRHDGAKALDILVKDLKVFSTFNEESYKEITQLLTFENFRENEQLSNYGDTKSARTVMLVELKKLIKANPLLQEKLVFPTLKASRLRTLINQSLNWQHQHCKNPRPNPDIKTLFTDHTCTLPNGAPASRVSVPLAAVPKAGAAYPPLTAHTPLQLPPPSPSLARWLTNTAVPSSVQSAVVAASSIPVPPNQVPEQLMKRLRPGGHGIGETTYPTPIPQRAWSMDDLPRTVACSLSHGSNVTSMDFHPTRHTLLLVGSANGEFTLYEIGLRQTLLSKPFKILDTNACSPQFQNAVVKDPPMSINRVTWSPHGELIGVAFTKYLIRVYAYQPPNETRHVLEIVAHSGGVNDIAFSRPNKQLCVVTCGDDKLIKVWNMHGQKLFTFEGHKAPVYSICAHHKQSIQFIFSTSLDGKIKAWLYDNVGSRVDYEAPGKWCTTLLYSADGTRLFSCGTSKEGDSYLVQWNENDGSIKRTYSGFRKRSAGVAGVVQFDIAQNHILAAGEDNKIKFWDVDNNNMLICTDAEGGLPALPRLRFNKEGNLLAVTTVDNGFKILANADGLRNLRALGSRPPFEAFRLQYEDASMKVSGAPVVATISPNIGRMDHLDRNSPAKPSPMLTGGDTASRSIDIKARISEEKSDKAKASELMEVLNPQQCRVATMPETPDQARKVVRLLYTNSGVGLLALGSNAIQRLWKWSRNEQNPSGKATASVVPHHWQPNSGLVMTNDTSDTNPEEAIPCIALSKNDSYVMSACGGKVSLFTMMTFKVLTTFMPPPPASTFLAFHPQDNNIIAIGMEDSTIHIYDVRVDKVKTELKGHQKRITGLAFSTNLGVLVSSGADAQLCVWTNDTWEKKRTVSIQMLAGKAPSGNTRVQFSSDQNHLLVVQETQLAIYDASKMERIYQWIPQDTLSASISHASYSCNSQLVFSAFIDGNIGVFDAENLRLRCRIAQSVINSNPHVHPLVVAAHPHEPNQFAVGLSDGFVKVLEPLESEGKWGTPAPVTNGTPNGKTPASSTTSNPATDQIQR

SEQ ID NO: 191576 - protein, 631 aa, Zea Mays
MPIQVEKREFIFSTSLDGKIKAWLYDNVGSRVDYEAPGKWCTTLLYSADGTRLFSCGTSKEGDSYLVQWNENDGSIKRTYSGFRKRSAGVAGVVQFDIAQNHILAAGEDNKIKFWDVDNNNMLICTDAEGGLPALPRLRFNKEGNLLAVTTVDNGFKILANADGLRNLRALGSRPPFEAFRLQYEDASMKVSGAPVVATISPNIGRMDHLDRNSPAKPSPMLTGGDTASRSIDIKARISEEKSDKAKASELMEVLNPQQCRVATMPETPDQARKVVRLLYTNSGVGLLALGSNAIQRLWKWSRNEQNPSGKATASVVPHHWQPNSGLVMTNDTSDTNPEEAIPCIALSKNDSYVMSACGGKVSLFTMMTFKVLTTFMPPPPASTFLAFHPQDNNIIAIGMEDSTIHIYDVRVDKVKTELKGHQKRITGLAFSTNLGVLVSSGADAQLCVWTNDTWEKKRTVSIQMLAGKAPSGNTRVQFSSDQNHLLVVQETQLAIYDASKMERIYQWIPQDTLSASISHASYSCNSQLVFSAFIDGNIGVFDAENLRLRCRIAQSVINSNPHVHPLVVAAHPHEPNQFAVGLSDGFVKVLEPLESEGKWGTPAPVTNGTPNGKTPASSTTSNPATDQIQR

SEQ ID NO: 191577 - protein, 818 aa, Zea Mays
MALTTYPTPIPQRAWSMDDLPRTVACSLSHGSNVTSMDFHPTRHTLLLVGSANGEFTLYEIGLRQTLLSKPFKILDTNACSPQFQNAVVKDPPMSINRVTWSPHGELIGVAFTKYLIRVYAYQPPNETRHVLEIVAHSGGVNDIAFSRPNKQLCVVTCGDDKLIKVWNMHGQKLFTFEGHKAPVYSICAHHKQSIQFIFSTSLDGKIKAWLYDNVGSRVDYEAPGKWCTTLLYSADGTRLFSCGTSKEGDSYLVQWNENDGSIKRTYSGFRKRSAGVAGVVQFDIAQNHILAAGEDNKIKFWDVDNNNMLICTDAEGGLPALPRLRFNKEGNLLAVTTVDNGFKILANADGLRNLRALGSRPPFEAFRLQYEDASMKVSGAPVVATISPNIGRMDHLDRNSPAKPSPMLTGGDTASRSIDIKARISEEKSDKAKASELMEVLNPQQCRVATMPETPDQARKVVRLLYTNSGVGLLALGSNAIQRLWKWSRNEQNPSGKATASVVPHHWQPNSGLVMTNDTSDTNPEEAIPCIALSKNDSYVMSACGGKVSLFTMMTFKVLTTFMPPPPASTFLAFHPQDNNIIAIGMEDSTIHIYDVRVDKVKTELKGHQKRITGLAFSTNLGVLVSSGADAQLCVWTNDTWEKKRTVSIQMLAGKAPSGNTRVQFSSDQNHLLVVQETQLAIYDASKMERIYQWIPQDTLSASISHASYSCNSQLVFSAFIDGNIGVFDAENLRLRCRIAQSVINSNPHVHPLVVAAHPHEPNQFAVGLSDGFVKVLEPLESEGKWGTPAPVTNGTPNGKTPASSTTSNPATDQIQR

SEQ ID NO: 191578 - protein, 936 aa, Zea Mays
MAFMMFFCFYIMHLFMQPLQLPPPSPSLARWLTNTAVPSSVQSAVVAASSIPVPPNQVVSMLKRPTITDYQSAVPEQLMKRLRPGGHGIGETTYPTPIPQRAWSMDDLPRTVACSLSHGSNVTSMDFHPTRHTLLLVGSANGEFTLYEIGLRQTLLSKPFKILDTNACSPQFQNAVVKDPPMSINRVTWSPHGELIGVAFTKYLIRVYAYQPPNETRHVLEIVAHSGGVNDIAFSRPNKQLCVVTCGDDKLIKVWNMHGQKLFTFEGHKAPVYSICAHHKQSIQFKFRDYGYGVSTATMAYNIVICLFKWKKGRFIFSTSLDGKIKAWLYDNVGSRVDYEAPGKWCTTLLYSADGTRLFSCGTSKEGDSYLVQWNENDGSIKRTYSGFRKRSAGVAGVVQFDIAQNHILAAGEDNKIKFWDVDNNNMLICTDAEGGLPALPRLRFNKEGNLLAVTTVDNGFKILANADGLRNLRALGSRPPFEAFRLQYEDASMKVSGAPVVATISPNIGRMDHLDRNSPAKPSPMLTGGDTASRSIDIKARISEEKSDKAKASELMEVLNPQQCRVATMPETPDQARKVVRLLYTNSGVGLLALGSNAIQRLWKWSRNEQNPSGKATASVVPHHWQPNSGLVMTNDTSDTNPEEAIPCIALSKNDSYVMSACGGKVSLFTMMTFKVLTTFMPPPPASTFLAFHPQDNNIIAIGMEDSTIHIYDVRVDKVKTELKGHQKRITGLAFSTNLGVLVSSGADAQLCVWTNDTWEKKRTVSIQMLAGKAPSGNTRVQFSSDQNHLLVVQETQLAIYDASKMERIYQWIPQDTLSASISHASYSCNSQLVFSAFIDGNIGVFDAENLRLRCRIAQSVINSNPHVHPLVVAAHPHEPNQFAVGLSDGFVKVLEPLESEGKWGTPAPVTNGTPNGKTPASSTTSNPATDQIQR

SEQ ID NO: 191579 - protein, 510 aa, Zea Mays
MLICTDAEGGLPALPRLRFNKEGNLLAVTTVDNGFKILANADGLRNLRALGSRPPFEAFRLQYEDASMKVSGAPVVATISPNIGRMDHLDRNSPAKPSPMLTGGDTASRSIDIKARISEEKSDKAKASELMEVLNPQQCRVATMPETPDQARKVVRLLYTNSGVGLLALGSNAIQRLWKWSRNEQNPSGKATASVVPHHWQPNSGLVMTNDTSDTNPEEAIPCIALSKNDSYVMSACGGKVSLFTMMTFKVLTTFMPPPPASTFLAFHPQDNNIIAIGMEDSTIHIYDVRVDKVKTELKGHQKRITGLAFSTNLGVLVSSGADAQLCVWTNDTWEKKRTVSIQMLAGKAPSGNTRVQFSSDQNHLLVVQETQLAIYDASKMERIYQWIPQDTLSASISHASYSCNSQLVFSAFIDGNIGVFDAENLRLRCRIAQSVINSNPHVHPLVVAAHPHEPNQFAVGLSDGFVKVLEPLESEGKWGTPAPVTNGTPNGKTPASSTTSNPATDQIQR

SEQ ID NO: 191580 - protein, 1125 aa, Zea Mays
MSSLTRDIVFLVLQFLDEEKFKETMHKFEQESGFFFNMKYFEAKGHAGDWDEVEKYLSGFTKIDDNNYSMKIFFEIRKQKYLEALDRHDGAKALDILVKDLKVFSTFNEESYKEITQLLTFENFRENEQLSNYGDTKSARTVMLVELKKLIKANPLLQEKLVFPTLKASRLRTLINQSLNWQHQHCKNPRPNPDIKTLFTDHTCTLPNGAPASRVSVPLAAVPKAGAAYPPLTAHTPLQLPPPSPSLARWLTNTAVPSSVQSAVVAASSIPVPPNQVVSMLKRPTITDYQSAVPEQLMKRLRPGGHGIGETTYPTPIPQRAWSMDDLPRTVACSLSHGSNVTSMDFHPTRHTLLLVGSANGEFTLYEIGLRQTLLSKPFKILDTNACSPQFQNAVVKDPPMSINRVTWSPHGELIGVAFTKYLIRVYAYQPPNETRHVLEIVAHSGGVNDIAFSRPNKQLCVVTCGDDKLIKVWNMHGQKLFTFEGHKAPVYSICAHHKQSIQFIFSTSLDGKIKAWLYDNVGSRVDYEAPGKWCTTLLYSADGTRLFSCGTSKEGDSYLVQWNENDGSIKRTYSGFRKRSAGVAGVVQFDIAQNHILAAGEDNKIKFWDVDNNNMLICTDAEGGLPALPRLRFNKEGNLLAVTTVDNGFKILANADGLRNLRALGSRPPFEAFRLQYEDASMKVSGAPVVATISPNIGRMDHLDRNSPAKPSPMLTGGDTASRSIDIKARISEEKSDKAKASELMEVLNPQQCRVATMPETPDQARKVVRLLYTNSGVGLLALGSNAIQRLWKWSRNEQNPSGKATASVVPHHWQPNSGLVMTNDTSDTNPEEAIPCIALSKNDSYVMSACGGKVSLFTMMTFKVLTTFMPPPPASTFLAFHPQDNNIIAIGMEDSTIHIYDVRVDKVKTELKGHQKRITGLAFSTNLGVLVSSGADAQLCVWTNDTWEKKRTVSIQMLAGKAPSGNTRVQFSSDQNHLLVVQETQLAIYDASKMERIYQWIPQDTLSASISHASYSCNSQLVFSAFIDGNIGVFDAENLRLRCRIAQSVINSNPHVHPLVVAAHPHEPNQFAVGLSDGFVKVLEPLESEGKWGTPAPVTNGTPNGKTPASSTTSNPATDQIQR

SEQ ID NO: 191581 - protein, 1097 aa, Zea Mays
MSSLTRDIVFLVLQFLDEEKFKETMHKFEQESGFFFNMKYFEAKGHAGDWDEVEKYLSGFTKIDDNNYSMKIFFEIRKQKYLEALDRHDGAKALDILVKDLKVFSTFNEESYKEITQLLTFENFRENEQLSNYGDTKSARTVMLVELKKLIKANPLLQEKLVFPTLKASRLRTLINQSLNWQHQHCKNPRPNPDIKTLFTDHTCTLPNGAPASRVSVPLAAVPKPLQLPPPSPSLARWLTNTAVPSSVQSAVVAASSIPVPPNQVPEQLMKRLRPGGHGIGETTYPTPIPQRAWSMDDLPRTVACSLSHGSNVTSMDFHPTRHTLLLVGSANGEFTLYEIGLRQTLLSKPFKILDTNACSPQFQNAVVKDPPMSINRVTWSPHGELIGVAFTKYLIRVYAYQPPNETRHVLEIVAHSGGVNDIAFSRPNKQLCVVTCGDDKLIKVWNMHGQKLFTFEGHKAPVYSICAHHKQSIQFIFSTSLDGKIKAWLYDNVGSRVDYEAPGKWCTTLLYSADGTRLFSCGTSKEGDSYLVQWNENDGSIKRTYSGFRKRSAGVAGVVQFDIAQNHILAAGEDNKIKFWDVDNNNMLICTDAEGGLPALPRLRFNKEGNLLAVTTVDNGFKILANADGLRNLRALGSRPPFEAFRLQYEDASMKVSGAPVVATISPNIGRMDHLDRNSPAKPSPMLTGGDTASRSIDIKARISEEKSDKAKASELMEVLNPQQCRVATMPETPDQARKVVRLLYTNSGVGLLALGSNAIQRLWKWSRNEQNPSGKATASVVPHHWQPNSGLVMTNDTSDTNPEEAIPCIALSKNDSYVMSACGGKVSLFTMMTFKVLTTFMPPPPASTFLAFHPQDNNIIAIGMEDSTIHIYDVRVDKVKTELKGHQKRITGLAFSTNLGVLVSSGADAQLCVWTNDTWEKKRTVSIQMLAGKAPSGNTRVQFSSDQNHLLVVQETQLAIYDASKMERIYQWIPQDTLSASISHASYSCNSQLVFSAFIDGNIGVFDAENLRLRCRIAQSVINSNPHVHPLVVAAHPHEPNQFAVGLSDGFVKVLEPLESEGKWGTPAPVTNGTPNGKTPASSTTSNPATDQIQR

SEQ ID NO: 191582 - protein, 478 aa, Zea Mays
MPIQVEKREFIFSTSLDGKIKAWLYDNVGSRVDYEAPGKWCTTLLYSADGTRLFSCGTSKEGDSYLVQWNENDGSIKRTYSGFRKRSAGVAGVVQFDIAQNHILAAGEDNKIKFWDVDNNNMLICTDAEGGLPALPRLRFNKEGNLLAVTTVDNGFKILANADGLRNLRALGSRPPFEAFRLQYEDASMKVSGAPVVATISPNIGRMDHLDRNSPAKPSPMLTGGDTASRSIDIKARISEEKSDKAKASELMEVLNPQQCRVATMPETPDQARKVVRLLYTNSGVGLLALGSNAIQRLWKWSRNEQNPSGKATASVVPHHWQPNSGLVMTNDTSDTNPEEAIPCIALSKNDSYVMSACGGKVSLFTMMTFKVLTTFMPPPPASTFLAFHPQDNNIIAIGMEDSTIHIYDVRVDKVKTELKGHQKRITGLAFSTNLGVLVSSGADAQVTISNEFLVCASQDDHVFNNPHLLPYLSCFSL

SEQ ID NO: 191583 - protein, 525 aa, Zea Mays
MSSLTRDIVFLVLQFLDEEKFKETMHKFEQESGFFFNMKYFEAKGHAGDWDEVEKYLSGFTKIDDNNYSMKIFFEIRKQKYLEALDRHDGAKALDILVKDLKVFSTFNEESYKEITQLLTFENFRENEQLSNYGDTKSARTVMLVELKKLIKANPLLQEKLVFPTLKASRLRTLINQSLNWQHQHCKNPRPNPDIKTLFTDHTCTLPNGAPASRVSVPLAAVPKPLQLPPPSPSLARWLTNTAVPSSVQSAVVAASSIPVPPNQVVSMLKRPTITDYQSAVPEQLMKRLRPGGHGIGETTYPTPIPQRAWSMDDLPRTVACSLSHGSNVTSMDFHPTRHTLLLVGSANGEFTLYEIGLRQTLLSKPFKILDTNACSPQFQNAVVKDPPMSINRVTWSPHGELIGVAFTKYLIRVYAYQPPNETRHVLEIVAHSGGVNDIAFSRPNKQLCVVTCGDDKLIKVWNMHGQKLFTFEGHKAPVYSICAHHKQSIQFKFRDYGYGVSTATMAYNIVICLFKWKKGRSACG

SEQ ID NO: 191584 - protein, 93 aa, Zea Mays
MSCASWRVAGSSTCSCRDNHRMEDLQPTEACLKLNVSALNLRFGYMFLHCMEDLQYPVTRHYWTSISMYKQRRTANTSKICHVVEEPMVFFYL

SEQ ID NO: 191585 - protein, 152 aa, Zea Mays
MATSDGRSTPPRRLRTHGEKCGIDLEPKDFPNTPSSIGVTSASSSATTRHLRPTSRHPILHQRGSSTPSSIGAAASNSSTTTRHLRATTPYYKCRCHAHVRSRERKRRKGCGDRGCKMADSPATTRKERARDLQKPSEPRRRRRRLGGSLRR

SEQ ID NO: 191586 - protein, 95 aa, Zea Mays
MATSDGRSTPPRRLRTHGEKCGIDLEPKDFPNTPSSIGVTSASSSATTRHLRPTSRHPILHQRGSSTPSSIGAAASNSSTTTRHLRATTPYYKWC

SEQ ID NO: 191587 - protein, 103 aa, Zea Mays
MWAPCVGARPGRGERDSTIENTSKNKNVELGFSDEERDQEFPDFPSFIPFLPPLSAANLKVYYATRFTIIVGIMVFGGFLAPIIALNAYQVDVLSCGWKLNLV

SEQ ID NO: 191588 - protein, 119 aa, Zea Mays
MMSVKNNTKSGSGNRGDGANDGGGEENPSIWWRKWELIEAATGRSTSSIIVLHRPSVVSCDILFIFGYDLLQIYMHIIGCASVYPCSLQGPSLGDMSSKSKLASYQELGCMCVCIFLVQ

SEQ ID NO: 191589 - protein, 101 aa, Zea Mays
MMSVKNNTKSGSGNRGDGANDGGGEENPSIWWRKWELIEAATGRSTSSIIVLHRPSVDLRSRRTQQARLLHCGVRLLQSSSNHATCLTVVFYHCTCCWINL

SEQ ID NO: 191590 - protein, 69 aa, Zea Mays
MYLRLGICVDVAAKLSKEKFLTFHMLPHCHNTLRAFLYFYDLCFRDLSYLNVVCYFEFLYEDQSSQVIK

SEQ ID NO: 191591 - protein, 383 aa, Zea Mays
MAREPSPEIDDELYNEVYGKAYSGPVASATNSVTPKGNAEKRPLTRDKSDDEDEAPDPNAVPTDFTSREAKVWEAKAKATERNWKKRKEEEMICKICGDPGHFTQGCPSTLGANKRNADFFERVPARDKQVRDLFNERVISQIEKDVGCKIRMDEKFLFVSGKDRLILSKGVSAVHKIIQEGKGKHSPSSPKHDRSRSPVRNTTEFRSKHSDSHRSPSPRNFDSQWSHSPRNASLSQSKGYYNERHRDGRLHNNMPKFSKGSPQAHANFGAKGRPAQSKSPRHTSYLDELPRTHGENNQFAASRVPNDWGIERHGADASSSLRFDMPSHQQTLEELEMEFKKEATQLARARDQEEDEENYRHREIFRCLQLNQTNPKKESNKT

SEQ ID NO: 191592 - protein, 473 aa, Zea Mays
MAREPSPEIDDELYNEVYGKAYSGPVASATNSVTPKGNAEKRPLTRDKSDDEDEAPDPNAVPTDFTSREAKVWEAKAKATERNWKKRKEEEMICKICGDPGHFTQGCPSTLGANKRNADFFERVPARDKQVRDLFNERVISQIEKDVGCKIRMDEKFLFVSGKDRLILSKGVSAVHKIIQEGKGKHSPSSPKHDRSRSPVRNTTEFRSKHSDSHRSPSPRNFDSQWSHSPRNASLSQSKGYYNERHRDGRLHNNMPKFSKGSPQAHANFGAKGRPAQSKSPRHTSYLDELPRTHGENNQFAASRVPNDWGIERHGADASSSLRFDMPSHQQTLEELEMEFKKEATQLARARDQEEDEENYRHRESLRVIRENYMERVITLRNVHAKKWEEFLDTFKSQQQAQPSYIQTGYLGFEQRTAHISATHQPMDSKSTYPYASDSYSAPKAHAAYGRFCEESVSMVRLDLLITHCCYVA

SEQ ID NO: 191593 - protein, 142 aa, Zea Mays
MPSHQQTLEELEMEFKKEATQLARARDQEEDEENYRHRESLRVIRENYMERVITLRNVHAKKWEEFLDTFKSQQQAQPSYIQTGYLGFEQRTAHISATHQPMDSKSTYPYASDSYSAPKAHAAYGEFQHERHDDLGRAYRRY

SEQ ID NO: 191594 - protein, 208 aa, Zea Mays
MACNFSHANFGAKGRPAQSKSPRHTSYLDELPRTHGENNQFAASRVPNDWGIERHGADASSSLRFDMPSHQQTLEELEMEFKKEATQLARARDQEEDEENYRHRESLRVIRENYMERVITLRNVHAKKWEEFLDTFKSQQQAQPSYIQTGYLGFEQRTAHISATHQPMDSKSTYPYASDSYSAPKAHAAYGEFQHERHDDLGRAYRRY

SEQ ID NO: 191595 - protein, 70 aa, Zea Mays
MQEFRDLLLVRSSLGGKYYVCFLLKAGVIYLQVEVGFFISFNGHKRIFPSWHVKQIDVLNDNPIFLKKNY

SEQ ID NO: 191596 - protein, 220 aa, Zea Mays
MVGGGGHSSMDHPGAKDLERGELRRGAPEFADGDDGDGEESQYFSDAEDRSWPSHSRHDSTAYEDYVSLCVSARASSVDADADADGEAVRQHCRKSSCVSEGSLDDVDLEAGLSEIIKASPEKAEQNCRICHLGLESTAVESGAGITLGCSCKGDLSYAHKQCADTWFKIRGNKCSTCKYVISSDDPEDWDYRQLDNPRHLLHGIVHDNGFGHLVRINVC

SEQ ID NO: 191597 - protein, 438 aa, Zea Mays
MNSVQPPPTPCAVEPTTTSLSLLRSSPRSRESRIPLPHAEKGWRRGRRPQPPPTPPRAPDSAPSRAEGSGSRRVRRSSAELPPRRSSSGPTRTAVAMASSRTPPPLPPCGAAPSPPRSGASTSPTTSPSSSATHQWCISTTSSRALSPMSLLSSRLWSPAVASRTGYSMINDAEQKGLITPGKSVLVEATSGNTGIGLAFIAASKGYKLILTMPSSMSMERRVLLRAFGAELVLTDAAKGMKGALDKATEILNKTPNSYMLQQFDNPANPQVHYETTGPEIWEDSKGKVDIFIGGIGTGGTISGAGRFLKEKNPGIKVIGIEPSESNILSGGKPGPHKIQGIGAGFVPRNLDSDILDEVIEISSDEAVETAKQLAVQEGLLVGISSGAAAAAAIKVAKRPENAGKLIVVVFPSFGERYLSSVLYQSIREECENMQPEP

SEQ ID NO: 191598 - protein, 343 aa, Zea Mays
MASWSSPSAAANAASGARFGPFPSGGQRLAPCPSLVRGTPAPTLVLRPHPDGRGHGLLAHTASPPSLRCRAVAAEVGGLNIANDVTQLIGNTPMVYLNNVVKGSVANVAAKLEIMEPCCSVKDRIGYSMINDAEQKGLITPGKSVLVEATSGNTGIGLAFIAASKGYKLILTMPSSMSMERRVLLRAFGAELVLTDAAKGMKGALDKATEILNKTPNSYMLQQFDNPANPQVHYETTGPEIWEDSKGKVDIFIGGIGTGGTISGAGRFLKEKNPGIKVIGIEPSESNILSGGKPGPHKIQGIGAGFVPRNLDSDILDEVIEISSDEAVETAKQLAVQEGLLVS

SEQ ID NO: 191599 - protein, 501 aa, Zea Mays
MACAAAHMFVYNATLCACDPGYYLFTNSTGGGNASSASTSCVSLPRSGDGFGDWQVGSVGASRNQSFYFLTPVLSLDVVRRLTQSQAVILWVALLTLLSWLAFCAAARFAGQDPERHKKLFGARFWVSRLDCIFDNNHYANDQKVLRKRKTELGGTFSVATLILFLGLVIVLLYQAINRRNAQVHRVKPANAPDLLDFVNDLEFHITTVSSMSCAQVVAPSTIAMGTPGFMDFRVLPLSTLLTYSCQNTSEGPSITLKCNGCRIPPRDHYVSWQFVDLPRQPAAAVGFQFNLTAREHGDYKDMSFIYNHLHGLKLLQPLVQDFTQGSILSDLSSLNASLHNPRDGVINTTLFISYLSDYIVEISNENVLGPVSILASIGGLYAFSVAFFLCLMAQCEGRIKKLRDEDTRMLKILSKQRAQRNWNKVRKFVMYTWGPSNLDPTDRSGKWPEGSVMDSIHGSFHKIRKPTRRGTSNGSKPKEPADMAVEIERVGETQQPSSSR

SEQ ID NO: 191600 - protein, 431 aa, Zea Mays
MACAAAHMFVYNATLCACDPGYYLFTNSTGGGNASSASTSCVSLPRSGDGFGDWQVGSVGASRNQSFYFLTPVLSLDVVRRLTQSQAVILWVALLTLLSWLAFCAAARFAGQDPERHKKLFGARFWVSRLDCIFDNNHYANDQKVLRKRKTELGGTFSVATLILFLGLVIVLLYQAINRRNAQVHRVKPANAPDLLDFVNDLEFHITTVSSMSCAQVVAPSTIAMGTPGFMDFRVLPLSTLLTYSCQNTSEGPSITLKCNGCRIPPRDHYVSWQFVDLPRQPAAAVGFQFNLTAREHGDYKDMSFVSGTLSSDNYDDAKLKTFRGPDSNVLKIQLFPQIYNHLHGLKLLQPLVQDFTQGSILSDLSSLNASLHNPRDGVINTTLFISYLSDYIVEISNENVLGPVFLRVLVACMPSVLHFFSVSWLNVKAE

SEQ ID NO: 191601 - protein, 432 aa, Zea Mays
MACAAAHMFVYNATLCACDPGYYLFTNSTGGGNASSASTSCVSLPRSGDGFGDWQVGSVGASRNQSFYFLTPVLSLDVVRRLTQSQAVILWVALLTLLSWLAFCAAARFAGQDPERHKKLFGARFWVSRLDCIFDNNHYANDQKVLRKRKTELGGTFSVATLILFLGLVIVLLYQAINRRNAQVHRVKPANAPDLLDFVNDLEFHITTVSSMSCAQVVAPSTIAMGTPGFMDFRVLPLSTLLTYSCQNTSEGPSITLKCNGCRIPPRDHYVSWQFVDLPRQPAAAVGFQFNLTAREHGDYKDMSFVSGTLSSDNYDDAKLKTFRGPDSNVLKIQLFPQIYNHLHGLKLLQPLVQDFTQGSILSDLSSLNASLHNPRDGVINTTLFISYLSDYIVEISNENVLGPVSILASIGGLYAFSVAFFLCLMAQVKAE

SEQ ID NO: 191602 - protein, 365 aa, Zea Mays
MRLLYQAINRRNAQVHRVKPANAPDLLDFVNDLEFHITTVSSMSCAQVVAPSTIAMGTPGFMDFRVLPLSTLLTYSCQNTSEGPSITLKCNGCRIPPRDHYVSWQFVDLPRQPAAAVGFQFNLTAREHGDYKDMSFVSGTLSSDNYDDAKLKTFRGPDSNVLKIQLFPQIYNHLHGLKLLQPLVQDFTQGSILSDLSSLNASLHNPRDGVINTTLFISYLSDYIVEISNENVLGPVSILASIGGLYAFSVAFFLCLMAQCEGRIKKLRDEDTRMLKILSKQRAQRNWNKVRKFVMYTWGPSNLDPTDRSGKWPEGSVMDSIHGSFHKIRKPTRRGTSNGSKPKEPADMAVEIERVGETQQPSSSR

SEQ ID NO: 191603 - protein, 542 aa, Zea Mays
MACAAAHMFVYNATLCACDPGYYLFTNSTGGGNASSASTSCVSLPRSGDGFGDWQVGSVGASRNQSFYFLTPVLSLDVVRRLTQSQAVILWVALLTLLSWLAFCAAARFAGQDPERHKKLFGARFWVSRLDCIFDNNHYANDQKVLRKRKTELGGTFSVATLILFLGLVIVLLYQAINRRNAQVHRVKPANAPDLLDFVNDLEFHITTVSSMSCAQVVAPSTIAMGTPGFMDFRVLPLSTLLTYSCQNTSEGPSITLKCNGCRIPPRDHYVSWQFVDLPRQPAAAVGFQFNLTAREHGDYKDMSFVSGTLSSDNYDDAKLKTFRGPDSNVLKIQLFPQIYNHLHGLKLLQPLVQDFTQGSILSDLSSLNASLHNPRDGVINTTLFISYLSDYIVEISNENVLGPVSILASIGGLYAFSVAFFLCLMAQCEGRIKKLRDEDTRMLKILSKQRAQRNWNKVRKFVMYTWGPSNLDPTDRSGKWPEGSVMDSIHGSFHKIRKPTRRGTSNGSKPKEPADMAAVPLTMICNTTILPEWSCLYQECR

SEQ ID NO: 191604 - protein, 281 aa, Zea Mays
MLSKSNHVSIVTVDGRPGPGAYGITAVVIGGAIGYLFIRWKGWKLSDMMFVTKRGLSDACNVVGKQVDQVSESVNVAKKHLAGRIDRVDCSLDECQEITEATKEEVTIIHGDLSAFQKEMETVHLVVRSLETKLGRLAYTQDRTTRGIYDLCEFTKRLDQSPKADTRQVTSSTSRPAIESSERIVRVASLPLALEPESPRIEAPKVVRSSTVMSASGLSLLAGTTIPPKRDQPGVYSRASSMKEGSSELPSGVRNSAEPSPRRSGASTLFGGLGFLRNYTS

SEQ ID NO: 191605 - protein, 336 aa, Zea Mays
MVLGNVAIVIGSGIVGSVLTGGEFGLPDFRDAISGAFKFLTKSAKPGKDGPSTSSPHTAELFSQVNHLREELQMLSKSNHVSIVTVDGRPGPGAYGITAVVIGGAIGYLFIRWKGWKLSDMMFVTKRGLSDACNVVGKQVDQVSESVNVAKKHLAGRIDRVDCSLDECQEITEATKEEVTIIHGDLSAFQKEMETVHLVVRSLETKLGRLAYTQDRTTRGIYDLCEFTKRLDQSPKADTRQVASLPLALEPESPRIEAPKVVRSSTVMSASGLSLLAGTTIPPKRDQPGVYSRASSMKEGSSELPSGVRNSAEPSPRRSGASTLFGGLGFLRNYTS

SEQ ID NO: 191606 - protein, 243 aa, Zea Mays
MLSKSNHVSIVTVDGRPGPGAYGITAVVIGGAIGYLFIRWKGWKLSDMMFVTKRGLSDACNVVGKQVDQVSESVNVAKKHLAGRIDRVDCSLDECQEITEATKEEVTIIHGDLSAFQKEMETVHLVVRSLETKLGRLAYTQDRTTRGIYDLCEFTKRLDQSPKADTRQVTSSTSRPAIESSERIVRVKLLRYLTFLKFESSLIDPHIHRLLLYPWLWNRSLLELRHLRLCAHLQSCQHRVLVC

SEQ ID NO: 191607 - protein, 534 aa, Zea Mays
MPGSSAGSSSGVMLPGVGASLGEICRDYMNGRCTKVETDCKFTHPPQQLLMSMLAATSSVSALGHAPLAPSAAAMAAAQAIMAAQALQAHAAQAKAAGGASGSVHKADEADALKRTVQISNLSPLLTVDYVKQLFGLCGKVVDCTITDSKHIAYVEYSKPEEATAALEFNNKNQAIQLQQMQFQQALMMQQSIATQQAAARAATMKSATEAAAARAAEISRKLKAEGFGADNMEEKHAKGKSRSPSPSTRRSKSRSRSPIKYRRSRRSRSYSPPVRRSREQRSRSPSKSRHSKYGSDRSHRDDKDRYSRSGRRESERSRDHHSSSSRRNRSKSRSPRHKKPSRVDSRSPKKQREESLSPSKSRSARAGSRSPRHHKGSKSSPTRDRHSRHSRHSRSRSPGRKHRHSDKRDSRKSEIQDDKRRSHRGSRHDKDESSVKDEGERSHRSNRGDKDERSVKDPVEDKGMDTKVVAHKRSSTVSEDEILNNNSSNHKKYRHEVGLEVDGNDVCSAAADIDRKHETGVDGSLGGAAESAM

SEQ ID NO: 191608 - protein, 273 aa, Zea Mays
MPGSSAGSSSGVMLPGVGASLGEICRDYMNGRCTKVETDCKFTHPPQQLLMSMLAATSSVSALGHAPLAPSAAAMAAAQAIMAAQALQAHAAQAKAAGGASGSVHKADEADALKRTVQISNLSPLLTVDYVKQLFGLCGKVVDCTITDSKHIAYVEYSKPEEATAALEFNNKNVGGRPLNVEMAKSLPSKANNNLPMMMQQAIQLQQMQFQQALMMQQSIATQQAAARAATMKSATEAAAARAAEISRKLKAEGFGADNMEEKHAKGKSRNML

SEQ ID NO: 191609 - protein, 99 aa, Zea Mays
MKSSWSTFLGCRLKIQGSIHFLKFFKGVDIGVCFEGSQCILHFVNEDYVADAQPVRITCSIRSEDLCTRAASEPFCMWMLIYINMCLPDNIACRLRVGI

SEQ ID NO: 191610 - protein, 83 aa, Zea Mays
MLENLCRFFKGVDIGVCFEGSQCILHFVNEDYVADAQPVRITCSIRSEDLCTRAASEPFCMWMLIYINMCLPDNIACRLRVGI

SEQ ID NO: 191611 - protein, 171 aa, Zea Mays
MPLATTAPTPAPPCPPPSPAAAPVRTQLLSSVAKLALTAALVCGSGGPAAVVVVPAAAQAVPFVRPPPPPLQGRPFASSTPYAQSQKLQLGLDKLGKIRPCPSTNPGCVSTNPLGSSGSFASPLLIPESSAGEKTVAPSRRRSVMWSLRSTKTLHMDTTSRRRWTAASAGT

SEQ ID NO: 191612 - protein, 148 aa, Zea Mays
MPLATTAPTPAPPCPPPSPAAAPVRTQLLSSVAKLALTAALVCGSGGPAAVVVVPAAAQAVPFVRPPPPPLQGRPFASSTPYAQSQKLQLGLDKLGPCPSTNPGCVSTNPLGSSGSFASPLLIPESSAGEKTVAVSHLATRQLLAADL

SEQ ID NO: 191613 - protein, 385 aa, Zea Mays
MSLLCFLLDLRNIPPPLLHRLKECLLDLANLYAATTSQTHAVTASPAAAGTLPDRLALGYVYDPSSKPSSSCSSSCPELKIGYRPGEKFSLRDFHHAVNNLPMDGFLADQHGGSLPIRDVSLTSFFSNKAIYSWATDDISKKVIAICMSAQNTEALRRTLMDAAEQCVAVDFIMLEAEAAFMYGRASENANSFVNRICDLENCVVRRYNPETQVLHGLVKRWLEELKDDKEDTLQAVFVFSDPIIDSVKHIYCNLYASANQITDGFPPCQACKCHGHPIDLFTPSKAKWTCPTTNRQLVVSDIVDTAVRIGEQTVLFLPTLEGSSNLRRVSTSISFVVIERTELASMNEGVIMGRSYVVIPSSNDVEASLADERTDQNTKKTRCI

SEQ ID NO: 191614 - protein, 698 aa, Zea Mays
MSLLCFLLDLRNIPPPLLHRLKECLLDLANLYAATTSQTHAVTASPAAAGTLPDRLALGYVYDPSSKPSSSCSSSCPELKIGYRPGEKFSLRDFHHAVNNLPMDGFLADQHGGSLPIRDVSLTSFFSNKAIYSWATDDISKKVIAICMSAQNTEALRRTLMHPVVTVLYQDAAEQCVAVDFIMLEAEAAFMYGRASENANSFVNRICDLENCVVRRYNPETQVLHGLVKRWLEELKDDKEDTLQAVFVFSDPIIDSVKHIYCNLYASANQITDGFPPCQACKCHGHPIDLFTPSKAKWTCPTTNRQLVVSDIVDTAVRIGEQTVLFLPTLEGSSNLRRVSTSISFVVIERTELASMNEGVIMGRSYVVIPSSNDVEASLADERTDQNTKIFYGLCETLFKLDQGLVCSSSCNIETMKIGTLQCYYLLQPSEKGPMLLRRLAASEEILPLPDMTRDCSSKITMEIRNSIETSLSKIMLKDYNPLHHERGFHSELNRLVRDSLQFGSIAPSCAPKDPHNIGSFSEPQVPTCQDLEESMSLNEHEDAAGGLNDHPYSFSEPQPQTSAFITPSKNKASIQSKKGKASPSISEEWEKLIIIDDLDDDFASPAHPRTAVHKPPRPKPPSPVKPLDEKTSRILERLEPPRAKKQRANIVSKASTGAAPAPASKQIKKPLLLPREPSASQPLRPSFSRLRRVPYLT

SEQ ID NO: 191615 - protein, 634 aa, Zea Mays
MSLLCFLLDLRNIPPPLLHRLKELKIGYRPGEKFSLRDFHHAVNNLPMDGFLADQHGGSLPIRDVSLTSFFSNKAIYSWATDDISKKVIAICMSAQNTEALRRTLMDAAEQCVAVDFIMLEAEAAFMYGRASENANSFVNRICDLENCVVRRYNPETQVLHGLVKRWLEELKDDKEDTLQAVFVFSDPIIDSVKHIYCNLYASANQITDGFPPCQACKCHGHPIDLFTPSKAKWTCPTTNRQLVVSDIVDTAVRIGEQTVLFLPTLEGSSNLRRVSTSISFVVIERTELASMNEGVIMGRSYVVIPSSNDVEASLADERTDQNTKIFYGLCETLFKLDQGLVCSSSCNIETMKIGTLQCYYLLQPSEKGPMLLRRLAASEEILPLPDMTRDCSSKITMEIRNSIETSLSKIMLKDYNPLHHERGFHSELNRLVRDSLQFGSIAPSCAPKDPHNIGSFSEPQVPTCQDLEESMSLNEHEDAAGGLNDHPYSFSEPQPQTSAFITPSKNKASIQSKKGKASPSISEEWEKLIIIDDLDDDFASPAHPRTAVHKPPRPKPPSPVKPLDEKTSRILERLEPPRAKKQRANIVSKASTGAAPAPASKQIKKPLLLPREPSASQPLRPSFSRLRRVPYLT

SEQ ID NO: 191616 - protein, 269 aa, Zea Mays
MREQIRTPKRLAASEEILPLPDMTRDCSSKITMEIRNSIETSLSKIMLKDYNPLHHERGFHSELNRLVRDSLQFGSIAPSCAPKDPHNIGSFSEPQVPTCQDLEESMSLNEHEDAAGGLNDHPYSFSEPQPQTSAFITPSKNKASIQSKKGKASPSISEEWEKLIIIDDLDDDFASPAHPRTAVHKPPRPKPPSPVKPLDEKTSRILERLEPPRAKKQRANIVSKASTGAAPAPASKQIKKPLLLPREPSASQPLRPSFSRLRRVPYLT

SEQ ID NO: 191617 - protein, 337 aa, Zea Mays
MGRSYVVIPSSNDVEASLADERTDQNTKIFYGLCETLFKLDQGLVCSSSCNIETMKIGTLQCYYLLQPSEKGPMLLRRLAASEEILPLPDMTRDCSSKITMEIRNSIETSLSKIMLKDYNPLHHERGFHSELNRLVRDSLQFGSIAPSCAPKDPHNIGSFSEPQVPTCQDLEESMSLNEHEDAAGGLNDHPYSFSEPQPQTSAFITPSKNKASIQSKKGKASPSISEEWEKLIIIDDLDDDFASPAHPRTAVHKPPRPKPPSPVKPLDEKTSRILERLEPPRAKKQRANIVSKASTGAAPAPASKQIKKPLLLPREPSASQPLRPSFSRLRRVPYLT

SEQ ID NO: 191618 - protein, 70 aa, Zea Mays
MAADQQPQLQEEMNDAAGGGLRLPPGFRFHPSDFEIVSFYLTNKVLNTRFTCTAITEADLNKIEPWDLPI

SEQ ID NO: 191619 - protein, 297 aa, Zea Mays
MAADQQPQLQEEMNDAAGGGLRLPPGFRFHPSDFEIVSFYLTNKVLNTRFTCTAITEADLNKIEPWDLPSKAKMGEKEWYFFYQKDRKYPTGLRANRATEAGYWKATGKDKEVALKASAYKQDEWVVCRVFHKTTGIKKTTAAPAYQVAMAGAEMDQNQNNFPGIPFPMPMQFPMLPDFSLDPVPPYYPNAAGAGMSMLPMAAGIGGGAGGFQLNGAALFGNPMAAPQPMSFYHQMGAAGTACAGGFDVSAPESRPSSMVSQKDDQANGAEISSMMSVAGPGPATTTTIEMDGVWKY

SEQ ID NO: 191620 - protein, 296 aa, Zea Mays
MAADQQPQLQEEMNDAAGGGLRLPPGFRFHPSDFEIVSFYLTNKVLNTRFTCTAITEADLNKIEPWDLPSKAKMGEKEWYFFYQKDRKYPTGLRANRATEAGYWKATGKDKEVALKASAYKDEWVVCRVFHKTTGIKKTTAAPAYQVAMAGAEMDQNQNNFPGIPFPMPMQFPMLPDFSLDPVPPYYPNAAGAGMSMLPMAAGIGGGAGGFQLNGAALFGNPMAAPQPMSFYHQMGAAGTACAGGFDVSAPESRPSSMVSQKDDQANGAEISSMMSVAGPGPATTTTIEMDGVWKY

SEQ ID NO: 191621 - protein, 128 aa, Zea Mays
MEGGDSSGAGAGGAVAAAAKWRSDASRAFQYYLDRSTPHATGRWLGTLAAAAIYALRVYMVQGFYIVTYGLGIYLLNLLIGFLSPMVDPELDPSAASEGPALPTRGSDEFKPFIRRLPEFKFCARLYI

SEQ ID NO: 191622 - protein, 514 aa, Zea Mays
MEQQFQKETRFYGSLIRLQQNWKVKRQRAVGSPGSEGFMFDLVDSSQLDTTTVLRLSPLSLIPIDQDSSGTLSVQIPQKSLRSLSLKFHGDIVNNAESSAIKKKEGTLTNTTAEAEKDVLADDDVNKSIRYAHSILRDIHKSIFEEQVFDMVIRETFNQSQGINVTGMCEDFLQLAIGQECSLCLSLELSGQNNNAGTVGQQDHMDTNYPGNLAVATVNGKESSNKDVRGFPNPKSLEIYLLHMFHEILRKLREKSRHVVRYQSSAQAAPDDCGLLSHFCMTVAHRIFSNKVHLELESVVSRVPYLHLRSLPTWHSRTSSWSLCLKVPQPILATGRVTKPSDYHELKYKSRSQFSTKVILKDGQISLMGEGSPSIVGSLTGKPSDSRLINSYNCDLEDLPMMLLQQVASQVIHWLHDEAMILGMNVTRDFLCLYFDLGQGETLGLLAHVDPDDTYGCISWYLTVEHPMEEGKMSAGSPESEKRRFLGYLSLEVLYSTLMDLIKLCSTSDQIRAS

SEQ ID NO: 191623 - protein, 72 aa, Zea Mays
MKGGIQQRKKQPLVIKYTWTFLQSATNTQLSATLTCVPRASGSLHLGIDLLKPQGSLTETPTEPQIDSWQLK

SEQ ID NO: 191624 - protein, 65 aa, Zea Mays
MMVTSSPWNFQSVWWQVIRHMVTYSHGGDGGEGEIGPERGDMRGTWSIYFVGCNCKPVIVGCNRC

SEQ ID NO: 191625 - protein, 417 aa, Zea Mays
MRPTKGTSGAPSISSTITESPAKVENENSSESSAISDSVTEEANTDTTVRGNEDAEEKAQDVGSSKDSSVEGLKSVLNFFKSRIPEFKVQVINVDVAEETELAANSSEELVQDDVKSTPESSLEEPATEELEQEEDVPEENTDEESKSTEVKLFISGVVHNKEDAGAKSYVRVPAEINNMEKDSFELYIPGEGSDRDLAETKAAKQKVADMAAKLASELMPSDVAKALWGTAKSSSKINKEVQELLRLTLSKARVKLTENTIFKRIIMDTNSTDPFNGLYVGAFSPYGPEIVQLRRKFGHWNSTDDVEFFEYVEAVKLTGDLSVPAGQITFRAKIGKGKRLENRGAYPEEFGVIASYKGQGRIAQPGFKNPRWVDGELLVLNGKSTIPHLGGAELGFLYSVPEQSFLVLFDRLNLPE

SEQ ID NO: 191626 - protein, 569 aa, Zea Mays
MSTAATACATRAAARPPLNTAPARRAPPSAVRPPSATPARRAAGCCFCAAASSASSPSTWDWTRWSRHFDEVDQAESYASLLQFQLEEAVENEDFAEAAKLKRDIIEATGNDAVAHVMAELKNAIEEQRYQDASRLTRLAGTSLVGWWVGYAKDTDDSIGRIVRISPGVGRYVAKSYNPRQLVTASSGTPLFEIFLVKEDDETYTMKVVHMRPTKGTSGAPSISSTITESPAKVENENSSESSAISDSVTEEANTDTTVRGNEDAEEKAQDVGSSKDSSVEGLKSVLNFFKSRIPEFKVQVINVDVAEETELAANSSEELVQDDVKSTPESSLEEPATEELEQEEDVPEENTDEESKSTEVKLFISGVVHNKEDAGAKSYVRVPAEINNMEKDSFELYIPGEGSDRDLAETKAAKQKVADMAAKLASELMPSDVAKALWGTAKSSSKINKEVQELLRLTLSKARVKLTENTIFKRIIMDTNSTDPFNGLYVGAFSPYGPEIVQLRRKFGHWNSTDDVEFFEYVEAVKLTGDLSVPAGQITFRAKIGKGKRLENRGAYPEEFDCQLQRSG

SEQ ID NO: 191627 - protein, 562 aa, Zea Mays
MEPPLRRGRPGGELRIPPPVPARGGGGERGFRGGRQTQEGHHRGHRKRRCSPRHGRAQECYRGTAVPGRVKVDKACWDQLGWWVGYAKDTDDSIGRIVRISPGVGRYVAKSYNPRQLVTASSGTPLFEIFLVKEDDETYTMKVVHMRPTKGTSGAPSISSTITESPAKVENENSSESSAISDSVTEEANTDTTVRGNEDAEEKAQDVGSSKDSSVEGLKSVLNFFKSRIPEFKVQVINVDVAEETELAANSSEELVQDDVKSTPESSLEEPATEELEQEEDVPEENTDEESKSTEVKLFISGVVHNKEDAGAKSYVRVPAEINNMEKDSFELYIPGEGSDRDLAETKAAKQKVADMAAKLASELMPSDVAKALWGTAKSSSKINKEVQELLRLTLSKARVKLTENTIFKRIIMDTNSTDPFNGLYVGAFSPYGPEIVQLRRKFGHWNSTDDVEFFEYVEAVKLTGDLSVPAGQITFRAKIGKGKRLENRGAYPEEFGVIASYKGQGRIAQPGFKNPRWVDGELLVLNGKSTIPHLGGAELGFLYSVPEQSFLVLFDRLNLPE

SEQ ID NO: 191628 - protein, 110 aa, Zea Mays
MDTNSTDPFNGLYVGAFSPYGPEIVQLRRKFGHWNSTDDVEFFEYVEAVKLTGDLSVPAGQITFRAKIGKGKRLENRGAYPEEFGVVISSCRSDCLKDAKILPVTKVRVE

SEQ ID NO: 191629 - protein, 516 aa, Zea Mays
MVTVLLDEHSCTSSARRKTTTPTSAWVASKAVHLLKNSTMGTKDLRIRLEEKYKCEIPYDTVWKGRQLALKELHGSWEESFQMLFNWRAEVLSRSPGSIIEVDIKEVDGKVYFHRFFCALGPCIEGFLEGCRPYLSIDSTALNGRWNGHMAAATAIDGHNWMYPVAFGFIDGETEDNWVWFMSQMKRAIGDLPLLAVCTDACKGLEKAVKHVFPHAEQRECFRHLMQNFVKRFGGDIFSNMYPAARAYRPGVSQYFYNQVVEASEDAKKWLDMYHKLKWKRSEFNPAIKCDYITNNLAEVFNNWVKDWKDLPVVELADKCRELIMILWQKRRRIADKLNGKVLPAVIQQLKVKTRGLGHLTVTKASYFSAQVDDSTNTHNRHVVKSYLHECTCLEWQHTGKPCQHALALITAQDSVDVELEDFVHDFYSVQRFKNAYKRIIEPLPDKTQWPHVDLPFVVGAPLDKRGRGRYKKLRIKSCLEGGNSKGKKVAAEKGKEADREAANEVDVQAENQSEK

SEQ ID NO: 191630 - protein, 477 aa, Zea Mays
MAAQPALKASFRGELNAVSFLDSSRGPFGQHKVDFTFQRKGKRAISLRRTCCSMQQAPPPAWPGRAVAEPGRRSLDGPKPISIVGSTGSIGTQTLDIVAENPDKFRVVALSAGSNVTLLADQVKTFKPKLVAVRNETLVDELKEALADCEEKPEIIPGEQGVIEVARHPDAITVVTGIVGCAGLKPTVAAIEAGKDIALANKETLIAGGPFVLPLAHKHKVKILPADSEHSAIFQASPSICVICTSVNMRIHLISNAHDRDWPVDRLKDVKVADALKHPNWNMGKKITVDSATLFNKGLEVIEAHYLFGAEYDDIEIVIHPQSIIHSMVETQDSSVLAQLGWPDMRIPILYTLSWPDRIYCSEVTWPRLNLCKLGSLTFKAPDNVKYPSMDLAYAAGRAGGTMTGVLSAANEKAVELFIDEKISYLDIFKVVELTCDAHRNELVASPSLEEIIHYDLWARRHAASLQPASGLSPVPA

SEQ ID NO: 191631 - protein, 419 aa, Zea Mays
MASSSSAATTSGDSQGLKARDACIVGVARTPIGALLGSLSSLPATKLGSIAIQGALKRAKVDPALVQEVFMGNVLSANLGQAPARQAALGAGLPNSVPCTTVNKVCSSGMKAVMFAAQSIQLGINDVVVAGGMESMSNAPKYVAEARRGSRFGHDVLVDGMLKDGLWDVYNDFPMGMCAELCSDQHSISREEQDSYAILSNERGIAAQDSGAFSWEIVPVEISSGRGKPPVVVDKDESLAKFDPVKLKKLGPTFKTNGSVTAGNSSSISDGAAAIVLVSGEKAKNLGLEVIARITGYADAAQAPELFTTAPALAIPKAISNAALQTSQIDYYEVNEAFSVVAIANQRLLGIPSGKLNLSGGAVSLGHPIGCSGARIIVTLLGILRQKNGKFGVAGVCNGGGGASALVLELIYVVLLPPF

SEQ ID NO: 191632 - protein, 421 aa, Zea Mays
MASSSSAATTSGDSQGLKARDACIVGVARTPIGALLGSLSSLPATKLGSIAIQGALKRAKVDPALVQEVFMGNVLSANLGQAPARQAALGAGLPNSVPCTTVNKVCSSGMKAVMFAAQSIQLGINDVVVAGGMESMSNAPKYVAEARRGSRFGHDVLVDGMLKDGLWDVYNDFPMGMCAELCSDQHSISREEQDSYAILSNERGIAAQDSGAFSWEIVPVEISSGRGKPPVVVDKDESLAKFDPVKLKKLGPTFKTNGSVTAGNSSSISDGAAAIVLVSGEKAKNLGLEVIARITGYADAAQAPELFTTAPALAIPKAISNAALQTSQIDYYEVNEAFSVVAIANQRLLGIPSGKLNLSGGAVSLGHPIGCSGARIIVTLLGILRQKNGKFGVAGVCNGGGGASALVLELIAIILSTGDRT

SEQ ID NO: 191633 - protein, 174 aa, Zea Mays
MRRFGADEGRRVYKALENAADRKIKIRIVQHSGFAPDFDQESADLAAGRPNVENATVLFEDWWGSGVVHAKVWISDKKDVYIGSANNDWKSLTQVKELGIYFAGCPHIAKTVEVYFQNLWTLSTLNSTFYTKQAWDTQWQVSRKVPCWSHFLQPKERCRGGVKRISGLIYEETR

SEQ ID NO: 191634 - protein, 646 aa, Zea Mays
MAAEAPPSASASASSSSAPRPPTAAASAPGGGGGGAPASAESYLGSLISLTSKSEIRYEGVLYDINTEESSIGLRNVRSFGTEGRKKDGVQIPASDKVYEYILFRGTDIKDLQVKSSPPQPPPPQAASLHNDPAIIQSHYSQPASTSSSLPSAGGAVLPDFSSQAVQYGLQRPTFQSNLPLYQPGNTPWGSSVAPPAGNAPWGSSVAPPAGNASTLSVPSMYWQGYYAPSSGLPHHLQPPPLLHPTPGLSVPQNLQYPGLNPSLQSGPQKLSELQPSLMPPITSQGPSSGILPATTAPASATLLAPESSKPLLPNMGSLFAPRATSLGATFPLPSQPTAVAETSATVSQNLTSFGSSKVPALPGSTLAYQTVSQSVSSTIAPSSSAQAEMPVPLLAPSGQLLQNTSSILSSSHSMQAPLQLASKEVKPIEPKAKVAEPLLPDPLLPDPPSRAMPEIKEPILPLPKQTPQKYNGSGSRNHHNFRGRGRGRGSASVTAFTEEFDFTAMNEKFNKDEVWGHLGKKSQSRDKDGEVGDDVFDEELEAEETDNPELAVKPVYVKDDFFDSLSSGTFGRGGPNGRGRPSERRRVDTETFGEFPRHRQPYRGGGRGYRGGGRSRGSYYGGRGYGNTGRGGPGNSYPHWGNGRD

SEQ ID NO: 191635 - protein, 568 aa, Zea Mays
MGNSTLTDMTLLPGVEPIVAGLAAGPSSPGQEGKAKKKPMKSLYLRFFETALDGKSRICRLCRKSYCMTTATGNLGKHLNNRHPGYHQLPEGVSFTNQSTIEATMLNRSRKPHVPVRARAQAQPQVQSQSQVQDQAQPKLRSQPKTKATVDIDHVNWLLLRWLISASLPPSTLEDNMLIDSCKYLSSSVRLWPKEKVQEVIIEVFRSMKEDVKETLQCITSRLSVTLDFWTSYEKIVYMSVKCHWIDENWVSQNVLLDVCRIPYPSTGSEVFQVLMDVLVMYNIDSRILACTHNNSQHSIHACHELARQLKTRNLPFCYIPCAARTLKTIIEAGLENVKPILSKIREFILHIHSNQEMMEDFKHWTEVYQEGSWKLPFDHSANWNSDYNMLDVVKKAPNAIENTIKKVEEIFVPRDWVLTTAEKSVIDVLHSYLEPFFKTTTNLCNCKLPTLGLVFFFMDHVFELINLCHGSSHQEWLKNIAGDMSKTTQKFTSEAYNIFTFTAAILDPRIKGELIPETLNSTSNLDDVRNHFVRDYSSTFQAVGNGHGAQDTTEDAVSRRAPRTDFH

SEQ ID NO: 191636 - protein, 693 aa, Zea Mays
MGNSTLTDMTLLPGVEPIVAGLAAGPSSPGQEGKAKKKPMKSLYLRFFETALDGKSRICRLCRKSYCMTTATGNLGKHLNNRHPGYHQLPEGVSFTNQSTIEATMLNRSRKPHVPVRARAQAQPQVQSQSQVQDQAQPKLRSQPKTKATVDIDHVNWLLLRWLISASLPPSTLEDNMLIDSCKYLSSSVRLWPKEKVQEVIIEVFRSMKEDVKETLQCITSRLSVTLDFWTSYEKIVYMSVKCHWIDENWVSQNVLLDVCRIPYPSTGSEVFQVLMDVLVMYNIDSRILACTHNNSQHSIHACHELARQLKTRNLPFCYIPCAARTLKTIIEAGLENVKPILSKIREFILHIHSNQEMMEDFKHWTEVYQEGSWKLPFDHSANWNSDYNMLDVAPNAIENTIKKVEEIFVPRDWVLTTAEKSVIDVLHSYLEPFFKTTTNLCNCKLPTLGLVFFFMDHVFELINLCHGSSHQEWLKNIAGDMSKTTQKFTSEAYNIFTFTAAILDPRIKGELIPETLNSTSNLDDVRNHFVRDYSSTFQAVGNGHGAQDTTEDAGAFAFAEEIIRKRRRVSMTTADDELSQYLAEPPAPISTDALEWWRGHSSRYPRLSLMARDFLAIQGTSLDPEELFTSKGDNIHKQQYCLPLSSMQAIVCIKSWMQSGYQFNFQSTIIDFERLVESATAPDDIDSSGLHS

SEQ ID NO: 191637 - protein, 88 aa, Zea Mays
MARFVDPLVVGRVIGEVVDLFVPSISMTVAYDGPKDISNGCLLKPSATAAPPLVRISGRRNDLYTLIMTDPDAPSPSNPTMREYLHCD

SEQ ID NO: 191638 - protein, 110 aa, Zea Mays
MARFVDPLVVGRVIGEVVDLFVPSISMTVAYDGPKDISNGCLLKPSATAAPPLVRISGRRNDLYTLIMTDPDAPSPSNPTMREYLHWIVINIPGGTDATKVDPNCRSTIK

SEQ ID NO: 191639 - protein, 206 aa, Zea Mays
MNSHKFLLAVLLLLLHNYASYAATSKEDDDFLKTCPSHRCHKHGPEIRFPFRLPSHPPSCGAPGMQLSCSGHDTILDHPVLGSCRVTAIYYRHRVMNVIPPEDSSSHCQLQKLVKRNQSTDVYTPVAHPFSVLVGCSREATNQDGIVGPSSCLSLINNASQLWYLVDPSTDMSTLPMGCEVVAKGIPVPYTYDKNGPIDETFSGRS

SEQ ID NO: 191640 - protein, 217 aa, Zea Mays
MHPMLPHRRRMTTSSKLAHRIDAISMDQRSGSPFGFQASLHPVAHLGCNYHVLGMTPSLIIQFLAPVVNPVSVLVGCSREATNQDGIVGPSSCRSLINNASQLWYLVDPYTDMSTLPMGCEVVAKGIPVPYTYDKNGPKDETFSGRSLFNKKANRAINFGETSFNWNLNNITGSCQRCEQEGKHCGFSSNRRQAFCLHHAAAVQTVGFNPKRTNMFL

SEQ ID NO: 191641 - protein, 206 aa, Zea Mays
MHPMLPHRRRMTTSSKLAHRIDAISMDQRSGSPFGFQASLHPVAHLGCNYHVLGMTPSLIIQFLAPVVNPVSVLVGCSREATNQDGIVGPSSCRSLINNASQLWYLVDPYTDMSTLPMGCEVVAKGIPVPYTYDKNGPKDETFSGRSLFNKKANRAINFGETSFNWNLNNITGSCQRCEQEGKHCGFSSNRRQAFCLHHGGAEVEA

SEQ ID NO: 191642 - protein, 90 aa, Zea Mays
MAPSVPACVQLRLLGKKPPVAPTCMPISTFPRCPGGCILHTAIHFRASRNRRSSFGDQVIQFFEFHEIEDPEHLFGEGKCPLTYYVPFTL

SEQ ID NO: 191643 - protein, 67 aa, Zea Mays
MAARHSRLPAMPCPLPLARSSRSSRVMAGEPRRVPCSLRRAARCTQPAHLLWRAPTVEAATVVPSAR

SEQ ID NO: 191644 - protein, 232 aa, Zea Mays
MAGRGSLAGLLPFGDANDIVLQMANEVLPVVKGVPVLAGVCATDPFRRMEYFLRQLETIGICGVQNFPTVGLFDGNFRQNLEETGMSMEVEMISMAHRMGFLTTPYAFNPDEVAAMAKAGSHIVVAHMGLTTAGSFGAMTATTLDDSVLRVQAIADAAFGVNPDIIVLCHEGNLVKIVIPRSNPNDAHVAGVGKFLMFPRELQLSGESVKLMKLGEAVAKGTINNETLGYFT

SEQ ID NO: 191645 - protein, 337 aa, Zea Mays
MSHPHKVEQYCSKSEFSRKILKSRAGKLSMAFHIFINFVLQTRDDARQFMKYLHPDLGVELPERSYGTDCRIYVPDHPKSRFNNVYEIIFDEFVIAHILGWWGKAIMIRNQPLLWVLSIGFELMELTFRHMLPNFNECWWDSIVLDILICNWFGIWAGMKTVQYFDGRTYEWVGLSRQPNIISKVKRMLGQFTPAQWDKDEWQPTLGPWRFIQVLSLCVVFMAVELNTFFLKFCLWIPPRNPLVVYRLVLWWLIAIPTIREYNTYLQDSKPFKKVGSFCWLSLAICIVELLICIKFGHGLFPRSMPSWLVTFWSAVALLLALFVWTWKYRTVKRKRV

SEQ ID NO: 191646 - protein, 151 aa, Zea Mays
MGANGHHEPRRGCNGTVCNGSIRPLDYFGDVDPWTAWAYKPRTISLLLTGTCLLIWASGALDPERSSSADRVWSVKRGVFAMIAVFLAYSFLQAPSTGLIRPHPAIWRLVHGMTVVYLVALTFLLFQGCFHPLLLKIETRPGVMQYCVSTM

SEQ ID NO: 191647 - protein, 236 aa, Zea Mays
MIRNQPLLWVLSIGFELMELTFRHMLPNFNECWWDSIVLDILICNWFGIWAGMKTVQYFDGRTYEWVGLSRQPNIISKVKRMLGQFTPAQWDKDEWQPTLGPWRFIQVLSLCVVFMAVELNTFFLKFCLWIPPRNPLVVYRLVLWWLIAIPTIREYNTYLQDSKPFKKVGSFCWLSLAICIVELLICIKFGHGLFPRSMPSWLVTFWSAVALLLALFVWTWKYRTVKRKRFSIPNR

SEQ ID NO: 191648 - protein, 60 aa, Zea Mays
MILRKRNIHVLVVPQMLEMTVKHAQVPQQDTLHQKSCQASLCKPIKWHPGHVLPGQLQKK

SEQ ID NO: 191649 - protein, 269 aa, Zea Mays
MAGIRWPPEDPEIFPSRMVSGGAWVPVAPPGEMASDDDRSVAADSWSIKSDYGSTLDDDQRYSDTAEVLLASSSASSAAAPSATVAVHPSSDFSFDKDVHDSSYVEPPLLGLQNFQDGAYAEDLANFHERSHADDWFGTDIMDIRVGWTKNLCSSRDLPSCSVLDIGTGSGRLLQQLAKQGFSDLTGIDYSESAIELARSLAIGDGFEHINFLVDDVLESKLERRFELVMDEGTLDAIGLHPDGPVKRMMYWQSVDSLVSRGGILQNQG

SEQ ID NO: 191650 - protein, 608 aa, Zea Mays
MFFSSIALQLHSMDNLFNFFYPLQVGDAGPILDTLAVVLENISSSMIVARSTISAAYRTAQIVASLPNLSHQSKAFPEALFHQLLLAMLYPDCETHLGAHRIFSVVLVPSSVAPFSFADTSQTRKIDLRRTLSRTTSVFSSSAALFGKLKRDMLSFRESALQDNTKLLPISENANEISANDAKLFKSQTIQRMVSTRDISLPSSTDTSTSSEPTSYQEKDAVTLMLSVRQANLLLSSLWTQALSPENVPRNYEAISHTYSLMLLFSRAKGSGAEVLVGSFQLAFSLRSVSLQAGFLPPSRRRSLFTLATSMLVFFSKAFNVLALIPVVKQVLTESTVDPFLCLIEDCRLQALDSANESCTKLYGSKEDDELALKSLSNIDMNENQSKETSVPLILDSLEDMSESELSAIRKQLLEEFSADDSCLGSHFTETPSQYPAQNGKLHHKSMEVIPLGFVFEDDTLAEASDSSVEPHLQHPPCNNILDVNRLLDSVLETSQHVGRSSVSTNQDLPFKDVANQCEALLIGKQQKLSACMSVCEKEAGESSVEQSSRQDPQADTFLCTADEQWHPNSWPACRCVFNPKPGVMKVSWTELKNSLYKPEDLVMSHQG

SEQ ID NO: 191651 - protein, 535 aa, Zea Mays
MLVKHLEHKNVLKQPDMNLDIIEVTSRLAEHSKAQSSIALMSSISDMVRHMGKSMQSLASDAGPGDNMVKWNSRYGKAVDECLVQLSRKDNTKLLPISENANEISANDAKLFKSQTIQRMVSTRDISLPSSTDTSTSSEPTSYQEKDAVTLMLSVRQANLLLSSLWTQALSPENVPRNYEAISHTYSLMLLFSRAKGSGAEVLVGSFQLAFSLRSVSLQAGFLPPSRRRSLFTLATSMLVFFSKAFNVLALIPVVKQVLTESTVDPFLCLIEDCRLQALDSANESCTKLYGSKEDDELALKSLSNIDMNENQSKETSVPLILDSLEDMSESELSAIRKQLLEEFSADDSCLGSHFTETPSQYPAQNGKLHHKSMEVIPLGFVFEDDTLAEASDSSVEPHLQHPPCNNILDVNRLLDSVLETSQHVGRSSVSTNQDLPFKDVANQCEALLIGKQQKLSACMSVCEKEAGESSVEQSSRQDPQADTFLCTADEQWHPNSWPACRCVFNPKPGVMKVSWTELKNSLYKPEDLVMSHQG

SEQ ID NO: 191652 - protein, 563 aa, Zea Mays
MIVARSTISAAYRTAQIVASLPNLSHQSKAFPEALFHQLLLAMLYPDCETHLGAHRIFSVVLVPSSVAPFSFADTSQTRKIDLRRTLSRTTSVFSSSAALFGKLKRDMLSFRESALQDNTKLLPISENANEISANDAKLFKSQTIQRMVSTRDISLPSSTDTSTSSEPTSYQEKDAVTLMLSVRQANLLLSSLWTQALSPENVPRNYEAISHTYSLMLLFSRAKGSGAEVLVGSFQLAFSLRSVSLQAGFLPPSRRRSLFTLATSMLVFFSKAFNVLALIPVVKQVLTESTVDPFLCLIEDCRLQALDSANESCTKLYGSKEDDELALKSLSNIDMNENQSKETSVPLILDSLEDMSESELSAIRKQLLEEFSADDSCLGSHFTETPSQYPAQNGKLHHKSMEVIPLGFVFEDDTLAEASDSSVEPHLQHPPCNNILDVNRLLDSVLETSQHVGRSSVSTNQDLPFKDVANQCEALLIGKQQKLSACMSVCEKEAGESSVEQSSRQDPQADTFLCTADEQWHPNSWPACRCVFNPKPGVMKVSWTELKNSLYKPEDLVMSHQG

SEQ ID NO: 191653 - protein, 100 aa, Zea Mays
MAIYRKVICSCQEQLPLFANSLLTIVETLLEQNRQDDLRKLACQTLFDFINSQVDSTYMFNLENQIPKLCHLAQEMGEKEKICILHAAGLQALSSMVFVS

SEQ ID NO: 191654 - protein, 588 aa, Zea Mays
MFFSSIALQLHSMDNLFNFFYPLQVGDAGPILDTLAVVLENISSSMIVARSTISAAYRTAQIVASLPNLSHQSKAFPEALFHQLLLAMLYPDCETHLGAHRIFSVVLVPSSVAPFSFADTSQTRKIDLRRTLSRTTSVFSSSAALFGKLKRDMLSFRESALQDNTKLLPISENANEISANDAKLFKSQTIQRMVSTRDISLPSSTDTSTSSEPTSYQEKDAVTLMLSVRQANLLLSSLWTQALSPENVPRNYEAISHTYSLMLLFSRAKGSGAEVLVGSFQLAFSLRSVSLQAGFLPPSRRRSLFTLATSMLVFFSKAFNVLALIPVVKQVLTESTVDPFLCLIEDCRLQALDSANESCTKLYGSKEDDELALKSLSNIDMNENQSKETSVPLILDSLEDMSESELSAIRKQLLEEFSADDSCLGSHFTETPSQYPAQNGKLHHKSMEVIPLGFVFEDDTLAEASDSSVEPHLQHPPCNNILDVNRLLDSVLETSQHVGRSSVSTNQDLPFKDVANQCEALLIGKQQKLSACMSVCEKEAGESSVEQSSRQDPQADTFLCTADEQWHPNSCKLPALCPYDRFLATSGC

SEQ ID NO: 191655 - protein, 309 aa, Zea Mays
MFFSSIALQLHSMDNLFNFFYPLQVGDAGPILDTLAVVLENISSSMIVARSTISAAYRTAQIVASLPNLSHQSKAFPEALFHQLLLAMLYPDCETHLGAHRIFSVVLVPSSVAPFSFADTSQTRKIDLRRTLSRTTSVFSSSAALFGKLKRDMLSFRESALQDNTKLLPISENANEISANDAKLFKSQTIQRMVSTRDISLPSSTDTSTSSEPTSYQEKDAVTLMLSVRQANLLLSSLWTQALSPENVPRNYEAISHTYSLMLLFSRAKLSACFFIKKCFITSRLSSTFTQAFSFYFGNFNARVFFESF

SEQ ID NO: 191656 - protein, 287 aa, Zea Mays
MFFSSIALQLHSMDNLFNFFYPLQVGDAGPILDTLAVVLENISSSMIVARSTISAAYRTAQIVASLPNLSHQSKAFPEALFHQLLLAMLYPDCETHLGAHRIFSVVLVPSSVAPFSFADTSQTRKIDLRRTLSRTTSVFSSSAALFGKLKRDMLSFRESALQDNTKLLPISENANEISANDAKLFKSQTIQRMVSTRDISLPSSTDTSTSSEPTSYQEKDAVTLMLSVRQANLLLSSLWTQALSPENVPRNYEAISHTYSLMLLFSRAKAFSFYFGNFNARVFFESF

SEQ ID NO: 191657 - protein, 317 aa, Zea Mays
MNNDDMSLGMNKHELSISSLVAGFLPPSRRRSLFTLATSMLVFFSKAFNVLALIPVVKQVLTESTVDPFLCLIEDCRLQALDSANESCTKLYGSKEDDELALKSLSNIDMNENQSKETSVPLILDSLEDMSESELSAIRKQLLEEFSADDSCLGSHFTETPSQYPAQNGKLHHKSMEVIPLGFVFEDDTLAEASDSSVEPHLQHPPCNNILDVNRLLDSVLETSQHVGRSSVSTNQDLPFKDVANQCEALLIGKQQKLSACMSVCEKEAGESSVEQSSRQDPQADTFLCTADEQWHPNSCKLPALCPYDRFLATSGC

SEQ ID NO: 191658 - protein, 144 aa, Zea Mays
MYLTNVMLPLEGYFHSVACNSDFRNFTVNNDLRYMIWDNPPQMEPHFLNVTHYDELVGTGVPFARKFKENEPLLDKIDDQVLRRWHQRPVPGAWCTGRRRWFSDPCSQWSNVNIVRPGPQAEKFRTYINQIMEESKSGNNSCKQ

SEQ ID NO: 191659 - protein, 160 aa, Zea Mays
MRLLQLASEAGRPLHGRPRLARHGGKLREAVQGRAAAAAGLARPCGRGGPVRVPGVRVRARRGRGRRGVARVRAGQRRRGGRGAPVQVQALGGGRQQQGERGGDDVHGEEQPLVRGCWRVLGRRPGHVLRDATGDHGRRVGRDARRHGSHRQSRRCCQKL

SEQ ID NO: 191660 - protein, 446 aa, Zea Mays
MTKDDEFKLVKIQNHVLKVNIHCDGCKHKVKKLLQKIEGDVDSETLIRKLTRGGKHAELWSQHKGGSAQQKQQAQQQQQQKQGGNPSKDGHSKSSNNNGGQKKDQGKQGGGGGVGGGLVQGLKAFKNQHGGNKQHHQLPELLSSEDDDGMFDDDDGEFDDDYEEELRFLGDKMSQLGLHGNGNGNNQHHHQNKNGNNVVAVNSNHSNGKKGNGGAAANRHQSQNQKNVNVVNVAAANGKMGGGGGVQNHKNANAINMAAAANAKMGNGAQRNAGAMGGIGMLGLSHGLGAGGAAAAAPPPGFQQGYAGFNHPPYAAAAGYGGGLQQQQQHLQHHQQQQSNSLMASMQGYHHHQYPAATAAVVNNLRGLNGNMVMMHQHQPQPQPQAQMMYHSSPQISSPYTGYYNPYNYYYHHHPHPGSAGYPATASNGDVESMFSDENTKGCVVM

SEQ ID NO: 191661 - protein, 961 aa, Zea Mays
MESLPNGSVNNAEHNQENKKSMDASVPEEVQDVFIYREDVVSLKSKEDVRGLVLEVAGEYDSEGSITDDDIDTEEHEDKTVRGAENGAADGDNASNGAEVESQSSLPDNKVRVLWLDDSEKTEDIDEVVVVDRSFLHGDLVASASDPTGQMGLVLDVNLVVDLQGVNGDMIKGVSSKDLRRIREFNVGDYVVSGLWLGRVDEVLDSVNVLFDDGSVCKVNRADPMCLKPVFGPMHPDTDCPFYPGQRVKAVSSSVFKTSRWLNGLWRASRLEGTVTKVESVSVIVYWIASAHFASDQQPVPPEKQNPKDLTLLSCFSYANWQLTDWCLPHRYTLCTNDTVINSDKHTGQICTCPESSVPLSDIPESQADVQTEQDQMTDTDAGHRQIDVDSTADGLSMSDGDNSCIAKESETSVSSILKEPQDNATSRKKLRKVSLKKHKRTKKRDDSFERALLIANTCTKVDVIWQDGTKECGVAATSLIPIHNPNDHEFFPEQYVVDKVTNDVDDSSEPRRVGLVRSVSAKDRTVTVSWFKPSLHPEETKNIVCNEIVSAYELDGHPDYDYCYGDIVVRLPPVSPVIESTNNKDQMELDRTVDASEGFAASNDAPSNTSASEQLLQKESCSQFTSLSWAGNIVGFQDGEIEVIWGDGSISKVGPHEIYVVGREDDDASLDDGTASDGASWETVDDNEMDVLDDSAKGTGGRKWVKKVQQEWSILEKNLPDYIYVRVFEDRMDLLRAVIVGASGTPYQDGLFFFDFYLPPEYPQVPPSAYYHSGGLRVNPNLYVDGKVCLSLLNTWTGRGNEVWDPSSSSILQVLVSLQGLVLNEKPYFNEAGYEKQVGTVEGEKNAVPYNENTYLLSVKSMLYILRRPPLHFEDFVKSHFRKRGHYILKACEAYLQGNVVGTLTDDACTTNRSTEHSSSVGFKLALAKILPRLITALKEHGADCDQYEHLGKTDPVRES

SEQ ID NO: 191662 - protein, 713 aa, Zea Mays
MESLPNGSVNNAEHNQENKKSMDASVPEEVQDVFIYREDVVSLKSKEDVRGLVLEVAGEYDSEGSITDDDIDTEEHEDKTVRGAENGAADGDNASNGAEVESQSSLPDNKVRVLWLDDSEKTEDIDEVVVVDRSFLHGDLVASASDPTGQMGLVLDVNLVVDLQGVNGDMIKGVSSKDLRRIREFNVGDYVVSGLWLGRVDEVLDSVNVLFDDGSVCKVNRADPMCLKPVFGPMHPDTDCPFYPGQRVKAVSSSVFKTSRWLNGLWRASRLEGTVTKVESVSVIVYWIASAHFASDQQPVPPEKQNPKDLTLLSCFSYANWQLTDWCLPHRYTLCTNDTVINSDKHTGQICTCPESSVPLSDIPESQADVQTEQDQMTDTDAGHRQIDVDSTADGLSMSDGDNSCIAKESETSVSSILKEPQDNATSRKKLRKVSLKKHKRTKKRDDSFERALLIANTCTKVDVIWQDGTKECGVAATSLIPIHNPNDHEFFPEQYVVDKVTNDVDDSSEPRRVGLVRSVSAKDRTVTVSWFKPSLHPEETKNIVCNEIVSAYELDGHPDYDYCYGDIVVRLPPVSPVIESTNNKDQMELDRTVDASEGFAASNDAPSNTSASEQLLQKESCSQFTSLSWAGNIVGFQDGEIEVIWGDGSISKVGPHEIYVVGREDDDASLDDGTASDGASWETVDDNEMDVLDDSAKFPFVLYIIVSYPLSG

SEQ ID NO: 191663 - protein, 101 aa, Zea Mays
MGAERNHEAIQTREPPGEEESVVSIREPSTGIHRSFGQAAYRGDPWLDCPSRTADSGGAGDDDGTQPTSPEPDGGDALLLRIPAFSLFDKDGDDEQATVET

SEQ ID NO: 191664 - protein, 156 aa, Zea Mays
MGNTLPVHDMSESTAAIGSPNKEDLATMTLIKNWMLEIMVWHCYFSYSCFMSQSEGISDWEWEEDEEMIWCYQGQAPSPRNGSSSFAWATCASGYSSPTVFGMGATNSSTMGMQQQQQQGVYGNMQAGAQNVQSMVGLQNQTQNPNFTQQIQQNQQ

SEQ ID NO: 191665 - protein, 136 aa, Zea Mays
MTLIKNWMLEIMVWHCYFSYSCFMSQSEVTRVGNHGISDWEWEEDEEMIWCYQGQAPSPRNGSSSFAWATCASGYSSPTVFGMGATNSSTMGMQQQQQQGVYGNMQAGAQNVQSMVGLQNQTQNPNFTQQIQQNQQ

SEQ ID NO: 191666 - protein, 260 aa, Zea Mays
MKKYLSEKAAAAVQALLPESAGGELSTVCPWADQVRWHYHWASPLHYANTPQVCNFKYSRDCHNSRGQQGMCVVGAINNYTDQLYSYGQKTSYNLTESLMFLAHFVGDVHQPLHVGFQDDEGGNTITVHWYRRKANLHHVWDVSIIDTAIKDFYNKSMDTMVEALKMNLTDGWSDDIVHWENCKNKHATCANDYAIESIHYSCNYAYKDVEQDITLGDDYFFSRYPIVEKRLAQAGIRLALVLNRIFGGGEADDIPLQVQ

SEQ ID NO: 191667 - protein, 239 aa, Zea Mays
MRQDGSPLDLNNLPEEYGKQAAESSTTTATSSVHAVIRPKKTKSGRGKDAAAKVYECRFCSLKFGKSQALGGHMNRHRQERETETLNRARQLVFGNESLAVAAVGAQMSFRDVNMAGAAPPTVLGVGGNFRGGAAGGGSIGDLCVPFRPVLSPQPSYHYLYTAPSTLHPMSYPATYPGPLRQPAVDDYIIGHAVSAGGDTLMQSTHRGSFSCFGAPLTAPPVAATNVQADKVICNCSFT

SEQ ID NO: 191668 - protein, 166 aa, Zea Mays
MNRHRQERETETLNRARQLVFGNESLAVAAVGAQMSFRDVNMAGAAPPTVLGVGGNFRGGAAGGGSIGDLCVPFRPVLSPQPSYHYLYTAPSTLHPMSYPATYPGPLRQPAVDDYIIGHAVSAGGDTLMQSTHRGSFSCFGAPLTAPPVAATNVQADKVICNCSFT

SEQ ID NO: 191669 - protein, 151 aa, Zea Mays
MGSSAPVSGRFPWGEQDVAVCSASRSHPAQPAAERSSVTLPLSTTSVNLTQRQEARGQPASQPSWTTGGRDEWRGLWAALLPALLLLINYCFFFTWCALWRGIQSYSRTRVWCGVETGEHRACLALAPSWISASVFDPLCLSALEGSRGDN

SEQ ID NO: 191670 - protein, 57 aa, Zea Mays
MRGLAMLLGESTSEQADFNLGSNKDLNVSPTKLATIKNAKPAKKMTPRKKKNLTASE

SEQ ID NO: 191671 - protein, 64 aa, Zea Mays
MSISVTSLQLYEKGKKKTEEIKNYPKLSTYNNLVFALPSSCDWPTSRPHLRASTHNLGPNQTLY

SEQ ID NO: 191672 - protein, 370 aa, Zea Mays
MRNLSSTSQKLTELGTLGIAKEMDVLGILLNKRRIIGERLSGRILPAIIHQLKARTRGLGHLSVVKANCFSTEILDSSSTHNRNVVKSYLHHCTCEEWQHTGKPCQHALALITAQQTIDVNMEDFVHEYYSVERFRKAYSRLIEPLPDRTQWPEVDLPFVVGAPLDKRFAGRQRKLRIKSCLEGGGGGKPKKDATVAAVKAEWGTKKQMIRGKRKCKRCGELGHGETSYKCSLNGTKKRKRKPRKNTTKYGENAKLPTKRRGQNGEETNAAVDQTAQETGNADRDVQETNAIISSPIRPNRETILQDSPIRLTRRGLAMLLGESTSEQADFNLGSNKDLNVSPTKLATIKNAKPAKKMTPRKKKNLTASE

SEQ ID NO: 191673 - protein, 303 aa, Zea Mays
MRNLSSTSQKLTELGTLGIAKEMDVLGILLNKRRIIGERLSGRILPAIIHQLKARTRGLGHLSVVKANCFSTEILDSSSTHNRNVVKSYLHHCTCEEWQHTGKPCQHALALITAQQTIDVNMEDFVHEYYSVERFRKAYSRLIEPLPDRTQWPEVDLPFVVGAPLDKRFAGRQRKLRIKSCLEGGGGGKPKKDATVAAVKAEWGTKKQMIRGKRKCKRCGELGHGETSYKCSLNGTKKRKRKPRKNTTKYGENAKLPTKRRGQNGEETNAAVDQTAQETGGLLCCLGRAQVSKLTSTLAATKI

SEQ ID NO: 191674 - protein, 180 aa, Zea Mays
MSLLAAAIPSTSSHFSAPFLPSFHMPRKNLTAPLHRIRRPRPFTVVSSVPDPAAGPVEYTPWLIAGLGNPGNKYYGTRHNVGFEMVDRIAAEEGITMNTIQSKSLLGIGSIGEVPVLVVKPQSYMNYSGEAIGPLAAYYQVPLRHILLIYDDTSLPNGVLRLQKKGGHGRHNGTPNIWSA

SEQ ID NO: 191675 - protein, 132 aa, Zea Mays
MNYSGEAIGPLAAYYQVPLRHILLIYDDTSLPNGVLRLQKKGGHGRHNGLQNVIEHLDGRREFPRLSIGIGSPPGKMDPRAFLLQKFSSEERVQIDTALEQGVDAVRTLVLKGFSGSTERFNLVQKYKFHRV

SEQ ID NO: 191676 - protein, 171 aa, Zea Mays
MDDQDRPAHQQPASNRGQSPAANGQRRPKGTRFSGGPSRWRGGAAQATQAPSSGDSLARMLDAANAQCHAGWRLFGAAAARSKRHPPAMSKAGGGPGSAPGPTAAAAAAAVQKQKSLLQKADADVSSLVDNFSSLINIARVNDPPVRNSQEAFQMEMRAARMEDRSAGSAS

SEQ ID NO: 191677 - protein, 252 aa, Zea Mays
MDDQDRPAHQQPASNRGQSPAANGQRRPKGTRFSGGPSRWRGGAAQATQAPSSGDSLARMLDAANAQCHAGWRLFGAAAARSKRHPPAMSKAGGGPGSAPGPTAAAAAAAVQKQKSLLQKADADVSSLVDNFSSLINIARVNDPPVRNSQEAFQMEMRAARMVHSADSLLKLVSELKRTAIFSGLASLNENVDRRIEVLGQQAEGTERMLERIGQEAAASLKELEGYPRLSVRRFALQGYLRVFYFTLNIAY

SEQ ID NO: 191678 - protein, 217 aa, Zea Mays
MDDQDRPAHQQPASNRGQSPAANGQRRPKGTRFSGGPSRWRGGAAQATQAPSSGDSLARMLDAANAQCHAGWRLFGAAAARSKRHPPAMSKAGGGPGSAPGPTAAAAAAAVQKQKSLLQKADADVSSLVDNFSSLINIARVHSADSLLKLVSELKRTAIFSGLASLNENVDRRIEVLGQQAEGTERMLERIGQEAAASLKELEAHYYSSVVRSPSYD

SEQ ID NO: 191679 - protein, 303 aa, Zea Mays
MDMFSGGEYSDFTEDKKYQHTNFLFDCIIESLDSKFCNLGKCGYKAWLKLPHSLSKDLLKRQLLENISNWRESSGTALRQVSDKEVDQVTDRWDANLEAFDISIAIENDILEALVAYPIDTSSVIGVLHRARCTRRCRCQHGTITTVIKKMMRCAATGGGCVASWSGDRRLPAVNPCSVRMPTGNDGWCAGLRSRAADLAGLEMANLRGGVGGLFRASPRYGRLQATAAVDPEDIPLEKVQVKSSGHVLPYVGVACLGAILFGYHLGVVNGALEYLAKDLGIAENAVLQGMGGWLAHPWLVQH

SEQ ID NO: 191680 - protein, 266 aa, Zea Mays
MAFSPESPRWLFQQGKVTQAELAVKRLYGKEMVTEIMFDLRASGQSSSESEAGWFDLFSKRYWKVVSVGAALFLFQQLAGINAVVYYSTSVFRSAGIASDVAASALVGAANVFGTMVASSLMDKQGRKSLLITSFSGMGASMLLLALSFTWKALAPYSGTLAVVGTVLYVLSFALGAGPVPALLLPEIFASRIRAKAVALSLGMHWVSNFFIGLYFLSVVSKFGISNVYLGFASVCALAVLYIAGNVVETKGRSLEEIERELSVAE

SEQ ID NO: 191681 - protein, 438 aa, Zea Mays
MMRCAATGGGCVASWSGDRRLPAVNPCSVRMPTGNDGWCAGLRSRAADLAGLEMANLRGGVGGLFRASPRYGRLQATAAVDPEDIPLEKVQVKSSGHVLPYVGVACLGAILFGYHLGVVNGALEYLAKDLGIAENAVLQGWVVSTSLAGATLGSFTGGSLADKFGRTRTFILDAVPLALGAFLSATAQDIRTMIIGRLLAGIGIGVSSALVPLYISEISPTEIRGTLGTVNQLFICIGILAALLAGLPLAGNPAWWRTMFGIAVVPSILLAVGMAFSPESPRWLFQQGKVTQAELAVKRLYGKEMVTEIMFDLRASGQSSSESEAGWFDLFSKRYWKVVSVGAALFLFQQLAGINAVVYYSTSVFRSAGIASDVAASALVGAANVFGTMVASSLMDKQGRKSLLITSFSGMGASMLLLALSFTWKALAPYSGTCCHLL

SEQ ID NO: 191682 - protein, 246 aa, Zea Mays
MIIGRLLAGIGIGVSSALVPLYISEISPTEIRGTLGTVNQLFICIGILAALLAGLPLAGNPAWWRTMFGIAVVPSILLAVGMAFSPESPRWLFQQGKVTQAELAVKRLYGKEMVTEIMFDLRASGQSSSESEAGWFDLFSKRYWKVVSVGAALFLFQQLAGINAVVYYSTSVFRSAGIASDVAASALVGAANVFGTMVASSLMDKQGRKSLLITSFSGMGASMLLLALSFTWKALAPYSGTCCHLL

SEQ ID NO: 191683 - protein, 200 aa, Zea Mays
MLHAIPTNEAMKKQIAVASKAMPFYCALPTLSEYMIESGWTRCYFNISEMGFSAYLCYMAMYLIFVEFGIYWMHRELHDIKPLYKHLHATHHIYNKENTLSPFAGLAFHPLDGILQAIPHVLALFLLPTHFRTHIALVFLEGVWTTNIHDCIHGKVWPVMGAGYHTIHHTTYRHNYGHYTVWMDWMFGTLREPDDILKKA

SEQ ID NO: 191684 - protein, 468 aa, Zea Mays
MAAKHLHDGYEQDGDQPGDNRMRRLPSLSTVIREAMMQKEMQNLLRCLEPLIRRVVQEEVEAGLRLMQSLRYIERAPAETPAAERAAWKLAFRTPPQLPIFTGSKIEGEAGRPLEVVLVDACTGSPAAPPVPRALRVELVPVLGDFPPDGREDWAADELERSVVREREGRRPLLTGDVGLTLRDGRATVGELRFTDNSSWVRSRRFRIAARAACGGGGGGGARVQEAVTEAFVVKDHRGERCRKHYPPALTDDVWRLEKIRMGGAFHTRLMCRNVGTVQEFVRMLMVNPDELRAILGDGMRDRMWEAATRHARTCAPDGKVYAHATPHGTIFVDSIFNVVRVDVGGVEWPLQQLNRGQTMMVQQMLQDAYEHRHSLQDAAEEAFMLDGHTDTNAPLLQNAAHVAAPAPVDTPLWFQNAAEMDFPDDDDDDDVVPVPQVNSFGYQWTGQAFHMCAGWVSPEEDMNEELE

SEQ ID NO: 191685 - protein, 480 aa, Zea Mays
MLPWLRACGSVLVAALPRVLGLDGCMGAGSWTRRAATGRWSPSSGAPTCLAATTSWRDATPPSCPCSRGPATWTVDPANYREFVREGFLLTWQLPPPPSPAGTKGNGRKIPLIVSISVAASLLLPCIYVLVWHRQKLEFFLCKKTSSAIEENIEALILAHGSLAPKRYRYSEVTKITSSLNIKLGEGGYGMVFKGRLDDGRLVAVKFLHDSKGDGEEFVNEVMSIGRTSHINIVSLFGFCLEGSKRALIYEYMSNGSLDKYIYTENPKAVLGWDKLYTIAIGIARGLEYLHHSCNTRIVHFDIKPQNILLDQNFHPKIADFGLAKLCHMKESKLSMTGARGTPGFIAPEVHSRTFGVVSTKADVYSYGMMLLEMVGGRKNVNSAAQESSEKYFPHWIYDHFGQEDGLQACEVTRENEGIAKKLSVIGLSCIQILPMHRPTIGKVMEMFERGSDELDMPPRQNFSQILSSTQFECGNHEHD

SEQ ID NO: 191686 - protein, 104 aa, Zea Mays
MPFPRVPQFACYSLARSIFICSTMGRKRVAGRKAFCSSRIDDSSNPISSEFSPTMEVPGPRPVYSPSLRVPGDGGGTEPVSGSSSFSLPLPVDASKGLSLVLVP

SEQ ID NO: 191687 - protein, 285 aa, Zea Mays
MREAQLGSHTIQTHGVRLARKHTHDWVVLILLAALVVAVHYAPPFSRFVGKDMMTDIRYPVKPSTVPAWAVPMISILCPWLVFISIYVARRDVYDLHHAALGVLFAVLITAVFTDVIKTAVGRPRPDFFWRCFPDGKQLYDQVIGDVICHGDKNFLKDGRKSFPSGHTSWSFAGLGFLSLYLSGKIKAFNRQGHVAKLCIVILPLLLASLVGVSRVDDYRHHWEDVFVGGLIGCRPYAYFHMLEELQAANSNNAQNQQSTGDHRIGMSEQQHNRTSRNDLESGTV

SEQ ID NO: 191688 - protein, 265 aa, Zea Mays
MREAQLGSHTIQTHGVRLARKHTHDWVVLILLAALVVAVHYAPPFSRFVGKDMMTDIRYPVKPSTVPAWAVPMISILCPWLVFISIYVARRDVYDLHHAALGVLFAVLITAVFTDVIKTAVGRPRPDFFWRCFPDGKQLYDQVIGDVICHGDKNFLKDGRKSFPSGHTSWSFAGLGFLSLYLSGKIKAFNRQGHVAKLCIVILPLLLASLVGVSRVDDYRHHWEDVFVGGLIGFIMAVLCYLHFFPPPYHDQGCSIFLTKQICFQ

SEQ ID NO: 191689 - protein, 533 aa, Zea Mays
MRSCSGEHMPTKFSPQLVPSNIPLRRWNIPAVPTQARLLHRLQSFSRLYTQRRPRPLPCSYKSSHAATQVEHKRRARLRKPKDCRSALSPPVAAGAMAIGGKEVKDDLEEAPPPVLDEAMRPRRVALFVEPSPFAYISGYKNRFQNFIKHLREMGDEVIVVTNHEGVPQEFHGAKVIGSWSFPCPMYGKVPLSLALSPRIISEVAKFKPDIIHASSPGIMVFGALAIAKLLGVPLVMSYHTHVPVYIPRYTFSWLVEPMWQVIRFLHRAADLTLVPSAAISKDFETAQVISANRIRLWNKGVDSASFHPRFRSHEMRVRLSDGEPEKPLVIHVGRFGREKSLDFLKMVMERLPGVRIAFIGDGPYRGELEKMFEGMPAVFTGMMQGEELSQAYASGDVFIMPSESETLGQVVLESMSSGVPVVAARAGGIPDIIPEDQEGRTSFLFTPGDLDDCLGKVQQLLTNREFRENMGRTARSEMEKCDWRAASKTIRNEFYNAAIWYWRKKHAELVKPLQWLAQMFLPAPEVRSIMQC

SEQ ID NO: 191690 - protein, 347 aa, Zea Mays
MRSCSGEHMPTKFSPQLVPSNIPLRRWNIPAVPTQARLLHRLQSFSRLYTQRRPRPLPCSYKSSHAATQVEHKRRARLRKPKDCRSALSPPVAAGAMAIGGKEVKDDLEEAPPPVLDEAMRPRRVALFVEPSPFAYISGYKNRFQNFIKHLREMGDEVIVVTNHEGVPQEFHGAKVIGSWSFPCPMYGKVPLSLALSPRIISEVAKFKPDIIHASSPGIMVFGALAIAKLLGVPLVMSYHTHVPVYIPRYTFSWLVEPMWQVIRFLHRAADLTLVPSAAISKDFETAQVISANRIRLWNKGVDSASFHPRFRSHEMRVRLSDGEPEKPLVIHVGRFGREKSLDFLKM

SEQ ID NO: 191691 - protein, 380 aa, Zea Mays
MGDEVIVVTNHEGVPQEFHGAKVIGSWSFPCPMYGKVPLSLALSPRIISEVAKFKPDIIHASSPGIMVFGALAIAKLLGVPLVMSYHTHVPVYIPRYTFSWLVEPMWQVIRFLHRAADLTLVPSAAISKDFETAQVISANRIRLWNKGVDSASFHPRFRSHEMRVRLSDGEPEKPLVIHVGRFGREKSLDFLKMVMERLPGVRIAFIGDGPYRGELEKMFEGMPAVFTGMMQGEELSQAYASGDVFIMPSESETLGQVVLESMSSGVPVVAARAGGIPDIIPEDQEGRTSFLFTPGDLDDCLGKVQQLLTNREFRENMGRTARSEMEKCDWRAASKTIRNEFYNAAIWYWRKKHAELVKPLQWLAQMFLPAPEVRSIMQC

SEQ ID NO: 191692 - protein, 348 aa, Zea Mays
MYGKVPLSLALSPRIISEVAKFKPDIIHASSPGIMVFGALAIAKLLGVPLVMSYHTHVPVYIPRYTFSWLVEPMWQVIRFLHRAADLTLVPSAAISKDFETAQVISANRIRLWNKGVDSASFHPRFRSHEMRVRLSDGEPEKPLVIHVGRFGREKSLDFLKMVMERLPGVRIAFIGDGPYRGELEKMFEGMPAVFTGMMQGEELSQAYASGDVFIMPSESETLGQVVLESMSSGVPVVAARAGGIPDIIPEDQEGRTSFLFTPGDLDDCLGKVQQLLTNREFRENMGRTARSEMEKCDWRAASKTIRNEFYNAAIWYWRKKHAELVKPLQWLAQMFLPAPEVRSIMQC

SEQ ID NO: 191693 - protein, 269 aa, Zea Mays
MDGMMVRFNYPPRWKLSPVIRMTQSNRFLRTERNAEVVSYGVYTHSPVLLLRPWHALLPLLLRRAAVVPPPAASGEAVPVPEVPRTGAVAVPLQGERAGPAAVGRQGNLPALDLLDVDLEVLEVADDLAHRPAGDGPRHLLPVRAAEVEPGERPLELLVLRRRPQTRRRREPVAPCGYVVHRRQHVHVRLPHHLCSAPGRCSTSFFPPVGITGLKERNSYRRCRSNTMNIGLEKGGIFVRENWNQLQHLPEKGIDFYERIRLDSRTPLN

SEQ ID NO: 191694 - protein, 217 aa, Zea Mays
MDGMMVRFNYPPRWKLSPVIRMTQSNRFLRTERNAEVVSYGVYTHSPVLLLRPWHALLPLLLRRAAVVPPPAASGEAVPVPEVPRTGAVAVPLQGERAGPAAVGRQGNLPALDLLDVDLEVLEVADDLAHRPAGDGPRHLLPVRAAEVEPGERPLELLVLRRRPQTRRRREPVAPCGYVVHRRQHVHVRLPHHLCSAPGRCSTSFFPPVGITGLKER

SEQ ID NO: 191695 - protein, 61 aa, Zea Mays
MTNIVCLIHSSSNKFGVICSNQTLQQSTTLVLQIHLQDTNKVFPLALSTIYQYEIDIQNII

SEQ ID NO: 191696 - protein, 71 aa, Zea Mays
MLLFCSLVASNCLWVPVGNSEETTTVLSQALRNSLERHIITTYRARSRSSSEPLQRRLGRRFLSLLFQLKN

SEQ ID NO: 191697 - protein, 85 aa, Zea Mays
MLLFCSLVASNCLWVPVGNSEETTTVLSQALRNSLERHIITTYRARSRSSSEPLQRRLGRRFLSLLFQVCYISTCGLSFRQLHFI

SEQ ID NO: 191698 - protein, 64 aa, Zea Mays
MCPLRLLLLKSSRLCDYYSLPISEGIRPDRPEIWLCARFSTLRDTRLSSLGGIVPGLLCSVQFV

SEQ ID NO: 191699 - protein, 91 aa, Zea Mays
MLLFCSLVASNCLWVPVGNSEETTTVLSQALRNSLERHIITTYRARSRSSSEPLQRRLGRRFLSLLFQSSGMQTTRMMPTTRVGTNPCGCS

SEQ ID NO: 191700 - protein, 75 aa, Zea Mays
MSSTGRLTSSASSPTTTPALPLPPSGRRHAASWPNRSGISVRWTVIQSTYFICTALYKYRFELHDEMCIFKFIFK

SEQ ID NO: 191701 - protein, 52 aa, Zea Mays
MCPLRLLLLKSSRLCDYYSLPISEGIRPDSKKKSKALHFLLLIPLCHYYHTG

SEQ ID NO: 191702 - protein, 69 aa, Zea Mays
MCPLRLLLLKSSRLCDYYSLPISEGIRPDSKKKSKALHFLLLIPLCHYYHTALLASSRSSLLFFKLEGK

SEQ ID NO: 191703 - protein, 53 aa, Zea Mays
MCPLRLLLLKSSRLCDYYSLPISEGIRPDSKKKSKALHFLLLIPLCHYYHTGK

SEQ ID NO: 191704 - protein, 100 aa, Zea Mays
MSSTGRLTSSASSPTTTPALPLPPSGRRHAASWPNRSGISVRWTVIQSTYFICTALYKLLDLLHFQTTTTLGKYISINILFNSLLYASIIYSYLITFIFC

SEQ ID NO: 191705 - protein, 249 aa, Zea Mays
MTADAALLAIIVAFLLPLRLVSLGLSLASGRHGTSSRRVRRSCAALAVAAALLAVIFALPRDHVRECAAPIASVSSAGDDDGGFREELRLEVEQLKQQLARLESLWDSKSKAVDDKLDSLEEDNGRVMRAMALDVQSLINERENIKIQESLCSSYFGNSIKEMENEVQILKDGSRKMNSDISSVAKDTAEKVEVLHSAIEKVQVIADEWVKMNYTINRIWSFTKETEKRVEGLYSDLMKTKRKVPFWRD

SEQ ID NO: 191706 - protein, 84 aa, Zea Mays
MPKKAEHETTKLLQRTVLQPPSAHENSRTHKDTRRQIAKVPGSTHTCSTLHTQNNGSTKVQALKMLGTDEEKSAVLERLMMLWT

SEQ ID NO: 191707 - protein, 65 aa, Zea Mays
MMILLALLLDLCTCLHTFLHHSAKEESLETGEINKPQRRKNAVPKLSSKNAIAKEVLDIFRLLIT

SEQ ID NO: 191708 - protein, 165 aa, Zea Mays
MPVRVVDTATPSSQPSPGQEANTGHPSPPSCSLLSAGRSFAGTQNVSSLQKDEAWKVNVRIHGCDLDQGYLCGTMEALNVPLADTPVVTFWEGEIVDAKNYTFFTGKWEASPEDDIRHWSKFPSFTPLLGQIETDGGKSLDFSNYPYIFMDGKSNILSMLESTVG

SEQ ID NO: 191709 - protein, 239 aa, Zea Mays
MSKISATRGNSFLEEGKAASSSSPATSPSAAIRDAGQGGQEANTGHPSPPSCSLLSAGRSFAGTQNVSSLQKDEAWKVNVRIHGCDLDQGYLCGTMEALNVPLADTPVVTFWEGEIVDAKNYTFFTGKWEASPEDDIRHWSKFPSFTPLLGQIETDGGKSLDFSNYPYIFMRWKEQYFVNVGVDCGLTIAGFYYVCFSCSDGSISGFYYDPNSSPFQKLELKCTNEKKSGFTFSSYELQ

SEQ ID NO: 191710 - protein, 236 aa, Zea Mays
MKLPLLIDVLSKKNLQQEFLDHGVLTLLKNWLEPLPDGSMPNMNIRSAVLKLLTDFPIDLEQYDRREQLKKSGLGKVIMFLSKSDEETTANRKLAKELVDKWSRPIFNKSTRFEDMKRYDDERAPYRRPQMKKPSSSSSGMESRDDDLDADFSQRKSGQSSSRQHASRPEASPLDFVIRPQSKIDPEQIRARAKQAVQDQRRLKMNKKLQQLKAPKKKNLQASKLSVEGRGMIKYL

SEQ ID NO: 191711 - protein, 76 aa, Zea Mays
MELVIRLLVPICSCPPGLCSSWIAKDPFANRNKKKSRSPAPPVVPSDIWPSILSSGHINPRDLEAVCSWLNMSHFD

SEQ ID NO: 191712 - protein, 106 aa, Zea Mays
MYDYPVSRNIFYYGSSSCMILILNLFSLEKMRCVSFYFLFFFVENEHHLRSWIAKDPFANRNKKKSRSPAPPVVPSDIWPSILSSGHINPRDLEAVCSWLNMSHFD

SEQ ID NO: 191713 - protein, 150 aa, Zea Mays
MAAGDDGSAVRRLYLSVYNWVSFFGWLQVLYHVTLALLGSGHQAVYAAVKLPLLFSQTAALAEILHSITGLVRSPISATLPQVGARIFVTWCIVWSFPETQSHVLVTSLVLSWSITEVIRYPFFGLREAFGITPSWLLWLREGPSTSALH

SEQ ID NO: 191714 - protein, 185 aa, Zea Mays
MAAGDDGSAVRRLYLSVYNWVSFFGWLQVLYHVTLALLGSGHQAVYAAVKLPLLFSQTAALAEILHSITGLVRSPISATLPQVGARIFVTWCIVWSFPETQSHVLVTSLVLSWSITEVIRYPFFGLREAFGITPSWLLWLRYSTFTVLYPVGLISELGLIFTAMPHMKVSELKKPAGAHACCSSV

SEQ ID NO: 191715 - protein, 540 aa, Zea Mays
MPPPLLEFAILATACRFSKPLTVLRRLGVLGPPTVRRNAAEAFVPSPFRQVVVQSGKLLGTPRFCHTTAGMSECLPDVYASQVLKVLKSTSADNTDLSGALHQFAVHMDEDIILMVLQKQRSNWQVALAFFNWAATLPGYAHGSRAYTEMLDILGRMKKVRHMRQLFDEIPEERRQVVVTNKMFAVLLNRYAGAHKVQEAIEVFYLRKDYGFELDLVGFQILLMSLCRYKHVEEAEALFREKKDEFPHVTKSWNIILNGWCVKGSLRDAQRIWNDIIASKVERDLFTFGTFINALAKNGRISAAVKLFKQMWEKGINPDVAICNCIIDQLCFKKKIPEALEIFGEMNDRLCQADVATYNTLIKYMCKIKRMEKVYELLDDMEAKGCPPNNRTYSYILKTTEKPKDVIALMQRMERTGCKLDSDIYNLILNLYIKWKYEKGMQQIWDEMERRGSGPDQRSFTIMVHGLHSQGKLDEALQYYTTMKSRGMIPEPRTKILVKAMHMKKDGAATEDDSASLWVERKKNSSFFYGCLNHNGCTLG

SEQ ID NO: 191716 - protein, 226 aa, Zea Mays
MADGSASASPPSVSPHQYHRDAIKSSVRNTAANRRREHAIAIGKERREALMRAKRVCRAPLSGSDEAAGEEGDMVVDEEKADLETRTTQAVEELKSALSSQGKGAQNRKTEVLRALRRLLSQSEVPPVDAAIKAGAVPLLVQSLSFGSPDEQLLEAAWCLTNIAAGKPEETKSLLPALPLLIAHLGENSSTLVAEQCAWAIGNVAGEGAELRNTLLAQVVSLPRAF

SEQ ID NO: 191717 - protein, 452 aa, Zea Mays
MRAKRVCRAPLSGSDEAAGEEGDMVVDEEKADLETRTTQAVEELKSALSSQGKGAQNRKTEVLRALRRLLSQSEVPPVDAAIKAGAVPLLVQSLSFGSPDEQLLEAAWCLTNIAAGKPEETKSLLPALPLLIAHLGENSSTLVAEQCAWAIGNVAGEGAELRNTLLAQGALWPLARLMLSNKGSTTRTAAWALSNLIKGPDSKAANELIGIDGILNAIIRNLEKADEELVTEVAWVVVYLSALSEKATSLIVLRGLGNLVAGDGYMVDSVLIVGNSVTDQALSSLIKCLKSDHRVLKKEASWAMSNIAAGSFEHKKLIFGSEATPLLMHLLRTAQFDIRREAAYTLGNLCVVPAGSGNPPTIIVEHLVAIVDGGALPGFINLVRSADIESARLGLQFLELVMRGYPDSQGPKLVETEDGIEAMERFQFHENEMMRNMANGLVDKYFGEDYGL

SEQ ID NO: 191718 - protein, 286 aa, Zea Mays
MNVYNTKEGPDSKAANELIGIDGILNAIIRNLEKADEELVTEVAWVVVYLSALSEKATSLIVRSSMPQLLIGRLLASENLQLLIPVLRGLGNLVAGDGYMVDSVLIVGNSVTDQALSSLIKCLKSDHRVLKKEASWAMSNIAAGSFEHKKLIFGSEATPLLMHLLRTAQFDIRREAAYTLGNLCVVPAGSGNPPTIIVEHLVAIVDGGALPGFINLVRSADIESARLGLQFLELVMRGYPDSQGPKLVETEDGIEAMERFQFHENEMMRNMANGLVDKYFGEDYGL

SEQ ID NO: 191719 - protein, 338 aa, Zea Mays
MATAAVLAATLALFLRAAAATAATAAAEADRIGRLPGQPPVNFSMYSGYVTVDAAAGRALFYWFIEAAGVPAESAPLVLWLNGGPGCSSVGYGASEELGAFRINADGRTLYLNPYPWNKVANMLFLDSPAGVGYSYSNSTSDLYTAGDNKTAHDSYNFLVNWLERFPQYKHRDFYITGESYAGHYVPQLSQLVYRNNKGIEKPILNFKGFMVGNAVIDDYHDFIGTFEYLWTHGLISDETYEKLRLACQFDVSEHASKECNKVFDIAEAEEGNIDAYSIYTPTCKKTSLHKRRLIRGRTPWLPRGYDPCTEKYSTKYYNLPEVQRALHANVTGIPYPW

SEQ ID NO: 191720 - protein, 79 aa, Zea Mays
MSNAEYCGRLKRLAYTLYDCGAAVTDSAPVISMLPGLNSKFAQAIAVISTVTPLSTFLYHKWHSLRVFLCYSQSMWIGE

SEQ ID NO: 191721 - protein, 981 aa, Zea Mays
MQDLLCDAGMIPYPEPFQSMYQKRRLGTLGLEWRPPSVNFAVGPTYNATTGEYQTIPIIDPDRWEPLPEITDFIELEPENEVISDDTDSEYNGMDEYSSEGEQDIMSGDSSGTSYSSGEIDADNPDSAHLRRSRRKKKKSEADLVTSSGRRVIRKRFLDDPGVATVSRPHRGRKSRNGCSSKKKRSPKSRGLRPRRRAAETALITFPKKGVSTEEDEDDSESFSDSELNTDSTEAEQLEWSGQLRTRREINSPFDIDDVTDPSQFTDNKENSGTGKKLVLRIPRRDLRTQFPLGSGKAECSIQDKAVKSLSLANHEPVEHELTIEPGHSPASKAELTIDGDLHDSSAVCSNNSIRWGEVKMRSSKRCKYSEPAGGLWSSSNNVALQDIEGSSSQQIPHEYGDGIQPSVVQNVQEVQHGTILDNIPENNSTDEHTRENFGDLEKIANNINAHADGVNDTVQVPNTSQPQLKVKFKSRGSADAVGNIMNSKHVKDSVQCGDDSSINQPRNADFYIVPKSSQECLDKSTSLHDSKKPYLDASKKYTAVYKRSKRKNKKKMDSDECPNEDSTSISNDDGGYQPAEYSPVAAASSRLRRSARKSFAYNINGTTQDDISEVKVSYGSHEASTSGRRVVTDVREGMWRQNSRSVGLRSARNKRESNSFLDTHPLGRRHQVSFKYSWLMLLEHEDSYRYIPQLDDEVMYLGQGHEEYLKQVQSSEFCPWNRIKGLKAVELCKIQGLDYATYRGSGESCCKLTIEFVDCTSSGFGKTFMITLRELVNFPDFLVERTRYEAAMERNWTHRDKCKVWWRDEEGQVGGTWWEGRVMAVTPKSPDFPESPWEKYVIQYKEDGSDHAHSPWELHETGSLWDPWKHPHMDLTVRDKLLSEMENLQEMSHRDQDHYGVFKLDKVAEKSDFINRFPVQFSIEVIKARLANKYYRTLGAVRHDTTVMLSNAESYFSKSSEMTKKIRKLSELLDQIFSSL

SEQ ID NO: 191722 - protein, 1245 aa, Zea Mays
MDLLCGHENDVNYVQFSGCAVASRSFSSDSSHTSKEENSLKLRNSWFTHNIVTCSRDGSAIIWVPRSRRSHGKIGRWTRAYHLKVPPPPMAPQPPRGGPRQRYQPTPRGVNMIVWSLDNRFVLAAIMDCRICVWNASDGSLVHSLIGHKESTFVLDVHPFNPRIAMSAGYDGKTIIWDIWEGKPVQIYETGQFKLVDGKFSPDGTSLILSDEVGRVFIIGTGQGESQKDAKYDQFFLGDYRPLIRDTNGSVIDQETQLAPYRRNMQDLLCDAGMIPYPEPFQSMYQKRRLGTLGLEWRPPSVNFAVGPTYNATTGEYQTIPIIDPDRWEPLPEITDFIELEPENEVISDDTDSEYNGMDEYSSEGEQDIMSGDSSGTSYSSGEIDADNPDSAHLRRSRRKKKKSEADLVTSSGRRVIRKRFLDDPGVATVSRPHRGRKSRNGCSSKKKRSPKSRGLRPRRRAAETALITFPKKGVSTEEDEDDSESFSDSELNTDSTEAEQLEWSGQLRTRREINSPFDIDDVTDPSQFTDNKENSGTGKKLVLRIPRRDLRTQFPLGSGKAECSIQDKAVKSLSLANHEPVEHELTIEPGHSPASKAELTIDGDLHDSSAVCSNNSIRWGEVKMRSSKRCKYSEPAGGLWSSSNNVALQDIEGSSSQQIPHEYGDGIQPSVVQNVQEVQHGTILDNIPENNSTDEHTRENFGDLEKIANNINAHADGVNDTVQVPNTSQPQLKVKFKSRGSADAVGNIMNSKHVKDSVQCGDDSSINQPRNADFYIVPKSSQECLDKSTSLHDSKKPYLDASKKYTAVYKRSKRKNKKKMDSDECPNEDSTSISNDDGGYQPAEYSPVAAASSRLRRSARKSFAYNINGTTQDDISEVKVSYGSHEASTSGRRVVTDVREGMWRQNSRSVGLRSARNKRESNSFLDTHPLGRRHQVSFKYSWLMLLEHEDSYRYIPQLDDEVMYLGQGHEEYLKQVQSSEFCPWNRIKGLKAVELCKIQGLDYATYRGSGESCCKLTIEFVDCTSSGFGKTFMITLRELVNFPDFLVERTRYEAAMERNWTHRDKCKVWWRDEEGQVGGTWWEGRVMAVTPKSPDFPESPWEKYVIQYKEDGSDHAHSPWELHETGSLWDPWKHPHMDLTVRDKLLSEMENLQEMSHRDQDHYGVFKLDKVAEKSDFINRFPVQFSIEVIKARLANKYYRTLGAVRHDTTVMLSNAESYFSKSSEMTKKIRKLSELLDQIFSSL

SEQ ID NO: 191723 - protein, 1040 aa, Zea Mays
MGSSLHEVGRVFIIGTGQGESQKDAKYDQFFLGDYRPLIRDTNGSVIDQETQLAPYRRNMQDLLCDAGMIPYPEPFQSMYQKRRLGTLGLEWRPPSVNFAVGPTYNATTGEYQTIPIIDPDRWEPLPEITDFIELEPENEVISDDTDSEYNGMDEYSSEGEQDIMSGDSSGTSYSSGEIDADNPDSAHLRRSRRKKKKSEADLVTSSGRRVIRKRFLDDPGVATVSRPHRGRKSRNGCSSKKKRSPKSRGLRPRRRAAETALITFPKKGVSTEEDEDDSESFSDSELNTDSTEAEQLEWSGQLRTRREINSPFDIDDVTDPSQFTDNKENSGTGKKLVLRIPRRDLRTQFPLGSGKAECSIQDKAVKSLSLANHEPVEHELTIEPGHSPASKAELTIDGDLHDSSAVCSNNSIRWGEVKMRSSKRCKYSEPAGGLWSSSNNVALQDIEGSSSQQIPHEYGDGIQPSVVQNVQEVQHGTILDNIPENNSTDEHTRENFGDLEKIANNINAHADGVNDTVQVPNTSQPQLKVKFKSRGSADAVGNIMNSKHVKDSVQCGDDSSINQPRNADFYIVPKSSQECLDKSTSLHDSKKPYLDASKKYTAVYKRSKRKNKKKMDSDECPNEDSTSISNDDGGYQPAEYSPVAAASSRLRRSARKSFAYNINGTTQDDISEVKVSYGSHEASTSGRRVVTDVREGMWRQNSRSVGLRSARNKRESNSFLDTHPLGRRHQVSFKYSWLMLLEHEDSYRYIPQLDDEVMYLGQGHEEYLKQVQSSEFCPWNRIKGLKAVELCKIQGLDYATYRGSGESCCKLTIEFVDCTSSGFGKTFMITLRELVNFPDFLVERTRYEAAMERNWTHRDKCKVWWRDEEGQVGGTWWEGRVMAVTPKSPDFPESPWEKYVIQYKEDGSDHAHSPWELHETGSLWDPWKHPHMDLTVRDKLLSEMENLQEMSHRDQDHYGVFKLDKVAEKSDFINRFPVQFSIEVIKARLANKYYRTLGAVRHDTTVMLSNAESYFSKSSEMTKKIRKLSELLDQIFSSL

SEQ ID NO: 191724 - protein, 1034 aa, Zea Mays
MGSSLHEVGRVFIIGTGQGESQKDAKYDQFFLGDYRPLIRDTNGSVIDQETQLAPYRRNMQDLLCDAEPFQSMYQKRRLGTLGLEWRPPSVNFAVGPTYNATTGEYQTIPIIDPDRWEPLPEITDFIELEPENEVISDDTDSEYNGMDEYSSEGEQDIMSGDSSGTSYSSGEIDADNPDSAHLRRSRRKKKKSEADLVTSSGRRVIRKRFLDDPGVATVSRPHRGRKSRNGCSSKKKRSPKSRGLRPRRRAAETALITFPKKGVSTEEDEDDSESFSDSELNTDSTEAEQLEWSGQLRTRREINSPFDIDDVTDPSQFTDNKENSGTGKKLVLRIPRRDLRTQFPLGSGKAECSIQDKAVKSLSLANHEPVEHELTIEPGHSPASKAELTIDGDLHDSSAVCSNNSIRWGEVKMRSSKRCKYSEPAGGLWSSSNNVALQDIEGSSSQQIPHEYGDGIQPSVVQNVQEVQHGTILDNIPENNSTDEHTRENFGDLEKIANNINAHADGVNDTVQVPNTSQPQLKVKFKSRGSADAVGNIMNSKHVKDSVQCGDDSSINQPRNADFYIVPKSSQECLDKSTSLHDSKKPYLDASKKYTAVYKRSKRKNKKKMDSDECPNEDSTSISNDDGGYQPAEYSPVAAASSRLRRSARKSFAYNINGTTQDDISEVKVSYGSHEASTSGRRVVTDVREGMWRQNSRSVGLRSARNKRESNSFLDTHPLGRRHQVSFKYSWLMLLEHEDSYRYIPQLDDEVMYLGQGHEEYLKQVQSSEFCPWNRIKGLKAVELCKIQGLDYATYRGSGESCCKLTIEFVDCTSSGFGKTFMITLRELVNFPDFLVERTRYEAAMERNWTHRDKCKVWWRDEEGQVGGTWWEGRVMAVTPKSPDFPESPWEKYVIQYKEDGSDHAHSPWELHETGSLWDPWKHPHMDLTVRDKLLSEMENLQEMSHRDQDHYGVFKLDKVAEKSDFINRFPVQFSIEVIKARLANKYYRTLGAVRHDTTVMLSNAESYFSKSSEMTKKIRKLSELLDQIFSSL

SEQ ID NO: 191725 - protein, 1676 aa, Zea Mays
MSFRKRQPSSNGASINLAPLGFPSQELEKVNPVNSVMSTDFESMDGVDIDMREVYFLIMHFLSHGPFKRTFGELCNELLEHQLLPRRYHAWYSRGGFHSGEENDDGISLPLDYVKLAERYPHIGKDHLVKLLKQLMASSYHPHNLIGRVSPNAADVPTLLGSNSFSLLPSDRQDKGTPRLPSYLRWPHIQTDQVHGLSLREIGGFTKHCRAPSVRASCYAIAKPSTLVEKMQIIKRLRGHQNAVYCATFDRTGRYVITGSDDRLVKIWAMETAFCLASCRGHEGDITDLAVSSNNSVVASSSNDFIIRVWRMPDGMPVSVLKGHTGAVTAIAFSPRPGAAFQLLSSSDDGTCRIWDARYSQQPPRLYTPKPPDVAPGKSGDASSSAAQVQPTNHQILCCAFNANGTVFVTGSSDTYARVWNACKSSSDEHEQPIHEMDLLCGHENDVNYVQFSGCAVASRSFSSDSSHTSKEENSLKFTHNIVTCSRDGSAIIWVPRSRRSHGKIGRWTRAYHLKVPPPPMAPQPPRGGPRQRYQPTPRGVNMIVWSLDNRFVLAAIMDCRICVWNASDGSLVHSLIGHKESTFVLDVHPFNPRIAMSAGYDGKTIIWDIWEGKPVQIYETGQFKLVDGKFSPDGTSLILSDEVGRVFIIGTGQGESQKDAKYDQFFLGDYRPLIRDTNGSVIDQETQLAPYRRNMQDLLCDAGMIPYPEPFQSMYQKRRLGTLGLEWRPPSVNFAVGPTYNATTGEYQTIPIIDPDRWEPLPEITDFIELEPENEVISDDTDSEYNGMDEYSSEGEQDIMSGDSSGTSYSSGEIDADNPDSAHLRRSRRKKKKSEADLVTSSGRRVIRKRFLDDPGVATVSRPHRGRKSRNGCSSKKKRSPKSRGLRPRRRAAETALITFPKKGVSTEEDEDDSESFSDSELNTDSTEAEQLEWSGQLRTRREINSPFDIDDVTDPSQFTDNKENSGTGKKLVLRIPRRDLRTQFPLGSGKAECSIQDKAVKSLSLANHEPVEHELTIEPGHSPASKAELTIDGDLHDSSAVCSNNSIRWGEVKMRSSKRCKYSEPAGGLWSSSNNVALQDIEGSSSQQIPHEYGDGIQPSVVQNVQEVQHGTILDNIPENNSTDEHTRENFGDLEKIANNINAHADGVNDTVQVPNTSQPQLKVKFKSRGSADAVGNIMNSKHVKDSVQCGDDSSINQPRNADFYIVPKSSQECLDKSTSLHDSKKPYLDASKKYTAVYKRSKRKNKKKMDSDECPNEDSTSISNDDGGYQPAEYSPVAAASSRLRRSARKSFAYNINGTTQDDISEVKVSYGSHEASTSGRRVVTDVREGMWRQNSRSVGLRSARNKRESNSFLDTHPLGRRHQVSFKYSWLMLLEHEDSYRYIPQLDDEVMYLGQGHEEYLKQVQSSEFCPWNRIKGLKAVELCKIQGLDYATYRGSGESCCKLTIEFVDCTSSGFGKTFMITLRELVNFPDFLVERTRYEAAMERNWTHRDKCKVWWRDEEGQVGGTWWEGRVMAVTPKSPDFPESPWEKYVIQYKEDGSDHAHSPWELHETGSLWDPWKHPHMDLTVRDKLLSEMENLQEMSHRDQDHYGVFKLDKVAEKSDFINRFPVQFSIEVIKARLANKYYRTLGAVRHDTTVMLSNAESYFSKSSEMTKKIRKLSELLDQIFSSL

SEQ ID NO: 191726 - protein, 1221 aa, Zea Mays
MVSFFVSTILHQLSWSLFFFARFTHNIVTCSRDGSAIIWVPRSRRSHGKIGRWTRAYHLKVPPPPMAPQPPRGGPRQRYQPTPRGVNMIVWSLDNRFVLAAIMDCRICVWNASDGSLVHSLIGHKESTFVLDVHPFNPRIAMSAGYDGKTIIWDIWEGKPVQIYETGQFKLVDGKFSPDGTSLILSDEVGRVFIIGTGQGESQKDAKYDQFFLGDYRPLIRDTNGSVIDQETQLAPYRRNMQDLLCDAGMIPYPEPFQSMYQKRRLGTLGLEWRPPSVNFAVGPTYNATTGEYQTIPIIDPDRWEPLPEITDFIELEPENEVISDDTDSEYNGMDEYSSEGEQDIMSGDSSGTSYSSGEIDADNPDSAHLRRSRRKKKKSEADLVTSSGRRVIRKRFLDDPGVATVSRPHRGRKSRNGCSSKKKRSPKSRGLRPRRRAAETALITFPKKGVSTEEDEDDSESFSDSELNTDSTEAEQLEWSGQLRTRREINSPFDIDDVTDPSQFTDNKENSGTGKKLVLRIPRRDLRTQFPLGSGKAECSIQDKAVKSLSLANHEPVEHELTIEPGHSPASKAELTIDGDLHDSSAVCSNNSIRWGEVKMRSSKRCKYSEPAGGLWSSSNNVALQDIEGSSSQQIPHEYGDGIQPSVVQNVQEVQHGTILDNIPENNSTDEHTRENFGDLEKIANNINAHADGVNDTVQVPNTSQPQLKVKFKSRGSADAVGNIMNSKHVKDSVQCGDDSSINQPRNADFYIVPKSSQECLDKSTSLHDSKKPYLDASKKYTAVYKRSKRKNKKKMDSDECPNEDSTSISNDDGGYQPAEYSPVAAASSRLRRSARKSFAYNINGTTQDDISEVKVSYGSHEASTSGRRVVTDVREGMWRQNSRSVGLRSARNKRESNSFLDTHPLGRRHQVSFKYSWLMLLEHEDSYRYIPQLDDEVMYLGQGHEEYLKQVQSSEFCPWNRIKGLKAVELCKIQGLDYATYRGSGESCCKLTIEFVDCTSSGFGKTFMITLRELVNFPDFLVERTRYEAAMERNWTHRDKCKVWWRDEEGQVGGTWWEGRVMAVTPKSPDFPESPWEKYVIQYKEDGSDHAHSPWELHETGSLWDPWKHPHMDLTVRDKLLSEMENLQEMSHRDQDHYGVFKLDKVAEKSDFINRFPVQFSIEVIKARLANKYYRTLGAVRHDTTVMLSNAESYFSKSSEMTKKIRKLSELLDQIFSSL

SEQ ID NO: 191727 - protein, 187 aa, Zea Mays
MSEMDRAFAQGRQSNTTPSIGGSGAHRRHPRRCFRPRCPPTHRGQDPGQSMQPPPSPLPWPPRKPLQTDIDALAAAAAAKLRQLPSPRVGTQNQGTPCRVRHIATRQSRNRLPPLALTPATIETGTPALNPEQYKGAGPTEDTLLAPWPFIVNSSRARATTQIRSREAPVLHPAQDEEADPAMEALH

SEQ ID NO: 191728 - protein, 473 aa, Zea Mays
MSASYGSEDYRGGGGGGGYGGRGGGGGGGYGGGGSGGYGGGGGGGGRGSGGGGFGGGGRGGGGGGRGGGGRGGGREGDWVCPDASCGNVNFARRAECNKCGAPCPSGGGGGGGGGYNRSGGGGGGYNRGSGDYGSGGGGFDRDGGDYNSGGRGGGSGGGGGYNRSGGSDRGFDDHRGGRGGSYGGRDQENQRGSEGGYSAGGYGQAPPQAPPSYGGPAGDYAAPPSSYGGNNAYGSDSAVPPPNSYSGGPGSYPPSYGAPPPHQYGGAPGGQGGLPPTYDGGYGGRSMPGGGGSGGAPPPYHGGGSGYTGSADPEPAGKVKQCDENCDETDNARIYISNLPPDVTVEELQELFGGIGQVGRIKQKRGYKDQWPWNIKIYADDSGKAKGDACLAYEDPSAAHSAGGFYNNYDMRGYKISVVMAEKSAPRAAPSYGHGGGRGGGRGGGGRRDNYRDGGGHGPNRNQGGGSRSRPY

SEQ ID NO: 191729 - protein, 501 aa, Zea Mays
MSASYGSEDYRGGGGGGGYGGRGGGGGRGRGGGGGYGGGGGGGGYGGGGSGGYGGGGGGGGRGSGGGGFGGGGRGGGGGGRGGGGRGGGREGDWVCPDASCGNVNFARRAECNKCGAPCPSGGGGGGGGGYNRSGGGGGGYNRGSGDYGSGGGGFDRDGGDYNSGGRGGGSGGGGGYNRSGGSDRGFDDHRGGRGGSYGGRDQENQRGSEGGYSAGGYGQAPPQAPPSYGGPAGDYAAPPSSYGGNNAYGSDSAVPPPNSYSGGPGSYPPSYGAPPPHQYGGAPGGQGGLPPTYDGGYGGRSMPGGGGSGGAPPPYHGGGSGYTGSADPEPAGKVKQCDENCDETDNARIYISNLPPDVTVEELQELFGGIGQVGRIKQKRGYKDQWPWNIKIYADDSGKAKGDACLAYEDPSAAHSAGGFYNNYDMRGYKISVVMAEKSAPRAAPSYGHGPSARGSTSVGSGEGITGADLIPAFCREDALNHGPLAQWKGFSPLCQACLP

SEQ ID NO: 191730 - protein, 408 aa, Zea Mays
MSASYGSEDYRGGGGGGGYGGRGGGGGRGRGGGGGYGGGGGGGGYGGGGSGGYGGGGGGGYNRGSGDYGSGGGGFDRDGGDYNSGGRGGGSGGGGGYNRSGGSDRGFDDHRGGRGGSYGGRDQENQRGSEGGYSAGGYGQAPPQAPPSYGGPAGDYAAPPSSYGGNNAYGSDSAVPPPNSYSGGPGSYPPSYGAPPPHQYGGAPGGQGGLPPTYDGGYGGRSMPGGGGSGGAPPPYHGGGSGYTGSADPEPAGKVKQCDENCDETDNARIYISNLPPDVTVEELQELFGGIGQVGRIKQKRGYKDQWPWNIKIYADDSGKAKGDACLAYEDPSAAHSAGGFYNNYDMRGYKISVVMAEKSAPRAAPSYGHGGGRGGGRGGGGRRDNYRDGGGHGPNRNQGGGSRSRPY

SEQ ID NO: 191731 - protein, 276 aa, Zea Mays
MSRSLSMRGSMRARRDLPPPEKTIERLESMVDGGNFYEAQQMYKSTSARYIAAQKYSEALDILQSGALVQLKHGQVTCGGELAVLFVDTLITGELPYSEQIFDRIRKMYEAFPRVTVPHFLGDDYDDEGHQLSEAISAAKVRAESCSSFMKAAIRWSAEFGTSRNGSSELHVMLAEYIYSESPETDMTKVSSHFVRGNDPKKFASMLVNFMGKCYPGEDDTAIARGVLMYLSQGNLRDANLLMDEMNEQLKSANSEFPKTDLIQFIKYLLPTYWMK

SEQ ID NO: 191732 - protein, 169 aa, Zea Mays
MYEAFPRVTVPHFLGDDYDDEGHQLSEAISAAKVRAESCSSFMKAAIRWSAEFGTSRNGSSELHVMLAEYIYSESPETDMTKVSSHFVRGNDPKKFASMLVNFMGKCYPGEDDTAIARGVLMYLSQGNLRDANLLMDEMNEQLKSANSEFPKTDLIQFIKYLLPTYWMK

SEQ ID NO: 191733 - protein, 156 aa, Zea Mays
MLAEYIYSESPETDMTKVSSHFVRGNDPKKFASMLVNFMGKCYPGEDDTAIARGVLMYLSQGNLRDANLLMDEMNEQLKSANSEFPKTDLIQFIKYLLPTLERDAYPLFRTLRQKYKTSTDRDAVFQELLDEIAAKFYNIQRQNPLEGLFSEMFKI

SEQ ID NO: 191734 - protein, 58 aa, Zea Mays
MHTAHMQGQVGQTNSLGYLQQLNHPHPHIQTPLCKQCSLRGKTVLTGAKQCLQGRTVF

SEQ ID NO: 191735 - protein, 58 aa, Zea Mays
MTTFLQTNTPCAAYRTAVLQYLANFPHTNNLRTAATPEPQRRRGAGREDWGIFACWLV

SEQ ID NO: 191736 - protein, 127 aa, Zea Mays
MCSIPHCSSTVSSKFPPHKQLANCSNTRTAATARRGAAGLAAEAVEGTALALKRVDDVHGGDGLTASVLSVGDGVADDVLQEDLEHAAGLLVDEPRDALHAALAALAAPRHLRRGDERIGEFLLAGW

SEQ ID NO: 191737 - protein, 631 aa, Zea Mays
MWKLKVAAEGGGGPLLRSTNRFVGRTVWEFEPDLGTPEQRAEVEKARRDFSDHRFQRRHSADVLMRMQMQQYSKGTPLKLDLPAVKKLGEDEDVTEEAVSTSLKRAINRVSALQAHDGHWPGDCSGPLFLLPGLIITLYVTGALNAVLSSEHQREIRRYLYNHQNEDGGWGLHMEGHSAMLGTTLNYVALRLIGEGPDSGGDDGAAMERGRNWILQRGGATYTTSWGKFWLTVLGVYDWSGNNPLPPEMWLLPYHLPFHPGRMWCHCRAVYLPMSYVYGKRFVGRITPLVLELRNELYGDPYSLIDWNKARNQCAKEDLYYPHSFLQDVLWATLHKFVEPVMMHWPGIKFREIALRTAMRHIHYEDESTRYINLGPVNKVLNMLACWIEDPNSEAFKLHVPRIYDYLWLAEDGMKMKGYNGSQLWDAGLTVLAIVNTDLIEEFGPTLKLAHAFVKNSQIIDNCLEDLNQWYRHMSKGGWPFSTADHGWCVSDCTATGLEATLLLSTISPQIVGEAMEVGRVYDGVNCLISLMNNNGGFATFELTRSYAWLEHINPSETFGGIMIDYPYVECTSSSIQALALFKKLYPRHRTEEIDSCISKGANFIESMQRNDGSCVWIGLCWSDIRGQSCN

SEQ ID NO: 191738 - protein, 718 aa, Zea Mays
MWKLKVAAEGGGGPLLRSTNRFVGRTVWEFEPDLGTPEQRAEVEKARRDFSDHRFQRRHSADVLMRMQMQQYSKGTPLKLDLPAVKKLGEDEDVTEEAVSTSLKRAINRVSALQAHDGHWPGDCSGPLFLLPGLIITLYVTGALNAVLSSEHQREIRRYLYNHQNEDGGWGLHMEGHSAMLGTTLNYVALRLIGEGPDSGGDDGAAMERGRNWILQRGGATYTTSWGKFWLTVLGVYDWSGNNPLPPEMWLLPYHLPFHPGRMWCHCRAVYLPMSYVYGKRFVGRITPLVLELRNELYGDPYSLIDWNKARNQCAKEDLYYPHSFLQDVLWATLHKFVEPVMMHWPGIKFREIALRTAMRHIHYEDESTRYINLGPVNKVLNMLACWIEDPNSEAFKLHVPRIYDYLWLAEDGMKMKGYNGSQLWDAGLTVLAIVNTDLIEEFGPTLKLAHAFVKNSQIIDNCLEDLNQWYRHMSKGGWPFSTADHGWCVSDCTATGLEATLLLSTISPQIVGEAMEVGRVYDGVNCLISLMNNNGGFATFELTRSYAWLEHINPSETFGGIMIDYPYVECTSSSIQALALFKKLYPRHRTEEIDSCISKGANFIESMQRNDGSWYGSWGVCFTYATWFAVFGLACAGRTFEDSPAIKKACEFLLSKELPSGGWGESYLSCQDKVYTNLEGMRPHAVNTSWAMLALIRVGQVYLFILQYGSRVLWIHL

SEQ ID NO: 191739 - protein, 418 aa, Zea Mays
MWKLKVAAEGGGGPLLRSTNRFVGRTVWEFEPDLGTPEQRAEVEKARRDFSDHRFQRRHSADVLMRMQMQQYSKGTPLKLDLPAVKKLGEDEDVTEEAVSTSLKRAINRVSALQAHDGHWPGDCSGPLFLLPGLIITLYVTGALNAVLSSEHQREIRRYLYNHQNEDGGWGLHMEGHSAMLGTTLNYVALRLIGEGPDSGGDDGAAMERGRNWILQRGGATYTTSWGKFWLTVLGVYDWSGNNPLPPEMWLLPYHLPFHPGRMWCHCRAVYLPMSYVYGKRFVGRITPLVLELRNELYGDPYSLIDWNKARNQCAKEDLYYPHSFLQDVLWATLHKFVEPVMMHWPGIKFREIALRTAMRHIHYEDESTRYINLGPVNKVLNMLACWIEDPNSEAFKLHVPRIYDYLWLAEDGMKMKV

SEQ ID NO: 191740 - protein, 699 aa, Zea Mays
MWKLKVAAEGGGGPLLRSTNRFVGRTVWEFEPDLGTPEQRAEVEKARRDFSDHRFQRRHSADVLMRMQMQQYSKGTPLKLDLPAVKKLGEDEDVTEEAVSTSLKRAINRVSALQAHDGHWPGDCSGPLFLLPGLIITLYVTGALNAVLSSEHQREIRRYLYNHQNEDGGWGLHMEGHSAMLGTTLNYVALRLIGEGPDSGGDDGAAMERGRNWILQRGGATYTTSWGKFWLTVLGVYDWSGNNPLPPEMWLLPYHLPFHPGRMWCHCRAVYLPMSYVYGKRFVGRITPLVLELRNELYGDPYSLIDWNKARNQCAKEDLYYPHSFLQDVLWATLHKFVEPVMMHWPGIKFREIALRTAMRHIHYEDESTRYINLGPVNKVLNMLACWIEDPNSEAFKLHVPRIYDYLWLAEDGMKMKGYNGSQLWDAGLTVLAIVNTDLIEEFGPTLKLAHAFVKNSQIIDNCLEDLNQWYRHMSKGGWPFSTADHGWCVSDCTATGLEATLLLSTISPQIVGEAMEVGRVYDGVNCLISLMHINPSETFGGIMIDYPYVECTSSSIQALALFKKLYPRHRTEEIDSCISKGANFIESMQRNDGSWYGSWGVCFTYATWFAVFGLACAGRTFEDSPAIKKACEFLLSKELPSGGWGESYLSCQDKVYTNLEGMRPHAVNTSWAMLALIRVGQVYLFILQYGSRVLWIHL

SEQ ID NO: 191741 - protein, 458 aa, Zea Mays
MEGHSAMLGTTLNYVALRLIGEGPDSGGDDGAAMERGRNWILQRGGATYTTSWGKFWLTVLGVYDWSGNNPLPPEMWLLPYHLPFHPGRMWCHCRAVYLPMSYVYGKRFVGRITPLVLELRNELYGDPYSLIDWNKARNQCAKEDLYYPHSFLQDVLWATLHKFVEPVMMHWPGIKFREIALRTAMRHIHYEDESTRYINLGPVNKVLNMLACWIEDPNSEAFKLHVPRIYDYLWLAEDGMKMKGYNGSQLWDAGLTVLAIVNTDLIEEFGPTLKLAHAFVKNSQIIDNCLEDLNQWYRHMSKGGWPFSTADHGWCVSDCTATGLEATLLLSTISPQIVGEAMEVGRVYDGVNCLISLMNNNGGFATFELTRSYAWLEHINPSETFGGIMIDYPYVECTSSSIQALALFKKLYPRHRTEEIDSCISKGANFIESMQRNDGSCVWIGLCWSDIRGQSCN

SEQ ID NO: 191742 - protein, 299 aa, Zea Mays
MVFGGFLAPIVALFMQQSTYRADALLLTTLIRVDKVARFLASFFKQACELAPIFNELVDCVSLDGESLQAALSRQVLNSIHWILVVPMWYISLFRAYRAQQGEQEISEELGGNDLIIVFHRPAVLDREDAYLAQAVFKHMQLDDNEVVLGGGQDAMNVTMIDCRVGKFEAKFYHKARTVTPESEVKCHTTVFSGWFTEPPSRCGLDMSFLNEGLLKNRRGFKLFYSIIFGGTTIHVSMTLNILADLSPLFTWDTKQQSVGLHRMLLFKKLTSVKEKSLGLLTQNFVKLFFTMKVETISL

SEQ ID NO: 191743 - protein, 421 aa, Zea Mays
MDARAPPPPQPHPPRAPSPQPPPAPSRRYGLHFSASSFIQAPLTALLEYSGILRPDPGGGIQQPGTGARPGEVSIRIVAPGEAGTSSERAEEVIVEEEEEDGQATRTRPEDPSPAAGGGEGGRESSSSYQRYDIQQVARWVEQILPFSLLLLVVFIRQHLQGFFVTIWIAAVMFKSNDILCKQTALKRERKIPVLVGITILFVVHVSGFYWCYKNGDLIRPLMMLPPKEIPPFWHAIFIILVNDTMVRQTAMVVKCLLLMYYKNSRGRSYRRQGQMLTIVEYFLLLYRALLPTPVWYRFFLNKEYGSLFSSLTTGLYLTFKLTSVVEKSFLTALRALSHKDFHYGSYATSEQVVAAGDLCAICQEKMHVPILLRCKHIFCEDCVSEWFERERTCPLCRALVKPADLRSFSDGSTSLFFQLF

SEQ ID NO: 191744 - protein, 201 aa, Zea Mays
MMLPPKEIPPFWHAIFIILVNDTMVRQTAMVVKCLLLMYYKNSRGRSYRRQGQMLTIVEYFLLLYRALLPTPVWYRFFLNKEYGSLFSSLTTGLYLTFKLTSVVEKVQSFLTALRALSHKDFHYGSYATSEQVVAAGDLCAICQEKMHVPILLRCKHIFCEDCVSEWFERERTCPLCRALVKPADLRSFSDGSTSLFFQLF

SEQ ID NO: 191745 - protein, 382 aa, Zea Mays
MSSHVSTSRGLHPPGKLGTLDSPGAWQPPAPMAQPEAGRGDDQEVRLLSVAWNQDCGCFAAGTSNGFRIFNCEPFKETFRRDLKSGGFAIVEMLFRCNVLALVGGGSNVLYPPNKVIIWDDLLSRCIGEFAFRSDVRAVKLAKDYIVIVLERKIFVYNFTDLKLLYQIDTLSNPNGLCCLSHHSNTSVLACPGLHQGHVRVEHFGLQMVKTIPAHDSHISCMSLTMDGLLLATASTKGTLIRIFNTMDGTRLQEVRRGLDKAEIYSIALSPNVQWLAVSSDKGTVHIFSLRVRVAGVDSSNEQRALEGPRMDHQNSSSSIDPLIQANTGSNASSSLSFMRGILPKYFSSEWSFAQFHLPEVTRYIVAFGAQNTVMMVGLDGR

SEQ ID NO: 191746 - protein, 216 aa, Zea Mays
MLIHGGKKKRLVLKRRGFRDFAPLTPEEITLVLKALGFTKDTLIYIASGEIYGGERRLAVLKAAYPKLVRKEKILSPDELRPFQNHSTQMAALDYMVSLASDIFIPSYDGNMARVVEGHRRYMGFRKTIALDRKKLVELLDLFQGRALSWDEFSGAVKEAHKSRTGQPTDRKAIPGQPKEEDYFYANPQECLGSSILTARPGNPLPMNNGASTTVV

SEQ ID NO: 191747 - protein, 296 aa, Zea Mays
MLRCRVNFDALRFTPQIEALGRQLISTLQRSGQFVVLHLRYEMDMLSFSGCTHGCSTEEAEELTRMRSVSFTVTHYSTLCATSTLRWKKRLVLKRRGFRDFAPLTPEEITLVLKALGFTKDTLIYIASGEIYGGERRLAVLKAAYPKLVRKEKILSPDELRPFQNHSTQMAALDYMVSLASDIFIPSYDGNMARVVEGHRRYMGFRKTIALDRKKLVELLDLFQGRALSWDEFSGAVKEAHKSRTGQPTDRKAIPGQPKEEDYFYANPQECLGSSILTARPGNPLPMNNGASTTVV

SEQ ID NO: 191748 - protein, 302 aa, Zea Mays
MRAVASAVVWTAVVQVASIAGLFRPRVVADCGGKGGGGAAAGLAALAGEDSAAARLSPPALVPKRIYKSNGYLRVTCNGGLNQMRAGICDMVTIARHLNLTLVVPELDKRSFWADPSDFGDIFDVDHFINSLRDELMIVKELPLKLQLIRTKKRLYSMSPVSWSNETYYLKRILPLARKHKVIHFDKSDARLANNGLPVQLQMLRCRVNFDALRFTPQIEALGRQLISTLQRSGQFVVLHLRYEMDMLSFSGCTHGCSTEEAEELTRMRYAYPWWKEKEIGSEAKRLQGLCPPHARGDYSSA

SEQ ID NO: 191749 - protein, 69 aa, Zea Mays
MALPAACSLCGEDGREVIRLVAEDAGTGVREVLHPGQLSNGAVGSDTDRVAEEVAREVLLQVITRVQVP

SEQ ID NO: 191750 - protein, 298 aa, Zea Mays
MPPVIQDLWPCLLCLRRIIFFVCRLVRDATLPRRAPPPADMDLLRSHLHKVRIPEPTNRIHKDECCVSFDTPRSEGGLYVDMVSFLGFGREYVEWNFEKTGNPVYLHIVQRRKPEPDEADRPLKKPTLLAIGVEGGFGDQEPEYDETFEIVILPDFICLPFPSVDLPEKVRLAVDKVLLAESADRKEQLAAWVADKKNISAYAMDLQQLDNGVIVPPTGWKCSKCDKTENLWLNLTDGMILCGRKLWDGSGGNNHAIEHYEQTKYPLAVKLGTITADLEAAAQMFSRTLKMIVLKIRY

SEQ ID NO: 191751 - protein, 518 aa, Zea Mays
MPPVIQDLWPCLLCLRRIIFFVCRLVRDATLPRRAPPPADMDLLRSHLHKVRIPEPTNRIHKDECCVSFDTPRSEGGLYVDMVSFLGFGREYVEWNFEKTGNPVYLHIVQRRKPEPDEADRPLKKPTLLAIGVEGGFGDQEPEYDETFEIVILPDFICLPFPSVDLPEKVRLAVDKVLLAESADRKEQLAAWVADKKNISAYAMDLQQLDNGVIVPPTGWKCSKCDKTENLWLNLTDGMILCGRKLWDGSGGNNHAIEHYEQTKYPLAVKLGTITADLEAADVFSYPEDDSVEDPLLAQHLSHFGIDFSSLQKTEMTTAERELDANTNYDWNRIQESGKDAELLFGPGYTGLANLGNSCYMASIMQVMFSIHPFISRYFEKQSLKAAFATAPADPTVDLNMQLTKLAHGLLSGKYSAPAKEGQEGIRSRMFKSVITANHPEFSSMRQQDVLEFFLHLIDRVEKANPGDRELNPFSGFKFVVEERVQCPSGKVSYNKRSDNVLSLSIPLHEATNKARSF

SEQ ID NO: 191752 - protein, 509 aa, Zea Mays
MTEMTTAERELDANTNYDWNRIQESGKDAELLFGPGYTGLANLGNSCYMASIMQVMFSIHPFISRYFEKQSLKAAFATAPADPTVDLNMQLTKLAHGLLSGKYSAPAKEGQEGIRSRMFKSVITANHPEFSSMRQQDVLEFFLHLIDRVEKANPGDRELNPFSGFKFVVEERVQCPSGKVSYNKRSDNVLSLSIPLHEATNKEQLEAFNEKKAAMNLDGKEVSNEDIVRPRVPLEACLSSFSGPEEIPDFYSTALNSKTTVTKTAGFTTFPDYLVLHMHVYIDVPDTIDITHMRSKGLQPGEELLPEGGSGDDSAEPANPVASEDIVTQLASMGFNYLHCQKAAINTSNTGVEEAMNWLLSHMDDPDINDPISKDSRAYEPSVDEASVQTLISFGFQEDIAIKALKASGGNIEKATDWIFSHPEASTSASADSSTSNVNADDTYIPDGSGRYKLMAFVSHMGTSTHCGHYVAHVLKDGRWTIFNDSKVAVSVDLPKEMGYLYFFQRISN

SEQ ID NO: 191753 - protein, 235 aa, Zea Mays
MASAAAEAPGASASSAENRLLQSLAERGWRFRDPTDEAIQALLLASPTPSPEAVESELVSMDLRMFGGKCLPDRAAAGGTSKRLSYLHGPVVLQIVSLRDIYHSSIDASFKNPQQRRLLRFGLTDGICEAVAIEFSPIPFITEEIAPGTKIRLENRVPINNGILCLSAKNVTVIGGAVQSLYEEWQMNQKYSGLSRPSLRLSPSDDGVGPPPFEKLDIEARPCRETKVQAYPGNG

SEQ ID NO: 191754 - protein, 244 aa, Zea Mays
MNQKYSGLSRPSLRLSPSDDGVGPPPFEKLDIEARPCRETKVQAYPARKLAVTHDHGPVNSGGKPMNEGSNDENRDNIESKVESKQITQDSRPKEVSEAVPVQNQAAAQKLLQKMSQAVPEDRRGRGHRFKGKGKEEDAQVFTLDEWEKRKAISSKPAAESYVHDTSRDEELARQLQEQLDLEDLHGGAGAGVLHGGAESSDAERLRMSMFSFSGPDEAGGGRRDFRGRGRGRGGGRRRGRGRF

SEQ ID NO: 191755 - protein, 179 aa, Zea Mays
MNEGSNDENRDNIESKVESKQITQDSRPKEVSEAVPVQNQAAAQKLLQKMSQAVPEDRRGRGHRFKGKGKEEDAQVFTLDEWEKRKAISSKPAAESYVHDTSRDEELARQLQEQLDLEDLHGGAGAGVLHGGAESSDAERLRMSMFSFSGPDEAGGGRRDFRGRGRGRGGGRRRGRGRF

SEQ ID NO: 191756 - protein, 250 aa, Zea Mays
MASAAAEAPGASASSAENRLLQSLAERGWRFRDPTDEAIQALLLASPTPSPEAVESELVSMDLRMFGGKCLPDRAAAGGTSKRLSYLHGPVVLQIVSLRDIYHSSIDASFKNPQQRRLLRFGLTDGICEAVAIEFSPIPFITEEIAPGTKIRLENRVPINNGILCLSAKNVTVIGGAVQSLYEEWQMNQKYSGLSRPSLRLSPSDDGVGPPPFEKLDIEARPCRETKVQAYPGSWQLLMTMDQLILVASQ

SEQ ID NO: 191757 - protein, 440 aa, Zea Mays
MHPRSPTPHPIQYQSCLPRIQHRQAELLSSAAGVEHAVVEGGDAVRGDALRDEPRPGLVRPRLHQDARGDVVQVGERHDVRGRAPAVVHLREAEARPVGHQQRAVVGRDLVRVDAGGAGLARRPPRELRGHPPLAVLDDPHHLRHRGARHLPRGRRHAHDVVAVAVEPGASARERAVQRGPRVHGEADVDEGVRLEPRRAGAAPPRLGDEHLERGAPPGARRVRRAVLRLVVPDVVGGDVHGEVRQPPGAGVGGREPPHQRRRRVRDRVAAPLRLHRHRAGAGASGAGAGQLPDRGHELRGARAVGDGVAEAEAHDEAAAREGGDLDEQDQRALVLGGRGGREEVVLGHHQRGLQVVHVLERARGLGLREPHAGVAAVHGLLRAGLRQDQAARQRVVVDQCAGEGPLDGLGRRRHGWVGRSRGGDGVGGGVEKWWVMGRG

SEQ ID NO: 191758 - protein, 254 aa, Zea Mays
MAEEPAVVVASSSYEVDLGNLMAYDPSHHVATASREELRQECLRKGTELAQAVADVLFALPPNEDRDGPIIHLPPPTFRLPREKHLPKPKPPTKWELFAKAKGITKRKKNKREWDEQTQSWKRTHGYDRVNDDKDIPIIEAKLTDEPGVDPFAQRRDEKKKRVEKQEKNRLDNLKKAAKVGALPSHIQLAAKALPITGTKADLPKKSRKEDLESVVGMASSATASGGKFDEKLPGEKPPKHPGKHRKLPKGREW

SEQ ID NO: 191759 - protein, 1459 aa, Zea Mays
MESSGGDKPTATDATESVVGLDGEETLSERESVGARHGPALSNGGGKEAPSSSSSAGNKRKHGILGSNQMELNEPGMPSSSSGDSTWSLDSLDDRHQISLLRSKNEHSEHSVTSAGVTVIRQPRGVLRLRKRDQNVSTESWTGGHNIPQANGVPRSSQLLRRNKKGKSTVFEQNRIGGDEPVSCLRTENGTCDQDTGSKFCSETEFSAEKLSHLSGEAPKAVHVDKGGCDHVKDDDGVSLEENAAMMLCSLSDNICAGSPRKGMKSSDTSSKRCIPQHSNHFKSSNKKIKDVPSPARLLRKRDGKVPFRKRRPRRHFYEVSPSDVDPFCIVKERIRVFWPLDETWYFGLVKEYNPDTRLHHVRYDDKDEEWINLQNERIKLLFLPAEARNRSKCTNSRSVFDLKHEQGDREDMDGSEGNTESSESGPIGSWLARSNQAKSAALCNISKQDHSHSNIVPISFDQKQCRGSDAKESNDYIPCDSFGNGSAKVLKDRTTPEDRRFRFVYSRKRFCRKTNGFLSISEQHSNCQIRARFAMVLAACPGMESSSATGASVTYVIPALSLPLKPVYKLLCEACCVSFSNTFFLHCGTMVALWPVVHLDILFDNALGLKHFLLDTCLISAVSLLCLLAGSFKQCSRQRTTKEARIPCTSIRFQISGGHGRSEVVFMLFNFVGVEKSKWEHLQGKLQYHCSKSELSKDSTKCTGRRALSSMDLFSKGFDVQDFLPESNYSDREPIICCLDEHCRFTQSVLDMTTAPSLLPWHHKKMLTESNLTNGSQQSMSCTLDEDQQQLVTEHASDTVFHAPPQVCSLNLGSSPDSPLDMASASCANPSSSASRESNIAERNVSTECNGSSIGDANIIHRKCEDQNGPCAGPDKSFSSNLSVICSSQKSAESRLSINIDKANDKPLDNDEKEKQPISNLVQELNEHPIGCVTPTAPRTTSHRNRFTSISRAFGDGSKLLPEDHVLTGFAGGSKKPRSQVSYSVSPKSEELGIKNKGHFRKIQSHVSAKINDAKKLPDSSRSGHSSPESLTCVANVLVTVGDRGWREYDTQITMDSDGQSERRICVKLAEGTKYAHKVCQVLQPGATNRYTHAMMWKGGAEWCLEFPDRSQWLIFKQMHDECYSHNIRAASVRNIPIPGVHLVEIHDDNDVVSFVQSEAYLVHIGTDVEIALDQSRVLYDMDSDDEEWISSWRKSLVRDNTTTLQFAEDLFERVMDKLEKFAYSHNCNGLSIDQMKELETDDVPLHTIEVIHAYWQDKRQKRGMPLIRHFQSAMWKIYEQQLHEWESKVCRMQSSSNGYQEKKLPPKPALFAFCLRPRGLHVPYKGPKQRSHKKLMSTGCHSFSREHDGFYRQVSGRRYNECTGDGRISESYDTGSLYSPTGYSPRFSTRTDSPRAFESSERSSTPRFSRNNSSTKRSAALAFSDDHQPSPSCRPQRAKRSAHDHWNAAIHDWQNSK

SEQ ID NO: 191760 - protein, 1326 aa, Zea Mays
MESSGGDKPTATDATESVVGLDGEETLSERESVGARHGPALSNGGGKEAPSSSSSAGNKRKHGILGSNQMELNEPGMPSSSSGDSTWSLDSLDDRHQISLLRSKNEHSEHSVTSAGVTVIRQPRGVLRLRKRDQNVSTESWTGGHNIPQANGVPRSSQLLRRNKKGKSTVFEQNRIGGDEPVSCLRTENGTCDQDTGSKFCSETEFSAEKLSHLSGEAPKAVHVDKGGCDHVKDDDGVSLEENAAMMLCSLSDNICAGSPRKGMKSSDTSSKRCIPQHSNHFKSSNKKIKDVPSPARLLRKRDGKVPFRKRRPRRHFYEVSPSDVDPFCIVKERIRVFWPLDETWYFGLVKEYNPDTRLHHVRYDDKDEEWINLQNERIKLLFLPAEARNRSKCTNSRSVFDLKHEQGDREDMDGSEGNTESSESGPIGSWLARSNQAKSAALCNISKQDHSHSNIVPISFDQKQCRGSDAKESNDYIPCDSFGNGSAKVLKDRTTPEDRRFRFVYSRKRFCRKTNGFLSISEQHSNCQIRARFAMVLAACPEKSKWEHLQGKLQYHCSKSELSKDSTKCTGRRALSSMDLFSKGFDVQDFLPESNYSDREPIICCLDEHCRFTQSVLDMTTAPSLLPWHHKKMLTESNLTNGSQQSMSCTLDEDQQQLVTEHASDTVFHAPPQVCSLNLGSSPDSPLDMASASCANPSSSASRESNIAERNVSTECNGSSIGDANIIHRKCEDQNGPCAGPDKSFSSNLSVICSSQKSAESRLSINIDKANDKPLDNDEKEKQPISNLVQELNEHPIGCVTPTAPRTTSHRNRFTSISRAFGDGSKLLPEDHVLTGFAGGSKKPRSQVSYSVSPKSEELGIKNKGHFRKIQSHVSAKINDAKKLPDSSRSGHSSPESLTCVANVLVTVGDRGWREYDTQITMDSDGQSERRICVKLAEGTKYAHKVCQVLQPGATNRYTHAMMWKGGAEWCLEFPDRSQWLIFKQMHDECYSHNIRAASVRNIPIPGVHLVEIHDDNDVVSFVQSEAYLVHIGTDVEIALDQSRVLYDMDSDDEEWISSWRKSLVRDNTTTLQFAEDLFERVMDKLEKFAYSHNCNGLSIDQMKELETDDVPLHTIEVIHAYWQDKRQKRGMPLIRHFQSAMWKIYEQQLHEWESKVCRMQSSSNGYQEKKLPPKPALFAFCLRPRGLHVPYKGPKQRSHKKLMSTGCHSFSREHDGFYRQVSGRRYNECTGDGRISESYDTGSLYSPTGYSPRFSTRTDSPRAFESSERSSTPRFSRNNSSTKRSAALAFSDDHQPSPSCRPQRAKRSAHDHWNAAIHDWQNSK

SEQ ID NO: 191761 - protein, 1457 aa, Zea Mays
MESSGGDKPTATDATESVVGLDGEETLSERESVGARHGPALSNGGGKEAPSSSSSAGNKRKHGILGSNQMELNEPGMPSSSSGDSTWSLDSLDDRHQISLLRSKNEHSEHSVTSAGVTVIRQPRGVLRLRKRDQNVSTESWTGGHNIPQANGVPRSSQLLRRNKKGKSTVFEQNRIGGDEPVSCLRTENGTCDQDTGSKFCSETEFSAEKLSHLSGEAPKAVHVDKGGCDHVKDDDGVSLEENAAMMLCSLSDNICAGSPRKGMKSSDTSSKRCIPQHSNHFKSSNKKIKDVPSPARLLRKRDGKVPFRKRRPRRHFYEVSPSDVDPFCIVKERIRVFWPLDETWYFGLVKEYNPDTRLHHVRYDDKDEEWINLQNERIKLLFLPAEARNRSKCTNSRSVFDLKHEQGDREDMDGSEGNTESSESGPIGSWLARSNQAKSAALCNISKQDHSHSNIVPISFDQKQCRGSDAKESNDYIPCDSFGNGSAKVLKDRTTPEDRRFRFVYSRKRFCRKTNGFLSISEQHSNCQIRARFAMVLAACPGMESSSATGASVTYVIPALSLPLKPVYKLLCEACCVSFSNTFFLHCGTMVALWPVVHLDILFDNALGLKHFLLDTCLISAVSLLCLLAGSFKQCSRQRTTKEARIPCTSIRFQISGGHGRSEVVFMLFNFVGVEKSKWEHLQGKLQYHCSKSELSKDSTKCTGRRALSSMDLFSKGFDVQDFLPESNYSDREPIICCLDEHCRFTQSVLDMTTAPSLLPWHHKKMLTESNLTNGSQQSMSCTLDEDQQQLVTEHASDTVFHAPPQVCSLNLGSSPDSPLDMASASCANPSSSASRESNIAERNVSTECNGSSIGDANIIHRKCEDQNGPCAGPDKSFSSNLSVICSSQKSAESRLSINIDKANDKPLDNDEKEKQPISNLVQELNEHPIGCVTPTAPRTTSHRNRFTSISRAFGDGSKLLPEDHVLTGFAGGSKKPRSQVSYSVSPKSEELGIKNKGHFRKIQSHVSAKINDAKKLPDSSRSGHSSPESLTCVANVLVTVGDRGWREYDTQITMDSDGQSERRICVKLAEGTKYAHKVCQVLQPGATNRYTHAMMWKGGAEWCLEFPDRSQWLIFKQMHDECYSHNIRAASVRNIPIPGVHLVEIHDDNDVVSFVQSEAYLVHIGTDVEIALDQSRVLYDMDSDDEEWISSWRKSLVRDNTTTLQFAEDLFERVMDKLEKFAYSHNCNGLSIDQMKELETDDVPLHTIEVIHAYWQDKRQKRGMPLIRHFQSAMWKIYEQQLHEWESKVCRMQSSSNGYQEKKLPPKPALFAFCLRPRGLHVPYKGPKQRSHKKLMSTGCHSFSREHDGFYRQGRRYNECTGDGRISESYDTGSLYSPTGYSPRFSTRTDSPRAFESSERSSTPRFSRNNSSTKRSAALAFSDDHQPSPSCRPQRAKRSAHDHWNAAIHDWQNSK

SEQ ID NO: 191762 - protein, 707 aa, Zea Mays
MTTAPSLLPWHHKKMLTESNLTNGSQQSMSCTLDEDQQQLVTEHASDTVFHAPPQVCSLNLGSSPDSPLDMASASCANPSSSASRESNIAERNVSTECNGSSIGDANIIHRKCEDQNGPCAGPDKSFSSNLSVICSSQKSAESRLSINIDKANDKPLDNDEKEKQPISNLVQELNEHPIGCVTPTAPRTTSHRNRFTSISRAFGDGSKLLPEDHVLTGFAGGSKKPRSQVSYSVSPKSEELGIKNKGHFRKIQSHVSAKINDAKKLPDSSRSGHSSPESLTCVANVLVTVGDRGWREYDTQITMDSDGQSERRICVKLAEGTKYAHKVCQVLQPGATNRYTHAMMWKGGAEWCLEFPDRSQWLIFKQMHDECYSHNIRAASVRNIPIPGVHLVEIHDDNDVVSFVQSEAYLVHIGTDVEIALDQSRVLYDMDSDDEEWISSWRKSLVRDNTTTLQFAEDLFERVMDKLEKFAYSHNCNGLSIDQMKELETDDVPLHTIEVIHAYWQDKRQKRGMPLIRHFQSAMWKIYEQQLHEWESKVCRMQSSSNGYQEKKLPPKPALFAFCLRPRGLHVPYKGPKQRSHKKLMSTGCHSFSREHDGFYRQVSGRRYNECTGDGRISESYDTGSLYSPTGYSPRFSTRTDSPRAFESSERSSTPRFSRNNSSTKRSAALAFSDDHQPSPSCRPQRAKRSAHDHWNAAIHDWQNSK

SEQ ID NO: 191763 - protein, 82 aa, Zea Mays
MMAFTGKGTLPGSLQEQILLGHSSPQNEAPHQDFPGTTVAPKGAQPLLSPTTTSHHLPAAPRERNGARTTTGTLLSTTGRTR

SEQ ID NO: 191764 - protein, 313 aa, Zea Mays
MPFVLDGLCFSGGSPCKWYINPDVPEEGALMASAMKAHSPIKWNEVLSSNQPMSHVPKEQKIAYIRDLHPFENKDREFLVTVTVKKIGDRWWYNACKKCTRTAVAHGDSYKCSDQVCANIGTPSQRYKLLLAAGDETGDIDFILFGRMAQRIIKKPCDMLIVNNPIDFIPDPITDLLEKTYIWNVNAVVAEIGTAKDFIQASSSRPKQSQPVLLQDAPSGVEDTPNKASNLVMPSTPLTPQSSATSVQDKTFCVGSSTMVPGAIPAITKELTSTPRKRTRSSPSKTVTKRLFTDIDGGITGSKDVADSAAAPR

SEQ ID NO: 191765 - protein, 114 aa, Zea Mays
MAETAPRSVRYDGEYFHHFNISSPWLLAILFSPALRVCRLRLPRCSSLRFCHPPSPWEHLVCCCCPPRPTHCERLRKPRTRSSPSKTVTKRLFTDIDGGITGSKDVADSAAAPR

SEQ ID NO: 191766 - protein, 285 aa, Zea Mays
MPFVLDGLCFSGGSPCKWYINPDVPEEGALMASAMKAHSPIKWNEVLSSNQPMSHVPKEQKIAYIRDLHPFENKDREFLVTVTVKKIGDRWWYNACKKCTRTAVAHGDSYKCSDQVCANIGTPSQRYKLLLAAGDETGDIDFILFGRMAQRIIKKPCDMLIVNNPIDFIPDPITDLLEKTYIWNVSFSDHTINTGNICFQVNAVVAEIGTAKDFIQASSSRPKQSQPVLLQDAPSGVEDTPNKASNLVMPSTPLTPQSSATSVQDKQHYGSRCYSRYNKGTDIHA

SEQ ID NO: 191767 - protein, 1000 aa, Zea Mays
MGEEAESNCKRKAPDSSVEEQPSLAPAPAQSQADPAAKRPNISRSCVHEVAVPNGYESVKDEAVHGTLASPAFNGEMAKQYPFKLDPFQSVSIACLERNESVLVSAHTSAGKTVVAEYAIAMAFRDKQRVIYTSPLKALSNQKYRELSQEFTDVGLMTGDVTLHPNATCLVMTTEILRAMLYRGSEVIKEVAWVIFDEIHYMKDRERGVVWEESIIFLPPAIKMVFLSATMSNATEFAEWICSLHKQPCHVVYTDFRPTPLQHYMFPIGGSGLYLVVDENGQFREDNFAKLQDSFAKPNNQLDGRKGGGPKASGRIAKGGSASGNSDIYRIVKMIMERKFQPVIIFSFSRRECEHHAMSMSKLDFSTEEEKECIEQVFCNAIGCLVEEDRSLPAIELMLPLLKRGIAVHHSGLLPIIKELVELLFQEGLVKALFATETFAMGLNMPAKTVVFTSVKKWDGDSNRYIGSGEYIQMSGRAGRRGKDERGICVIMIDEKMEMSVIKDMVLGKPAPLVSTFRLSYYTILNLMSRVEGQFTAEHVIRHSFHEFQYEKALPEIAQKITRLENEATLLDSSGETDLAEYHKLGLDISELEKKIMSEMIRPERALLYLVPGRLVRVRDGSTDWGWGVVVNVVKKPPASGTLPPALSASRSNNYTVDTLLHCSSNSSENGSRSKPCPPRPGEKGEMHVVPVPLPLVSGLSSVRINIPPDLRPPEARQNILSAVQELGKRYPQGLPKLHPINDMGIQEPELVDLVHKLEDLEQKQCSHRLHKSGQSEQELSWYQKKADLNTEIQQLKSKMRDSQLQKFRDELRNRSRVLKMLGHIDADGVLQLKGRAACLIDTGDELLITELMFNGTFNDLDHHQVASLASCFVPCDKSSEQIRLRNELSRPMMQLQEAARKIAEVQRECKLEVNVEEYVESTCRPYLMDVIYCWSRGATFAEVMEMTDIFEGSVIRLARRLDEFLNQLRAAAEAVGEVNLEKKFKNASESLRRGEGIAR

SEQ ID NO: 191768 - protein, 646 aa, Zea Mays
MIMERKFQPVIIFSFSRRECEHHAMSMSKLDFSTEEEKECIEQVFCNAIGCLVEEDRSLPAIELMLPLLKRGIAVHHSGLLPIIKELVELLFQEGLVKALFATETFAMGLNMPAKTVVFTSVKKWDGDSNRYIGSGEYIQMSGRAGRRGKDERGICVIMIDEKMEMSVIKDMVLGKPAPLVSTFRLSYYTILNLMSRVEGQFTAEHVIRHSFHEFQYEKALPEIAQKITRLENEATLLDSSGETDLAEYHKLGLDISELEKKIMSEMIRPERALLYLVPGRLVRVRDGSTDWGWGVVVNVVKKPPASGTLPPALSASRSNNYTVDTLLHCSSNSSENGSRSKPCPPRPGEKGEMHVVPVPLPLVSGLSSVRINIPPDLRPPEARQNILSAVQELGKRYPQGLPKLHPINDMGIQEPELVDLVHKLEDLEQKQCSHRLHKSGQSEQELSWYQKKADLNTEIQQLKSKMRDSQLQKFRDELRNRSRVLKMLGHIDADGVLQLKGRAACLIDTGDELLITELMFNGTFNDLDHHQVASLASCFVPCDKSSEQIRLRNELSRPMMQLQEAARKIAEVQRECKLEVNVEEYVESTCRPYLMDVIYCWSRGATFAEVMEMTDIFEGSVIRLARRLDEFLNQLRAAAEAVGGG

SEQ ID NO: 191769 - protein, 964 aa, Zea Mays
MGEEAESNCKRKAPDSSVEEQPSLAPAPAQSQADPAAKRPNISRSCVHEVAVPNGYESVKDEAVHGTLASPAFNGEMAKQYPFKLDPFQSVSIACLERNESVLVSAHTSAGKTVVAEYAIAMAFRDKQRVIYTSPLKALSNQKYRELSQEFTDVGLMTGDVTLHPNATCLVMTTEILRAMLYRGSEVIKEVAWVIFDEIHYMKDRERGVVWEESIIFLPPAIKMVFLSATMSNATEFAEWICSLHKQPCHVVYTDFRPTPLQHYMFPIGGSGLYLVVDENGQFREDNFAKLQDSFAKPNNQLDGRKGGGPKASGRIAKGGSASGNSDIYRIVKMIMERKFQPVIIFSFSRRECEHHAMSMSKLDFSTEEEKECIEQVFCNAIGCLVEEDRSLPAIELMLPLLKRGIAVHHSGLLPIIKELVELLFQEGLVKALFATETFAMGLNMPAKTVVFTSVKKWDGDSNRYIGSGEYIQMSGRAGRRGKDERGICVIMIDEKMEMSVIKDMVLGKPAPLVSTFRLSYYTILNLMSRVEGQFTAEHVIRHSFHEFQYEKALPEIAQKITRLENEATLLDSSGETDLAEYHKLGLDISELEKKIMSEMIRPERALLYLVPGRLVRVRDGSTDWGWGVVVNVVKKPPASGTLPPALSASRSNNYTVDTLLHCSSNSSENGSRSKPCPPRPGEKGEMHVVPVPLPLVSGLSSVRINIPPDLRPPEARQNILSAVQELGKRYPQGLPKLHPINDMGIQEPELVDLVHKLEDLEQKQCSHRLHKSGQSEQELSWYQKKADLNTEIQQLKSKMRDSQLQKFRDELRNRSRVLKMLGHIDADGVLQLKGRAACLIDTGDELLITELMFNGTFNDLDHHQVASLASCFVPCDKSSEQIRLRNELSRPMMQLQEAARKIAEGATFAEVMEMTDIFEGSVIRLARRLDEFLNQLRAAAEAVGEVNLEKKFKNASESLRRGI

SEQ ID NO: 191770 - protein, 518 aa, Zea Mays
MGEEAESNCKRKAPDSSVEEQPSLAPAPAQSQADPAAKRPNISRSCVHEVAVPNGYESVKDEAVHGTLASPAFNGEMAKQYPFKLDPFQSVSIACLERNESVLVSAHTSAGKTVVAEYAIAMAFRDKQRVIYTSPLKALSNQKYRELSQEFTDVGLMTGDVTLHPNATCLVMTTEILRAMLYRGSEVIKEVAWVIFDEIHYMKDRERGVVWEESIIFLPPAIKMVFLSATMSNATEFAEWICSLHKQPCHVVYTDFRPTPLQHYMFPIGGSGLYLVVDENGQFREDNFAKLQDSFAKPNNQLDGRKGGGPKASGRIAKGGSASGNSDIYRIVKMIMERKFQPVIIFSFSRRECEHHAMSMSKLDFSTEEEKECIEQVFCNAIGCLVEEDRSLPAIELMLPLLKRGIAVHHSGLLPIIKELVELLFQEGLVKALFATETFAMGLNMPAKTVVFTSVKKWDGDSNRYIGSGEYIQMSGRAGRRGKDERGICVIMIDEKCILILQLYFCVQLTKSDVRIDH

SEQ ID NO: 191771 - protein, 556 aa, Zea Mays
MGLNMPAKTVVFTSVKKWDGDSNRYIGSGEYIQMSGRAGRRGKDERGICVIMIDEKMEMSVIKDMVLGKPAPLVSTFRLSYYTILNLMSRVEGQFTAEHVIRHSFHEFQYEKALPEIAQKITRLENEATLLDSSGETDLAEYHKLGLDISELEKKIMSEMIRPERALLYLVPGRLVRVRDGSTDWGWGVVVNVVKKPPASGTLPPALSASRSNNYTVDTLLHCSSNSSENGSRSKPCPPRPGEKGEMHVVPVPLPLVSGLSSVRINIPPDLRPPEARQNILSAVQELGKRYPQGLPKLHPINDMGIQEPELVDLVHKLEDLEQKQCSHRLHKSGQSEQELSWYQKKADLNTEIQQLKSKMRDSQLQKFRDELRNRSRVLKMLGHIDADGVLQLKGRAACLIDTGDELLITELMFNGTFNDLDHHQVASLASCFVPCDKSSEQIRLRNELSRPMMQLQEAARKIAEVQRECKLEVNVEEYVESTCRPYLMDVIYCWSRGATFAEVMEMTDIFEGSVIRLARRLDEFLNQLRAAAEAVGEVNLEKKFKNASESLRRGI

SEQ ID NO: 191772 - protein, 506 aa, Zea Mays
MGEEAESNCKRKAPDSSVEEQPSLAPAPAQSQADPAAKRPNISRSCVHEVAVPNGYESVKDEAVHGTLASPAFNGEMAKQYPFKLDPFQSVSIACLERNESVLVSAHTSAGKTVVAEYAIAMAFRDKQRVIYTSPLKALSNQKYRELSQEFTDVGLMTGDVTLHPNATCLVMTTEILRAMLYRGSEVIKEVAWVIFDEIHYMKDRERGVVWEESIIFLPPAIKMVFLSATMSNATEFAEWICSLHKQPCHVVYTDFRPTPLQHYMFPIGGSGLYLVVDENGQFREDNFAKLQDSFAKPNNQLDGRKGGGPKASGRIAKGGSASGNSDIYRIVKMIMERKFQPVIIFSFSRRECEHHAMSMSKLDFSTEEEKECIEQVFCNAIGCLVEEDRSLPAIELMLPLLKRGIAVHHSGLLPIIKELVELLFQEGLVKALFATETFAMGLNMPAKTVVFTSVKKWDGDSNRYIGSGEYIQMSGRAGRRGKDERGICVIMIDEKLTKSDVRIDH

SEQ ID NO: 191773 - protein, 512 aa, Zea Mays
MGEEAESNCKRKAPDSSVEEQPSLAPAPAQSQADPAAKRPNISRSCVHEVAVPNGYESVKDEAVHGTLASPAFNGEMAKQYPFKLDPFQSVSIACLERNESVLVSAHTSAGKTVVAEYAIAMAFRDKQRVIYTSPLKALSNQKYRELSQEFTDVGLMTGDVTLHPNATCLVMTTEILRAMLYRGSEVIKEVAWVIFDEIHYMKDRERGVVWEESIIFLPPAIKMVFLSATMSNATEFAEWICSLHKQPCHVVYTDFRPTPLQHYMFPIGGSGLYLVVDENGQFREDNFAKLQDSFAKPNNQLDGRKGGGPKASGRIAKGGSASGNSDIYRIVKMIMERKFQPVIIFSFSRRECEHHAMSMSKLDFSTEEEKECIEQVFCNAIGCLVEEDRSLPAIELMLPLLKRGIAVHHSGLLPIIKELVELLFQEGLVKALFATETFAMGLNMPAKTVVFTSVKKWDGDSNRYIGSGEYIQMSGRAGRRGKDERGICVIMIDEKLYFCVQLTKSDVRIDH

SEQ ID NO: 191774 - protein, 545 aa, Zea Mays
MQCKFAMGLNMPAKTVVFTSVKKWDGDSNRYIGSGEYIQMSGRAGRRGKDERGICVIMIDEKMEMSVIKDMVLGKPAPLVSTFRLSYYTILNLMSRVEGQFTAEHVIRHSFHEFQYEKALPEIAQKITRLENEATLLDSSGETDLAEYHKLGLDISELEKKIMSEMIRPERALLYLVPGRLVRVRDGSTDWGWGVVVNVVKKPPASGTLPPALSASRSNNYTVDTLLHCSSNSSENGSRSKPCPPRPGEKGEMHVVPVPLPLVSGLSSVRINIPPDLRPPEARQNILSAVQELGKRYPQGLPKLHPINDMGIQEPELVDLVHKLEDLEQKQCSHRLHKSGQSEQELSWYQKKADLNTEIQQLKSKMRDSQLQKFRDELRNRSRVLKMLGHIDADGVLQLKGRAACLIDTGDELLITELMFNGTFNDLDHHQVASLASCFVPCDKSSEQIRLRNELSRPMMQLQEAARKIAEVQRECKLEVNVEEYVESTCRPYLMDVIYCWSRGATFAEVMEMTDIFEGSVIRLARRLDEFLNQLRAAAEAVGGG

SEQ ID NO: 191775 - protein, 483 aa, Zea Mays
MEMSVIKDMVLGKPAPLVSTFRLSYYTILNLMSRVEGQFTAEHVIRHSFHEFQYEKALPEIAQKITRLENEATLLDSSGETDLAEYHKLGLDISELEKKIMSEMIRPERALLYLVPGRLVRVRDGSTDWGWGVVVNVVKKPPASGTLPPALSASRSNNYTVDTLLHCSSNSSENGSRSKPCPPRPGEKGEMHVVPVPLPLVSGLSSVRINIPPDLRPPEARQNILSAVQELGKRYPQGLPKLHPINDMGIQEPELVDLVHKLEDLEQKQCSHRLHKSGQSEQELSWYQKKADLNTEIQQLKSKMRDSQLQKFRDELRNRSRVLKMLGHIDADGVLQLKGRAACLIDTGDELLITELMFNGTFNDLDHHQVASLASCFVPCDKSSEQIRLRNELSRPMMQLQEAARKIAEVQRECKLEVNVEEYVESTCRPYLMDVIYCWSRGATFAEVMEMTDIFEGSVIRLARRLDEFLNQLRAAAEAVGGG

SEQ ID NO: 191776 - protein, 236 aa, Zea Mays
MGIQEPELVDLVHKLEDLEQKQCSHRLHKSGQSEQELSWYQKKADLNTEIQQLKSKMRDSQLQKFRDELRNRSRVLKMLGHIDADGVLQLKGRAACLIDTGDELLITELMFNGTFNDLDHHQVASLASCFVPCDKSSEQIRLRNELSRPMMQLQEAARKIAEVQRECKLEVNVEEYVESTCRPYLMDVIYCWSRGATFAEVMEMTDIFEGSVIRLARRLDEFLNQLRAAAEAVGGG

SEQ ID NO: 191777 - protein, 634 aa, Zea Mays
MAAHRAFQFCKQYKRTTEFRRLCEIIRNHLANLNKYRDQRDRPDLTAPESLQLYLDTRVEQLKVATELCLWQEAFRSVEDIHGLMSMVKKMPKPSILVVYYAKLTEIFWVSDSHLYHAYAWLKLFNLQKNYNKNLSQKDLQLIASSVLLAALSVAPYDKKYGASHLETENEKERNMRMANLVNFSLDSKRENREMPSRASLLSELASKGVLSCASQEVRDLYNLLEHEFLPLDLASKVQPLLSKISKMGGKLSSASSVPEVKLSQYISALEKLTALRVLQQASCIFQSMKIDMLSRMIPFFDFFVVEKISVVAVRRNFVAIKVNHLSGAVHFGTVDIESDGLSDHLSVVADSLNKAKIHICPPVKKPSKLGESFISLAGIVENEHKRLLARKSIIEKRKEELERQILEKEKEEEKKRMSSQKKTADEERVRLLNEQRQREQDRIRREIEEKNKAEAKKLLEDLKKAGKKHVVVEGELTKEAIMELTRNEQLKERHEMEKKLQKFAKTMDYLERAKRQEEAPLIEQAFQKRLQEEKILHEQEQLREIELSKQHHAGDLQEKNRLSRMLEHKNALQERIVQLREAEFGRLKKERDERFSQLISSRKRERERVRKLMYYLNREEQRIEMLQEEERRG

SEQ ID NO: 191778 - protein, 688 aa, Zea Mays
MAAHRAFQFCKQYKRTTEFRRLCEIIRNHLANLNKYRDQRDRPDLTAPESLQLYLDTRVEQLKVATELCLWQEAFRSVEDIHGLMSMVKKMPKPSILVVYYAKLTEIFWVSDSHLYHAYAWLKLFNLQKNYNKNLSQKDLQLIASSVLLAALSVAPYDKKYGASHLETENEKERNMRMANLVNFSLDSKRENREMPSRASLLSELASKGVLSCASQEVRDLYNLLEHEFLPLDLASKVQPLLSKISKMGGKLSSASSVPEVKLSQYISALEKLTALRVLQQDIESDGLSDHLSVVADSLNKAKIHICPPVKKPSKLGESFISLAGIVENEHKRLLARKSIIEKRKEELERQILEKEKEEEKKRMSSQKKTADEERVRLLNEQRQREQDRIRREIEEKNKAEAKKLLEDLKKAGKKHVVVEGELTKEAIMELTRNEQLKERHEMEKKLQKFAKTMDYLERAKRQEEAPLIEQAFQKRLQEEKILHEQEQLREIELSKQHHAGDLQEKNRLSRMLEHKNALQERIVQLREAEFGRLKKERDERFSQLISSRKRERERVRKLMYYLNREEQRIEMLREEEEARKHEEEERRKREEAERKANLDAIAEKQRLREIELEEKAKANREKLLKGSEAGAAPSSNKYIPKFKRQDGLPARQDAPPPRQDGPPPSTDRWRPSRYSSTSSSTWGRAHN

SEQ ID NO: 191779 - protein, 336 aa, Zea Mays
MAAHRAFQFCKQYKRTTEFRRLCEIIRNHLANLNKYRDQRDRPDLTAPESLQLYLDTRVEQLKVATELCLWQEAFRSVEDIHGLMSMVKKMPKPSILVVYYAKLTEIFWVSDSHLYHAYAWLKLFNLQKNYNKNLSQKDLQLIASSVLLAALSVAPYDKKYGASHLETENEKERNMRMANLVNFSLDSKRENREMPSRASLLSELASKGVLSCASQEVRDLYNLLEHEFLPLDLASKVQPLLSKISKMGGKLSSASSVPEVKLSQYISALEKLTALRVLQQASCIFQSMKIDMLSRMIPFFDFFVVEKISVVAVRRNFVAIKVNHLSGAVHFGHRI

SEQ ID NO: 191780 - protein, 60 aa, Zea Mays
MVFLHDRMHPHPAKMALLRLLTAGVHQDIPQPLRQPGGGHITDPFFFILLTTFIILELVS

SEQ ID NO: 191781 - protein, 71 aa, Zea Mays
MISGGCGSTHLYNLCSSFFCLVNKERPLPALFLLSTPKKSSCKKLPRRTLSYNRGHDCQNMFGSLLYTARS

SEQ ID NO: 191782 - protein, 57 aa, Zea Mays
MESEMADAPAEAAVGSTLTMERVAAAKKFIENHYRSQMKTIQERKERYCTVPAVLIP

SEQ ID NO: 191783 - protein, 179 aa, Zea Mays
MVSAVPWKHIVHWRNHLKFPEDAKLSNEARDLICRLLCDVDHRIGSAGADQIKAHPWFQGVAWDKLYEMEAAFKPQVNDELDTQNFMKFEELENPPAKTGSGPSRKMMLNSKDLSFVGYTYKNFDAVKAIKISDLQRNSSLTRPSIGSIFGPSGMDSPMEPNGRDTHMHTVSSGDPMIP

SEQ ID NO: 191784 - protein, 584 aa, Zea Mays
MVVARKPQQQPAGVARRRGGGVRVGPARLEGLPAAWAGAAAAAVKVKWPAPGGALSQMLTGRWARGVTAVEAVGAGGTVRWEPRDGNRFRLDDVVGPAGRPERGVFFSVLYGFQEQGRGNKELVRLEEIGTAMISLEECCWEMQLQQHDHQLVAVPVRVRKDGWASDAMLYVDVELVDANTRPDVDRAVSFREKPRTYMAPPPTMRGSRKSLESATCHDVLDLKQLLDLAEKEGRVAVYGNIRSSDTSSVSSTSSSSSTISVSSASTSGGASPEPASTSKRRFLPWTRRSRDFDKRTAESLSQELPTKCTDDGPGPAGGWETREFTSRDAETRLRTPVFFASIDQRDGSAGGEGACAALAAVLAAALHAGHPAMPTRPELDALIRDGSSEWRRLCDDEARAARFPNRHLDLDTVLASRAWPIAVRHDRAFVGFFQPESFASLSGAMSFDDIWREIAGGGGRGRGPGGRADVYIVSWNDHFFALKVESDCYYVVDTLGERLHEGCDKAYMLRFDGSSEMRAEGTEEVVVAGKECCREFIKRFLAAIPLREELEIEKKGGSGIDGGGAPHQRLQIEFHFTAFTRRQ

SEQ ID NO: 191785 - protein, 110 aa, Zea Mays
MAVGPPRHGRRSSFLHRHGSASLQQSGDRALPFPRHAGAMSSPSPANLASHQEGVSLSAAPMATISPSCACPGSSSSTPAPLNLPSLPLSLSQIYWMCSGGLLKEFCVPA

SEQ ID NO: 191786 - protein, 166 aa, Zea Mays
MAVGPPRHGRRSSFLQYVSDLVSLPSRGRLLQELFLPCARLRWPDSPMMAFPCRCCSLAAMAVPPCSSPVTGPSPSHVMLVPCLLPHRPTSPATRKVSPSRQLPWPPSALAALALVPAARRQPLSIFHRCRSACPRYITLEVDFPQLEILTNWKKCDLTCAATTLN

SEQ ID NO: 191787 - protein, 103 aa, Zea Mays
MAVGPPRHGRRSSFLHRHGSASLQQSGDRALPFPRHAGAMSSPSPANLASHQEGVSLSAAPMATISPSCACPGSSSSTPAPLNLPSLPLSLSQIYCCHVIQEY

SEQ ID NO: 191788 - protein, 177 aa, Zea Mays
MGDSSDSVSVDVERIFFGGKGHRVRTRHGPLSVSVYGDEDKPALVTYPDLALNHMSCFQGLFFCPEAASLLLHNFCVYHITPQGHELGAAPISADVHVPSVDDLADQVADVLDFFSLGSVMCLGVTAGAYVLTLFATKYRERVLGLMLVSPVCKAPSWSEWLYNKSVNLRIRCPRYC

SEQ ID NO: 191789 - protein, 281 aa, Zea Mays
MGDSSDSVSVDVERIFFGGKLGAAPISADVHVPSVDDLADQVADVLDFFSLGSVMCLGVTAGAYVLTLFATKYRERVLGLMLVSPVCKAPSWSEWLYNKVLLNLLYYYGTRGIVKESLLQRYFSMDVLGNGQDPESEIVQACRSLLDDRQGTNVWRFLQAINRRHDLTESLEKLQCQTLIFVGENSQFHADAVHMTTKLDRRYCALVEVQACGSLVTEEQPHAMVIPMEYFLMGYGLYRPSQQESSPRSTLSPFCISPELLSPESMGVKLKPIKTRISRNV

SEQ ID NO: 191790 - protein, 119 aa, Zea Mays
MYLQLERDESTSVTQKRLSDQREQYGGTVHLFIGTGHNPYKITFMPFTFDNNSIVIYRGLNSLFIFKSVSFVATTPKLPGSHLRRCINLRIILVCCDTDLSPKIPVHTLYSSNTVKSCF

SEQ ID NO: 191791 - protein, 79 aa, Zea Mays
MLMRWCLAFCDMVSGSFYVDCIMQGRLVPYPNVVKVRNSLLPEIDLVISNRLICVMQVWLFCSWKIYREGIFCSYILVA

SEQ ID NO: 191792 - protein, 311 aa, Zea Mays
MAVATESRGSEDRASAHANQEKRWVLSDFEVGKPLGRGKFGHVYLAREKRSSEIVALKVLFKSQLKQSQVEHQLRREVEIQSHLRHPNILRLYGYFYDQTRVYLILEYAAKGELYKELTRCKHFSERRTATYVASLARALIYLHGKHVIHRDIKPENLLVGVQGEIKIADFGWSVHTFNRRRTMCGTLDYLPPEMVEKAEHDYHVDIWSLGVLCYEFLYGVPPFEAKEHSETYRRIVKVDLKFPLKPFVSPAAKDLISQMLVKSSAQRLPLHKVLEHPWIVQNADPSGVYREGRTPLNSSVLTSMPTTLET

SEQ ID NO: 191793 - protein, 444 aa, Zea Mays
MNREHSSSSSSKLINEKLEEHRISTAKHCPHCGEKIDSKPDWVGLPAGVKFDPTDQELIEHLEAKVKDEGSRSHPLIDEFIPTIDGEDGICYTHPEKLPGVTRDGLSKHFFHRPSKAYTTGTRKRRKIQTDCDVHKGETRWHKTGKTRPVMVSGRQKGCKKILVLYTNFGKHRKPEKTNWVMHQYHLGDLEEEKEGELVVCKIFYQTQPRQSSWSAASDRGAATAMVAATTAAAQEQHRRDSGSGSCSSRDHEAVSATSFPAGYTVTTAVEMQQHMKQPAADHFSFAPFRKTFDQEVGIGGDQVPSNQLGRSETHHAGRGQQPHGPVLATTAVPATAFLISRPSNPVSTIVPPAMQHASVVLDNDQFHVPAILLHHHDKFQPHQHQQEQTQQKLDRRSASAGLEELIMGCTSSTNTKGETSIAHPQETEWPYPYWPSDNQDHHG

SEQ ID NO: 191794 - protein, 488 aa, Zea Mays
MTAKSLSYSKQTGKQESSLPYILLLLLLNTHACALPPGAAYEPDMNREHSSSSSSKLINEKLEEHRISTAKHCPHCGEKIDSKPDWVGLPAGVKFDPTDQELIEHLEAKVKDEGSRSHPLIDEFIPTIDGEDGICYTHPEKLPGVTRDGLSKHFFHRPSKAYTTGTRKRRKIQTDCDVHKGETRWHKTGKTRPVMVSGRQKGCKKILVLYTNFGKHRKPEKTNWVMHQYHLGDLEEEKEGELVVCKIFYQTQPRQSSWSAASDRGAATAMVAATTAAAQEQHRRDSGSGSCSSRDHEAVSATSFPAGYTVTTAVEMQQHMKQPAADHFSFAPFRKTFDQEVGIGGDQVPSNQLGRSETHHAGRGQQPHGPVLATTAVPATAFLISRPSNPVSTIVPPAMQHASVVLDNDQFHVPAILLHHHDKFQPHQHQQEQTQQKLDRRSASAGLEELIMGCTSSTNTKGETSIAHPQETEWPYPYWPSDNQDHHG

SEQ ID NO: 191795 - protein, 445 aa, Zea Mays
MNREHSSSSSSKLINEKLEEHRISTAKHCPHCGEKIDSKPKDWVGLPAGVKFDPTDQELIEHLEAKVKDEGSRSHPLIDEFIPTIDGEDGICYTHPEKLPGVTRDGLSKHFFHRPSKAYTTGTRKRRKIQTDCDVHKGETRWHKTGKTRPVMVSGRQKGCKKILVLYTNFGKHRKPEKTNWVMHQYHLGDLEEEKEGELVVCKIFYQTQPRQSSWSAASDRGAATAMVAATTAAAQEQHRRDSGSGSCSSRDHEAVSATSFPAGYTVTTAVEMQQHMKQPAADHFSFAPFRKTFDQEVGIGGDQVPSNQLGRSETHHAGRGQQPHGPVLATTAVPATAFLISRPSNPVSTIVPPAMQHASVVLDNDQFHVPAILLHHHDKFQPHQHQQEQTQQKLDRRSASAGLEELIMGCTSSTNTKGETSIAHPQETEWPYPYWPSDNQDHHG

SEQ ID NO: 191796 - protein, 81 aa, Zea Mays
MNSCTFTGKHIGHLFHSYWPTGNKHVQGLDEPQQLMQLDQGALEDPCCSTCSSKVWLQSTKSKDTRNLKENCNHSMLNERL

SEQ ID NO: 191797 - protein, 167 aa, Zea Mays
MDAVMFGLETPLMAALQHLLDVPDGDAGAGGDNKTGSGGSATRTYVRDARAMAATPADVKELPGAYAFVVDMPGLGTGDIRVQVEDERVLVVSGERRREEREDDAKYLRMERRMGKFMRKFVLPDNADVDKVAAVCRDGVLTVTVEKLPPPEPKKPKTIEVKVACLL

SEQ ID NO: 191798 - protein, 88 aa, Zea Mays
MLDNMFGTLDKYVAVSMCGCACFCVLCVMNLELFWNIGARKGASRMEHPSVWLCVMNLEHYSMRQQLCHCVFLNMCARVMCAYLNKKK

SEQ ID NO: 191799 - protein, 68 aa, Zea Mays
MEGGAAVPSREGLGELLQRGVRRAGGATMGELTMGGSEGAASCHQWRAGDVMCSSHQEGMSAMLLARV

SEQ ID NO: 191800 - protein, 840 aa, Zea Mays
MCRHRGSSQLWVTVTALVTGTICLCSSSSIGLLSTYRVQDVVANELWRTVDANGWRASSAPHIYWPHIPAESESNGYLCVRCNGGLTLQISVAGIKECDKSVGNLLYAVATKYPTNALVHRPVLISYVLSTKIKNPAQLDAALSFLTNTGPDSLDVVKFEEACGVGVVVSIEEIKSTVTDVLEENMEAIKEQRYHINVGTLCGQVRKRHPWGDAKAIKEEIDKRLAEILGPKTEADNIKPVKKKKEKPAKVEEKKVAVATAAPPSEEELNPYTIFPQPEENFKVHTEIFFSDGNIWRAHNTKEILEKHLKATGGKVMTRFPPEPNGYLHIGHAKAMFIDFGLAKERNGHCYLRFDDTNPEAEKKEYIDHIQEIVHWMGWEPYKVTYTSDYFQALYEHAVELIQKGLAYVDHQTAEEIKEYREKKMDSPWRGRPIEESLKLFEDMRRGLIAEGAATLRMKQDMQNENKNMSDLIAYRIKFTPHPHAGDKWCVYPSYDYAHCMVDSLENITHSLCTLEFDIRRPSYYWLLVALGLYQPYVWEYSRLNISNTVMSKRKLNRLVTEKWVDGWDDPRLLTLAGLRRRGVSSTAINSFIRGIGITRSDNSLIRVDRLEYHIREELNKTAPRTMVVLRPLKVVITNLEEGKVLDLDGKMWPDASDTDASSHYKVPFSRTVYIEKTDFRLKDSKDYYGLAPGKSVMLRYAFPIKCTDVISGDSPDDIVEIRAEYDPLKTSKLKGVLHWIAEPAPGVEPLKVEVRLFEKLFMSENPAELEDWLGDLNPHSKEVIKDAYAVPSLATAVLGDKFQFERLGYFAVDTDSTPEKLVFNRTVTLRDSFGKAGPK

SEQ ID NO: 191801 - protein, 370 aa, Zea Mays
MEAIKEQRYHINVGTLCGQVRKRHPWGDAKAIKEEIDKRLAEILGPKTEADNIKPVKKKKEKPAKVEEKKVAVATAAPPSEEELNPYTIFPQPEENFKVHTEIFFSDGNIWRAHNTKEILEKHLKATGGKVMTRFPPEPNGYLHIGHAKAMFIDFGLAKERNGHCYLRFDDTNPEAEKKEYIDHIQEIVHWMGWEPYKVTYTSDYFQALYEHAVELIQKGLAYVDHQTAEEIKEYREKKMDSPWRGRPIEESLKLFEDMRRGLIAEGAATLRMKQDMQNENKNMSDLIAYRIKFTPHPHAGDKWCVYPSYDYAHCMVDSLENITHSLCTLEFDIRRPSYYWLLVALGLYQPYVWEYSRLNISNTVMSKRK

SEQ ID NO: 191802 - protein, 677 aa, Zea Mays
MWCVVVSIEEIKSTVTDVLEENMEAIKEQRYHINVGTLCGQVRKRHPWGDAKAIKEEIDKRLAEILGPKTEADNIKPVKKKKEKPAKVEEKKVAVATAAPPSEEELNPYTIFPQPEENFKVHTEIFFSDGNIWRAHNTKEILEKHLKATGGKVMTRFPPEPNGYLHIGHAKAMFIDFGLAKERNGHCYLRFDDTNPEAEKKEYIDHIQEIVHWMGWEPYKVTYTSDYFQALYEHAVELIQKGLAYVDHQTAEEIKEYREKKMDSPWRGRPIEESLKLFEDMRRGLIAEGAATLRMKQDMQNENKNMSDLIAYRIKFTPHPHAGDKWCVYPSYDYAHCMVDSLENITHSLCTLEFDIRRPSYYWLLVALGLYQPYVWEYSRLNISNTVMSKRKLNRLVTEKWVDGWDDPRLLTLAGLRRRGVSSTAINSFIRGIGITRSDNSLIRVDRLEYHIREELNKTAPRTMVVLRPLKVVITNLEEGKVLDLDGKMWPDASDTDASSHYKVPFSRTVYIEKTDFRLKDSKDYYGLAPGKSVMLRYAFPIKCTDVISGDSPDDIVEIRAEYDPLKTSKLKGVLHWIAEPAPGVEPLKVEVRLFEKLFMSENPAELEDWLGDLNPHSKEVIKDAYAVPSLATAVLGDKFQFERLGYFAVDTDSTPEKLVFNRTVTLRDSFGKAGPK

SEQ ID NO: 191803 - protein, 513 aa, Zea Mays
MEAIKEQRYHINVGTLCGQVRKRHPWGDAKAIKEEIDKRLAEILGPKTEADNIKPVKKKKEKPAKVEEKKVAVATAAPPSEEELNPYTIFPQPEENFKVHTEIFFSDGNIWRAHNTKEILEKHLKATGGKVMTRFPPEPNGYLHIGHAKAMFIDFGLAKERNGHCYLRFDDTNPEAEKKEYIDHIQEIVHWMGWEPYKVTYTSDYFQALYEHAVELIQKGLAYVDHQTAEEIKEYREKKMDSPWRGRPIEESLKLFEDMRRGLIAEGAATLRMKQDMQNENKNMSDLIAYRIKFTPHPHAGDKWCVYPSYDYAHCMVDSLENITHSLCTLEFDIRRPSYYWLLVALGLYQPYVWEYSRLNISNTVMSKRKLNRLVTEKWVDGWDDPRLLTLAGLRRRGVSSTAINSFIRGIGITRSDNSLIRVDRLEYHIREELNKTAPRTMVVLRPLKVVITNLEEGKVLDLDGKMWPDASDTDASSHYKVPFSRTVYIEKTDFRLKDSKDYYGLAPGMRSP

SEQ ID NO: 191804 - protein, 792 aa, Zea Mays
MGTGGDGSKAGPALPLEALLALGLDQRTAENALVNAKVTANLASVIAEECDKSVGNLLYAVATKYPTNALVHRPVLISYVLSTKIKNPAQLDAALSFLTNTGPDSLDVVKFEEACGVGVVVSIEEIKSTVTDVLEENMEAIKEQRYHINVGTLCGQVRKRHPWGDAKAIKEEIDKRLAEILGPKTEADNIKPVKKKKEKPAKVEEKKVAVATAAPPSEEELNPYTIFPQPEENFKVHTEIFFSDGNIWRAHNTKEILEKHLKATGGKVMTRFPPEPNGYLHIGHAKAMFIDFGLAKERNGHCYLRFDDTNPEAEKKEYIDHIQEIVHWMGWEPYKVTYTSDYFQALYEHAVELIQKGLAYVDHQTAEEIKEYREKKMDSPWRGRPIEESLKLFEDMRRGLIAEGAATLRMKQDMQNENKNMSDLIAYRIKFTPHPHAGDKWCVYPSYDYAHCMVDSLENITHSLCTLEFDIRRPSYYWLLVALGLYQPYVWEYSRLNISNTVMSKRKLNRLVTEKWVDGWDDPRLLTLAGLRRRGVSSTAINSFIRGIGITRSDNSLIRVDRLEYHIREELNKTAPRTMVVLRPLKVVITNLEEGKVLDLDGKMWPDASDTDASSHYKVPFSRTVYIEKTDFRLKDSKDYYGLAPGKSVMLRYAFPIKCTDVISGDSPDDIVEIRAEYDPLKTSKLKGVLHWIAEPAPGVEPLKVEVRLFEKLFMSENPAELEDWLGDLNPHSKEVIKDAYAVPSLATAVLGDKFQFERLGYFAVDTDSTPEKLVFNRTVTLRDSFGKAGPK

SEQ ID NO: 191805 - protein, 756 aa, Zea Mays
MGTGGDGSKAGPALPLEALLALGLDQRTAENALVNAKVTANLASVIAEIKNPAQLDAALSFLTNTGPDSLDVVKFEEACGVGVVVSIEEIKSTVTDVLEENMEAIKEQRYHINVGTLCGQVRKRHPWGDAKAIKEEIDKRLAEILGPKTEADNIKPVKKKKEKPAKVEEKKVAVATAAPPSEEELNPYTIFPQPEENFKVHTEIFFSDGNIWRAHNTKEILEKHLKATGGKVMTRFPPEPNGYLHIGHAKAMFIDFGLAKERNGHCYLRFDDTNPEAEKKEYIDHIQEIVHWMGWEPYKVTYTSDYFQALYEHAVELIQKGLAYVDHQTAEEIKEYREKKMDSPWRGRPIEESLKLFEDMRRGLIAEGAATLRMKQDMQNENKNMSDLIAYRIKFTPHPHAGDKWCVYPSYDYAHCMVDSLENITHSLCTLEFDIRRPSYYWLLVALGLYQPYVWEYSRLNISNTVMSKRKLNRLVTEKWVDGWDDPRLLTLAGLRRRGVSSTAINSFIRGIGITRSDNSLIRVDRLEYHIREELNKTAPRTMVVLRPLKVVITNLEEGKVLDLDGKMWPDASDTDASSHYKVPFSRTVYIEKTDFRLKDSKDYYGLAPGKSVMLRYAFPIKCTDVISGDSPDDIVEIRAEYDPLKTSKLKGVLHWIAEPAPGVEPLKVEVRLFEKLFMSENPAELEDWLGDLNPHSKEVIKDAYAVPSLATAVLGDKFQFERLGYFAVDTDSTPEKLVFNRTVTLRDSFGKAGPK

SEQ ID NO: 191806 - protein, 673 aa, Zea Mays
MMGGGLINTWKKWEIQVLVLLSFTLQLILLAFARIRRRKGSAPLRVLLWLAYLMADSTAIYTLGHLSLRASSGEKQVVALWAPLLLLHLGGPDTITAYAFEDNQLWLRHLLNLAVQAMGAAYVLYQSVATQTHQRALVTASMLMFVTGLVKYGERTWALKRANIDSIRGGLDLQDDRDRRQPYDGRAGTAELELDSEEVLLGAHYVFNACKSFFTDDLITSGAEREAISRGIQFNGGSSRGHGGPGGYSRVDVVVTYVLLAGAFVLEIASLVRVLGSSWACAFLHARRWDRIHGAVRCLRLLVRAARSRRWLDSVGQYNLLDFCTRDRTEIRSWVAKKVGLEKWWDKLHYSGTVSISDSFRDLLLEEIPRRQLGDMRDARGRWTLQQITYPPGSSGRLYDEISWSVNETDFDQSILIWHVAIDVYLCCRRKPGLAAAAAAEDRLAKAVKELSDYMFFLFVVQPHMLPGPVRSTRYDNNCDGLVALWQRLSADHDSMDPTLTPRENLARLLYREYRDKDDDDPDPDSDGRRASPAAADFSVQMTMEEEDNNPHGLAYIDAAGLTGLLLSERSGIPDVLEMIAGVWVEMLCYAARHCTEVSHAKQLSSGGELVTAMGMLVEYTARYDLHPHGRLGSEDDSSMENGEPSGAPAEVSVVDIDSISEGTGGEICEEYI

SEQ ID NO: 191807 - protein, 141 aa, Zea Mays
MSAEKPAPVRVLYCGVCGLPAEYCEFGPDFERCKPWLRAHAPGVYPDDLVAASSSPGGGDKDVDKVGDRLQGVGISDGSTSAAGDASASKPQEAKRLPGGKLKKKEKQEVVIEKIVRNKRKCVTVVKGLELFDFDYMYFPE

SEQ ID NO: 191808 - protein, 128 aa, Zea Mays
MYVQVNEFLNCLVDARNELLQRYENVQRSFKIKKAMLSNHRNYRTSYDRLFEQVRRLETESDSLKKDAAIYNFVQERLQKSAPYKMIMELSAMELEAQEISFEELLAREKEDTAFWQRNGKMRSVSSK

SEQ ID NO: 191809 - protein, 547 aa, Zea Mays
MPTTAPPVDAEPPECPVCLSPFDAASVVPRVLPCGHSLCGSCIAALPPASAAAGASSLRCPLCSQCVPYARALGPSSLPKNLALLTLLPSPSHALSAATLVTAPLPHPHPLHAAHSRLLSRFRHAVLPESASPLGSEPSPVHLAFGSLGSDLGAPWFCARGRPVSLLPIETQPVPPTKQEAEFYRPSHATRVLAAVDALSDATKEELAGLIASSARLARMVSRLYGVWMSPHAPPLWMVSERHPRTVSQLLEEEIINREETVVRAGFLVMEACEVIMGLHSEGLVLGCLGLDCFCLDRFGHCMLDLNQALALCRGVQAGASSNSVRAFIAPEVAAVLGDTLRTEGRDFDGLVGCTSDIWSLGCVFVALLTRDEQLVPVAGWNSEGLYDDWEKEVVTRLDATLLGTILEPLAAVIASCLRYDPKSRPEIADVWKCIRGLLTKFGDVTLAPDDDVAAQKSFRCLLLGELSSMFVDSGAVESDDKTQLSRGADGNSSNQDHGSNDGFLNNSGNDLSGIDGPQSVGVFKSSTLLAHRDCVTGLAVGGWVLV

SEQ ID NO: 191810 - protein, 553 aa, Zea Mays
MPTTAPPVDAEPPECPVCLSPFDAASVVPRVLPCGHSLCGSCIAALPPASAAAGASSLRCPLCSQCVPYARALGPSSLPKNLALLTLLPSPSHALSAATLVTAPLPHPHPLHAAHSRLLSRFRHAVLPESASPLGSEPSPVHLAFGSLGSDLGAPWFCARGRPVSLLPIETQPVPPTKQEAEFYRPSHATRVLAAVDALSDATKEELAGLIASSARLARMVSRLYGVWMSPHAPPLWMVSERHPRTVSQLLEEEIINREETVVRAGFLVMEACEVIMGLHSEGLVLGCLGLDCFCLDRFGHCMLDLNQALALCRGVQAGASSNSVRAFIAPEVAAVLGDTLRTEGRDFDGLVGCTSDIWSLGCVFVALLTRDEQLVPVAGWNSEGLYDDWEKEVVTRLDATLLGTILEPLAAVIASCLRYDPKSRPEIADVWKCIRGLLTKFGDVTLAPDDDVAAQKSFRCLLLGELSSMFVDSGAVESDDKTQLSRGADGNSSNQDHGSNDGFLNNSGNDLSGIDGPQSVGVFKSSTLLAHRDCVTGLAVGGLLSCALFEGS

SEQ ID NO: 191811 - protein, 689 aa, Zea Mays
MPTTAPPVDAEPPECPVCLSPFDAASVVPRVLPCGHSLCGSCIAALPPASAAAGASSLRCPLCSQCVPYARALGPSSLPKNLALLTLLPSPSHALSAATLVTAPLPHPHPLHAAHSRLLSRFRHAVLPESASPLGSEPSPVHLAFGSLGSDLGAPWFCARGRPVSLLPIETQPVPPTKQEAEFYRPSHATRVLAAVDALSDATKEELAGLIASSARLARMVSRLYGVWMSPHAPPLWMVSERHPRTVSQLLEEEIINREETVVRAGFLVMEACEVIMGLHSEGLVLGCLGLDCFCLDRFGHCMLDLNQALALCRGVQAGASSNSVRAFIAPEVAAVLGDTLRTEGRDFDGLVGCTSDIWSLGCVFVALLTRDEQLVPVAGWNSEGLYDDWEKEVVTRLDATLLGTILEPLAAVIASCLRYDPKSRPEIADVWKCIRGLLTKFGDVTLAPDDDVAAQKSFRCLLLGELSSMFVDSGAVESDDKTQLSRGADGNSSNQDHGSNDGFLNNSGNDLSGIDGPQSVGVFKSSTLLAHRDCVTGLAVGGGFLFSSSYDKTINVWSLQDFSHVHCLKGHEHKITAIVVVDNDSHSLCISGDSGSGIFVWRVDSTLKEEPLNKWYEHNDWLYRGVNCLAVSGTGYLYTGSRDKTIKAWSLEWPVVFFTVEVGMVPFVYGGSLIIHHCLSWKMMQQEA

SEQ ID NO: 191812 - protein, 852 aa, Zea Mays
MPTTAPPVDAEPPECPVCLSPFDAASVVPRVLPCGHSLCGSCIAALPPASAAAGASSLRCPLCSQCVPYARALGPSSLPKNLALLTLLPSPSHALSAATLVTAPLPHPHPLHAAHSRLLSRFRHAVLPESASPLGSEPSPVHLAFGSLGSDLGAPWFCARGRPVSLLPIETQPVPPTKQEAEFYRPSHATRVLAAVDALSDATKEELAGLIASSARLARMVSRLYGVWMSPHAPPLWMVSERHPRTVSQLLEEEIINREETVVRAGFLVMEACEVIMGLHSEGLVLGCLGLDCFCLDRFGHCMLDLNQALALCRGVQAGASSNSVRAFIAPEVAAVLGDTLRTEGRDFDGLVGCTSDIWSLGCVFVALLTRDEQLVPVAGWNSEGLYDDWEKEVVTRLDATLLGTILEPLAAVIASCLRYDPKSRPEIADVWKCIRGLLTKFGDVTLAPDDDVAAQKSFRCLLLGELSSMFVDSGAVESDDKTQLSRGADGNSSNQDHGSNDGFLNNSGNDLSGIDGPQSVGVFKSSTLLAHRDCVTGLAVGEGFVMLAQELPIFILSFTAGGFLFSSSYDKTINVWSLQDFSHVHCLKGHEHKITAIVVVDNDSHSLCISGDSGSGIFVWRVDSTLKEEPLNKWYEHNDWLYRGVNCLAVSGTGYLYTGSRDKTIKAWSLEDYSLRCTMTGHKSTVSCLAVASGILYSGSWDGTIRLWWLTDHTPLSVLEDDAAGSIAPVLSISAGTNFVASSYENGYFKVWKNDVLVKSEKLQNGAVYAVKLSGKWLYTGGWDKVINIQELLDDESEVELRDVASITCDSIITSILPWDERLIVGLSNREIKSAAAFGGQKLSEAETNRA

SEQ ID NO: 191813 - protein, 149 aa, Zea Mays
MNSNRSLIRRYLYAKICWMKNCFEIIECSATNDSIVRILHVNNVKHNLLSPCVVDESEGHWHGNLTKCYNLSPSEATKRVRSIMNLVFGLLHLSKGLSKYDIRCTACINQDIVDQKSFDHTRDNHSIIMWVILELKILLREDNWDVRPS

SEQ ID NO: 191814 - protein, 138 aa, Zea Mays
MSGALLLFFPALVLACCSPWPLKSPALSWPLTHGKLCRRSAQLSRHRRAASSALDLRSPNTRRRSAQPRPRQLPRIVYSASSHSSCSTKCRSMLHLELCSPDCVVVTPVRSRCSFSVQFCISVGSLLLIVYDYIFIKE

SEQ ID NO: 191815 - protein, 677 aa, Zea Mays
MGCVCGRPSSFEDGQCRATPPPAAKLSAAVRREEEARKQQLQLQQHARAGSGREEALERRRAMMAMAAACQVRSPVPRAVEAEQVAVGWPPWLVAVAPEAVRGWVPRRAESFEKLDKEKIVALKKVRFDNLEPESVKFMAREILILRRLDHPNVIKLEGLVTSRMSCSLYLVFEYMEHDLAGLASFRGVKFTESQVKCYMQQLLRGLEHCHSRHILHRDIKGSNLLIDNRGILKIADFGLASFFDPEQRQPLTSRVVTLWYRPPELLLGATNYGVAVDLWSAGCILAELYAGKPIMPGRTEVEQLHKIFKLCGSPSEDYWRKSKLPHATIFKPQHPYARRVAETFKEFPAPTLALVDVLLSVDPADRGTASYALQSEFFTTKPYACNPSSLPRYPPSKEFDAKRREEEARRQGVTGGKQHKHDPERRTRESRAVPAPDANAELVSSLQKRRAQANTRSRSEMFNPCKEDSASGFRIEPPRPTPGTESSEDPQHAYPTRIFHSGPLVNQSQPSKAGGGKNDELQVPGVANHPVVVSSRTGPRADDSSWTMVAQAGAFSHGRRLSESINEHLSNSGKYDQVFPKKDDRNTIRADGAIGYGSKGNKIHHSGPLTCPSGSVVDEMLKENDRQIQEVFRRTRVEKSRARRDHGHHQGGMRPADFGAIPVFPSSRSSYQAVQQ

SEQ ID NO: 191816 - protein, 443 aa, Zea Mays
MGCVCGRPSSFEDGQCRATPPPAAKLSAAVRREEEARKQQLQLQQHARAGSGREEALERRRAMMAMAAACQVRSPVPRAVEAEQVAVGWPPWLVAVAPEAVRGWVPRRAESFEKLDKIGQGTYSNVYRARDLEKEKIVALKKVRFDNLEPESVKFMAREILILRRLDHPNVIKLEGLVTSRMSCSLYLVFEYMEHDLAGLASFRGVKFTESQVKCYMQQLLRGLEHCHSRHILHRDIKGSNLLIDNRGILKIADFGLASFFDPEQRQPLTSRVVTLWYRPPELLLGATNYGVAVDLWSAGCILAELYAGKPIMPGRTEVEQLHKIFKLCGSPSEDYWRKSKLPHATIFKPQHPYARRVAETFKEFPAPTLALVDVLLSVDPADRGTASYALQSEVYKKFPIKPFSSCPAIQGICLVFSNGPCFFLRRAVSMLILFAPLEILAK

SEQ ID NO: 191817 - protein, 539 aa, Zea Mays
MAREILILRRLDHPNVIKLEGLVTSRMSCSLYLVFEYMEHDLAGLASFRGVKFTESQVKCYMQQLLRGLEHCHSRHILHRDIKGSNLLIDNRGILKIADFGLASFFDPEQRQPLTSRVVTLWYRPPELLLGATNYGVAVDLWSAGCILAELYAGKPIMPGRTEVEQLHKIFKLCGSPSEDYWRKSKLPHATIFKPQHPYARRVAETFKEFPAPTLALVDVLLSVDPADRGTASYALQSEFFTTKPYACNPSSLPRYPPSKEFDAKRREEEARRQGVTGGKQHKHDPERRTRESRAVPAPDANAELVSSLQKRRAQANTRSRSEMFNPCKEDSASGFRIEPPRPTPGTESSEDPQHAYPTRIFHSGPLVNQSQPSKAGGGKNDELQVPGVANHPVVVSSRTGPRADDSSWTMVAQAGAFSHGRRLSESINEHLSNSGKYDQVFPKKDDRNTIRADGAIGYGSKGNKIHHSGPLTCPSGSVVDEMLKENDRQIQEVFRRTRVEKSRARRDHGHHQGGMRPADFGAIPVFPSSRSSYQAVQQ

SEQ ID NO: 191818 - protein, 84 aa, Zea Mays
MQIRFTLLKVASHRINDLSFLKSFGATCRGMFHRKFVISSLTMTNGEVQAGIKYLYLHICRCMTSNQNITQCSFGDQYHHSQLS

SEQ ID NO: 191819 - protein, 85 aa, Zea Mays
MINLWHPTIDYNSIGILQVSSWAKSSFDENRIVFCTGTTKNNNIGQWKPGLISLFFQLHSVAVTSYLCTVGITQTYKPTKLYGNK

SEQ ID NO: 191820 - protein, 127 aa, Zea Mays
MTPKELDASSVDGGATSRWYYGARARCVEQACRRARPSWRRELDERSSKKATSRDVRPARHTWRRGPTAAASDRPVAEPLLGEVALSMESCAPLGGLDGGACDCNIGESPSNGEVALSMESCAPPAR

SEQ ID NO: 191821 - protein, 160 aa, Zea Mays
MEESLCAVEKRGRVHVITLTGAEEHRLSPALLSALRSAVAAARRALPRCARPGRRGQVLQQRLRPRVGARGAGPGAGAPPLRDARRVPRPRRRPARAPRANGRGRHGPRRGRRLRARAGARRRRHARLPRVPLHERGRRRDQDRRFCRRAGSAEGPRRGR

SEQ ID NO: 191822 - protein, 1370 aa, Zea Mays
MPLVRFEVRNEVGLGDPGLYGGGAAAAAAATAAAGEEEPKALLEGVAVAGLVGILRQLGDLADFGHTRFAADVFHDLHEQVIATSARGRKVLTRVQNIEAALPSLEKAVKNQKSHIHFAYVPGSDWHTQLQNEQNHLLATDLPRFMMDSYEECRDPPRLYLLDKFDNAGAGACVKRYSDPSYFKKAWDTMRADKNANVQREKRSQKIKRKGSRLREPYHGQAMPRHRGTEFQRSLTAGQLVNRQFASPSNDGQGISEHKSTPDARSNPDNMSRSSSLSSKTQLSSVEQAIDTKPSAVSHENGHGKSLDTKLHKPGGLPSPVLLNSTTVDDHSDHLKQGSPPDGMVARSPYVKWDEKTAIIMSTSSIYCDDVVMDEVEDAEPTCISSVQKETDHKVMDTLHQQDALLKKTKSLLVPSVLNHHDDIPGEADNYMDALNTLESETETESEFQTKNRVPAPSFKAEAPQVGAIDNIVPQCLDSSAADFIDTCQESDIICTSERAIDFPSLSNADSLEVSQLELSDYTSVSPYKESSVITNIHESGAEGARGDPCEIIEPLQVHSAILANDGSPVCNEIPKSKPDDDLGYFQEIPQPGFSTCMVIPSNKESAVANKNLEGDAKSDDDLIDGTADNVVSGPKIANMVVDEVGFKMAPANRSSPGDPSDDSCVIPESRPQDYAVKSYEGVGDCGVTEVSKLCSEPLNKPSDNICATQDVPTNTSTMSAGASEVSSSWSEPVTELIDDRCATQGVPANASTTSTVVPSVKLWTNAGLFGLEPSKPPVFGNGPREDTPPGFKEAQPVHSTEFTEVHCSKPTESAAVDVPNGNTSITSSFVEKLVGIRPGSANLNSSGANQSAARIPDPIHSHTDGHSDFSSSFEHNNMTGKHTSISELLEFEGSADTGTKIYSTDMRNNAVSASSFSSIAQRFLANTLQRRTSKYTDLPMSSERANADTSAKSESTLNPVVEPSEAVFAEETKFENKTENGMDGLSKTSIFSSRHYSEKSSPPLEYMKISFHPMSAFEMSKLNLDFCDGNIHEISDDMMLPTFQLLSESSIPQPGSGSESEDDTFGRSYSYSSYDDLSPRLYSNSEAWDQDDGTGLEEHELYDDSNQIGSSTAPLSSYMGFEQMNLSDMKSDISLANIGDQNVIGTLQSCTVEELPNFDTLMSRSDDQNGETPIPHNLGNMTPDEDQLPPPPPLPPMQWRMTRQTTSLEEETCITTKDMLRKTSSLPHIHTSAQEEHCPPTAPLDLQGHAGEVKTGGVREITNPPSIIDIKSSLLQQIRDKSEQLKLNGHERSKKAVGGDIKSLDEREELLQQIRSKTFNLRRTNASKADGSSQSTASSNVAAILEKANAIRQAVASDEGGDDDTWSDI

SEQ ID NO: 191823 - protein, 1291 aa, Zea Mays
MPLVRFEVRNEVGLGDPGLYGGGAAAAAAATAAAGEEEPKALLEGVAVAGLVGILRQLGDLADFGHTRFAADVFHDLHEQVIATSARGRKVLTRVQNIEAALPSLEKAVKNQKSHIHFAYVPGSDWHTQLQNEQNHLLATDLPRFMMDSYEECRDPPRLYLLDKFDNAGAGACVKRYSDPSYFKKAWDTMRADKNANVQREKRSQKIKRKGSRLREPYHGQAMPRHRGTEFQRSLTAGQLVNSRQFASPSNDGQGISEHKSTPDARSNPDNMSRSSSLSSKTQLSSVEQAIDTKPSAVSHENGHGKSLDTKLHKPGGLPSPVLLNSTTVDDHSDHLKQGSPPDGMVARSPYVKWDEKTAIIMSTSSIYCDDVVMDEVEDAEPTCISSVQKETDHKVMDTLHQQDALLKKTKSLLVPSVLNHHDDIPGEADNYMDALNTLESETETESEFQTKNRVPAPSFKAEAPQVGAIDNIVPQCLDSSAADFIDTCQESDIICTSERAIDFPSLSNADSLEVSQLELSDYTSVSPYKESSVITNIHESGAEGARGDPCEIIEPLQVHSAILANDGSPVCNEIPKSKPDDDLGYFQEIPQPGFSTCMVIPSNKESAVANKNLEGDAKSDDDLIDGTADNVVSGPKIANMVVDEVGFKMAPANRSSPGDPSDDSCVIPESRPQDYAVKSYEGVGDCGVTEVSKLCSEPLNKPSDNICATQDVPTNTSTMSAGASEVSSSWSEPVTELIDDRCATQGVPANASTTSTVVPSVKLWTNAGLFGLEPSKPPVFGNGPREDTPPGFKEAQPVHSTEFTEVHCSKPTESAAVDVPNGNTSITSSFVEKLVGIRPGSANLNSSGANQSAARIPDPIHSHTDGHSDFSSSFEHNNMTGKHTSISELLEFEGSADTGTKIYSTDMRNNAVSASSFSSIAQRFLANTLQRRTSKYTDLPMSSERANADTSAKSESTLNPVVEPSEAVFAEETKFENKTENGMDGLSKTSIFSSRHYSEKSSPPLEYMKISFHPMSAFEMSKLNLDFCDGNIHEISDDMMLPTFQLLSESSIPQPGSGSESEDDTFGRSYSYSSYDDLSPRLYSNSEAWDQDDGTGLEEHELYDDSNQIGSSTAPLSSYMGFEQMNLSDMKSDISLANIGDQNVIGTLQSCTVEELPNFDTLMSRSDDQNGETPIPHNLGNMTPDEDQLPPPPPLPPMQWRMTRQTTSLEEETCITTKDMLRKTSSLPHIHTSAQEEHCPPTAPLDLQGHAGEVGVQKTGGVREITNPPSIIDIKSSLLQQIRDKVCSAF

SEQ ID NO: 191824 - protein, 427 aa, Zea Mays
MGLLAGSTVFLLTLLWGTCVVVGKCDLGPGREAVDVTDTKGFSLTGTGVTTDVQTSYAARIMGLSVIPFIIAQFPKMLKTHHGQRLAMLLALVVSFALVLAYCLYQVFQPWIQRRKLAYAKHKHVISGILRHAQMQSLGRLLNDDGTPNEQVIRKLFRKIDMDESRSLSRAELHALIVGINFEEVDFDRTDAVDKVMDDFDTSRNDVVEEEEFVQGMRKWLDEARRSVPVGGAFSSKFIHEYHERTRQEHDELVDRSDEAVESVENPGWCIAKAVALLLLGSAAAAAFADPLVDAVHGFSNATRIPSFFISFIALPLATNSSEAVSAIIFASRKKQRTCSLTFSEVYGGVTMNNTLCLGVFLALIYFRNLTWDFSSEVLIILLVCVVMALFTSFRTTFPLWTCLVAYMLYPLSLIIVYILDYVFGWS

SEQ ID NO: 191825 - protein, 306 aa, Zea Mays
MLPTRTQHHASLALDPGCRRCPRRHPSGSPVVDSSSPSSGRRGWRRSSGTPPFRMRHPRQEQHGRRRPRCQQQHTASATGQRPEAPASPRGDADADARTSWIWCTCPISPARSASATCPRRPCTGRSSAWRTRASRAATPFPAATLFGVPSRPSSSGSLTASCSPWRTPSAAASTATTTSSSGTASTSSGRSSSPSTTASSRLRGMWRPWCGGLRPLPRAAGCCNGFCSISLSNLNVYACLVYGKYFQGRGLKSHAYTHSLEAGHPNSTMDRCMVLDPTRDASKVANLVAVLQVGVLLAADLVLST

SEQ ID NO: 191826 - protein, 239 aa, Zea Mays
MYGPRSYKGRQQGSKFGGSTTSWSSAGRRFGTIDLSGNQQRGSMPFGSHNGSLEFMNEQNHGPRATKPKIQGTENTSGDERSEKIVPLIDSELYNRSDFITEYKDVKFFVIKSYTEDHVHRSIKYKVWASTANGNRKLDSAYHAAKEKEEHYPIFLFFSVNGSGQFCGVAEMIGPVDFDRSVDYWQQDKWSGQFPLKWHIIKDVSNNLLRHIILENNDNKPVTNSKDTQEIDRDVARAR

SEQ ID NO: 191827 - protein, 67 aa, Zea Mays
MKKGNKKGQKNPSAVHNPPSRQPSSQPPAAPNTKPQNPSPQPSTPAASAQHKILPPLQKKEQNVQCL

SEQ ID NO: 191828 - protein, 121 aa, Zea Mays
MVNPYGHDGFNIRKSTFVRYQRLGNGLNKMRPDVEQERSPFVSIKDRSDCWPDDLGSFNWPHASSWVSFASVEPITEQLTHTGSGEMARVTSAHLASGWMVGCCALGSREPVLVLRNPVAS

SEQ ID NO: 191829 - protein, 303 aa, Zea Mays
MARNINSDYIDFSHLGGFDMGINFDEFEENVKKLMEYLDSAHDKAVEFIEDVHAKFYGPFTDDEVPNNDQSSRYVITESSPTSIEKELVGPNTELSTPPACFITMENSSTGCDTDAHKTQSESFSTKSTDILIHTTDFCNALLLEDSSTNYEMTVCLQPYQATLPGTQANRPEVHMVSTISYSANSPVESTIHGTCTSHDSSTSASSCADDPSMSTDSMVKSVDMDGQKHMKNDKIKVHLAPQPENASFKKMLLRNLSRKLRWSKAQADTHQTMAPGSQGAEDPGYPLVSPSDDDLEDSWEIL

SEQ ID NO: 191830 - protein, 473 aa, Zea Mays
MARNINSDYIDFSHLGGFDMGINFDEFEENVKKLMEDFLDNALLLTFPIHGRIPIKYLDSAHDKAVEFIEDVHAKFYGPFTDDEVPNNDQSSRYVITESSPTSIEKELVGPNTELSTPPACFITMENSSTGCDTDAHKTQSESFSTKSTGLSSMNHVYPENNLSEGAHIDSNDLCIRIYDSSEEVILWNPVSSVKPQQSHELTTIPQDDHALHALETEVTEQVGLNCSGHSDSSVCSGVSPLENSCANCEEKMVLHSANDPVGVTVHDSTTLTQEYHVSYTLHMEQMIEQAGLHCSGHSDILIHTTDFCNALLLEDSSTNYEMTVCLQPYQATLPGTQANRPEVHMVSTISYSANSPVESTIHGTCTSHDSSTSASSCADDPSMSTDSMVKSVDMDGQKHMKNDKIKVHLAPQPENASFKKMLLRNLSRKLRWSKAQADTHQTMAPGSQGAEDPGYPLVSPSDDDLEDSWEIL

SEQ ID NO: 191831 - protein, 257 aa, Zea Mays
MARNINSDYIDFSHLGGFDMGINFDEFEENVKKLMEYLDSAHDKAVEFIEDVHAKFYGPFTDDEVPNNDQSSRYVITESSPTSIEKELVGPNTELSTPPACFITMENSSTGCDTDAHKTQSESFSTKSTGLSSMNHVYPENNLSEGAHIDSNDLCIRIYDSSEEVILWNPVSSVKPQQSHELTTIPQDDHALHALETEVTEQVGLNCSGHSDSSVCSGVSPLENSCANCEEKMVLHSANDPVGVTVHGLHLSPFNCD

SEQ ID NO: 191832 - protein, 277 aa, Zea Mays
MARNINSDYIDFSHLGGFDMGINFDEFEENVKKLMEDFLDNALLLTFPIHGRIPIKYLDSAHDKAVEFIEDVHAKFYGPFTDDEVPNNDQSSRYVITESSPTSIEKELVGPNTELSTPPACFITMENSSTGCDTDAHKTQSESFSTKSTGLSSMNHVYPENNLSEGAHIDSNDLCIRIYDSSEEVILWNPVSSVKPQQSHELTTIPQDDHALHALETEVTEQVGLNCSGHSDSSVCSGVSPLENSCANCEEKMVLHSANDPVGVTVHGLHLSPFNCD

SEQ ID NO: 191833 - protein, 461 aa, Zea Mays
MARNINSDYIDFSHLGGFDMGINFDEFEENVKKLMEYLDSAHDKAVEFIEDVHAKFYGPFTDDEVPNNDQSSRYVITESSPTSIEKELVGPNTELSTPPACFITMENSSTGCDTDAHKTQSESFSTKSTGLSSMNHVYPENNLSEGAHIDSNDLCIRIYDSSEEVILWNPVSSVKPQQSHELTTIPQDDHALHALETEVTEQVGLNCSGHSDSSVCSGVSPLENSCANCEEKMVLHSANDPVGVTVHENGVRVLADSTTLTQEYHVSYTLHMEQMIEQAGLHCSGHSDILIHTTDFCNALLLEDSSTNYEMTVCLQPYQATLPGTQANRPEVHMVSTISYSANSPVESTIHGTCTSHDSSTSASSCADDPSMSTDSMVKSVDMDGQKHMKNDKIKVHLAPQPENASFKKMLLRNLSRKLRWSKAQADTHQTMAPGSQGAEDPGYPLVSPSDDDLEDSWEIL

SEQ ID NO: 191834 - protein, 448 aa, Zea Mays
MARNINSDYIDFSHLGGFDMGINFDEFEENVKKLMEYLDSAHDKAVEFIEDVHAKFYGPFTDDEVPNNDQSSRYVITESSPTSIEKELVGPNTELSTPPACFITMENSSTGCDTDAHKTQSESFSTKSTGLSSMNHVYPENNLSEGAHIDSNDLCIRIYDSSEEVILWNPVSSVKPQQSHELTTIPQDDHALHALETEVTEQVGLNCSGHSDSSVCSGVSPLENSCANCEEKMVLHSANDPVGVTVHENGVRVLADSTTLTQEYHVSYTLHMEQMIEQAGLHCSGHSDILIHTTDFCNALLLEDSSTNYEMTVCLQPYQATLPGTQANRPEVHMVSTISYSANSPVESTIHGTCTSHDSSTSASSCADDPSMSTDSMVKSVDMDGQKHMKNDKIKKMLLRNLSRKLRWSKAQADTHQTMAPGSQGAEDPGYPLVSPSDDDLEDSWEIL

SEQ ID NO: 191835 - protein, 190 aa, Zea Mays
MEQMIEQAGLHCSGHSDILIHTTDFCNALLLEDSSTNYEMTVCLQPYQATLPGTQANRPEVHMVSTISYSANSPVESTIHGTCTSHDSSTSASSCADDPSMSTDSMVKSVDMDGQKHMKNDKIKVHLAPQPENASFKKMLLRNLSRKLRWSKAQADTHQTMAPGSQGAEDPGYPLVSPSDDDLEDSWEIL

SEQ ID NO: 191836 - protein, 310 aa, Zea Mays
MARNINSDYIDFSHLGGFDMGINFDEFEENVKKLMEDFLDNALLLTFPIHGRIPIKYLDSAHDKAVEFIEDVHAKFYGPFTDDEVPNNDQSSRYVITESSPTSIEKELVGPNTELSTPPACFITMENSSTGCDTDAHKTQSESFSTKSTDILIHTTDFCNALLLEDSSTNYEMTVCLQPYQATLPGTQANRPEVHMVSTISYSANSPVESTIHGTCTSHDSSTSASSCADDPSMSTDSMVKSVDMDGQKHMKNDKIKKMLLRNLSRKLRWSKAQADTHQTMAPGSQGAEDPGYPLVSPSDDDLEDSWEIL

SEQ ID NO: 191837 - protein, 221 aa, Zea Mays
MVLHSANDPVGVTVHDSTTLTQEYHVSYTLHMEQMIEQAGLHCSGHSDILIHTTDFCNALLLEDSSTNYEMTVCLQPYQATLPGTQANRPEVHMVSTISYSANSPVESTIHGTCTSHDSSTSASSCADDPSMSTDSMVKSVDMDGQKHMKNDKIKVHLAPQPENASFKKMLLRNLSRKLRWSKAQADTHQTMAPGSQGAEDPGYPLVSPSDDDLEDSWEIL

SEQ ID NO: 191838 - protein, 191 aa, Zea Mays
MQRGDPLVVGRIIGDVVDPFVRRVPLRVAYAAREVSNGCELRPSAIADQPRVEVGGPDMRTFYTLVMVDPDAPSPSDPNLREYLHCMLQHTYCQDLVYILHLVRLVTDIPATTGVSFGTEVVCYESPRPVLGIHRVVFLLFQQLGRQTVYAPGWRQNFSTRDFAELYNLGLPVAAVYFNCQRESGTGGRRM

SEQ ID NO: 191839 - protein, 140 aa, Zea Mays
MDALTRLHRSLVGGDDEDQPEDSILADTEDLCSLSPLQRIYAFAACLVAGLTLMILSFIVFARPIKFAVMFTFGNILAVGSTAFVMGPQKQLRMMFDPVRLYATAVYVGCVVLALIFALWIHDKLLTLIAVICEICALFW

SEQ ID NO: 191840 - protein, 94 aa, Zea Mays
MAELERIKKERAEEKLRKERQQAEEEAKMKEAELMRGNPLININNPGSFSVKRRWDDDVVFKNQARGETKTPKRFINDTIRSDFHRKFLHRYMK

SEQ ID NO: 191841 - protein, 182 aa, Zea Mays
MAFTSPYSYIHLFRCLIKKNRDDIVFTDPLNTFKGLENYKTIFWALRFTGRIFFKALWVDIVSIWQPAENIIMIRWIAHGIPRVPWDGHGRFDGASVYKLDKDGKIYEHKVHNVAMNPPTKFKVLPVHELIRSLGCPSTAKPTYFEASSQYLCAGPSYLRLAWIRCYISLCRMLSLANLGEG

SEQ ID NO: 191842 - protein, 91 aa, Zea Mays
MSAAGTIASTFVLVFVAEWGDKSFFSTIALAAASSPLGVIAGSLAGHAIATLIAVLGGSLLGTFLSEKIIAYIGGSLFLAFAAITIVEIVT

SEQ ID NO: 191843 - protein, 273 aa, Zea Mays
MASAAGAALCPCSFSTVLSSSPSTPFRPARTTPRPSLRPLPRRARLPLRPGHSVLRCLPKCDSGKPDGGGDAGLSGRKAARPAGQGGPRRPAQFGASSCGLAFTTVAGVIMLQASQQALAATQFAGLQPADVLGDLGDVSTGFASAFLLIFFSELGDRTFFIAALLAARSSGAVIFLGTFGALAVMTIISVVLGRAFHYVDGIIPFSFGGTDFPVDDIAAACLLVYYGVTTLLDAASGDDEKINEEQEEGDHGHVKLVLNLSYVMARLVRKNS

SEQ ID NO: 191844 - protein, 288 aa, Zea Mays
MASAAGAALCPCSFSTVLSSSPSTPFRPARTTPRPSLRPLPRRARLPLRPGHSVLRCLPKCDSGKPDGGGDAGLSGRKAARPAGQGGPRRPAQFGASSCGLAFTTVAGVIMLQASQQALAATQFAGLQPADVLGDLGDVSTGFASAFLLIFFSELGDRTFFIAALLAARSSGAVIFLGTFGALAVMTIISVVLGRAFHYVDGIIPFSFGGTDFPVDDIAAACLLVYYGVTTLLDAASGDDEKINEEQEEIAVLGGSLLGTFLSEKIIAYIGGSLFLAFAAITIVEIVT

SEQ ID NO: 191845 - protein, 146 aa, Zea Mays
MASAAGAALCPCSFSTVLSSSPSTPFRPARTTPRPSLRPLPRRARLPLRPGHSVLRCLPKCDSGKPDGGGDAGLSGRKAARPAGQGGPRRPAQFGASSCGLAFTTVAGVIMLQASQQALAATQFAGLQPADVLGDLGDVSTGTVSS

SEQ ID NO: 191846 - protein, 207 aa, Zea Mays
MATRRRMLLKVIILGDSGVGKTSLMNQYVNNRFSNQYKATIGADFLTKEVQIDDRLFTLQIWDTAGQERFQSLGVAFYRGADCCVLVYDVNVSKSFEKLNNWREEFLIQASPSDPENFPFVVLGNKIDVDGGNSRTVSEKKAKAWCASKGNIPYFETSAKEGFNVEAAFECIARNAVKNEPEEDMYLPDTIDVGGAGRQQRSSGCEC

SEQ ID NO: 191847 - protein, 168 aa, Zea Mays
MPSGSSPHRATLGSVHTVTPLIWDTAGQERFQSLGVAFYRGADCCVLVYDVNVSKSFEKLNNWREEFLIQASPSDPENFPFVVLGNKIDVDGGNSRTVSEKKAKAWCASKGNIPYFETSAKEGFNVEAAFECIARNAVKNEPEEDMYLPDTIDVGGAGRQQRSSGCEC

SEQ ID NO: 191848 - protein, 100 aa, Zea Mays
MQASPSDPENFPFVVLGNKIDVDGGNSRTVSEKKAKAWCASKGNIPYFETSAKEGFNVEAAFECIARNAVKNEPEEDMYLPDTIDVGGAGRQQRSSGCEC

SEQ ID NO: 191849 - protein, 326 aa, Zea Mays
MALEPVALLLTVLVAAPLTVLLLLFLVAGNKRPARAASPTPRHRLRLPLPPSPRGLPLLGHLHLLGSLPHRALASLARAHGPVLLLRLGRVPTVVVSSAAAAEEVMRARDLAFANRPASAMAERLLYGRDVAFAPYGEYWRMVRRVCVVHLLSARRVGSFRRVREQEAAALVARVARDSAGGAAVGLSDLLTEYANAVVSRAAFGDESARGLLDEFDSGRRHRKVLTDFQKLLGTTPVGEVLPWLGWVDAVTGLEGKIRRTFEGLDGLLEKVIDDHRRRPRSGEDGGDRDFVDVLLDVHNKDQEHGIQLETNEIKAIILARTRQPR

SEQ ID NO: 191850 - protein, 50 aa, Zea Mays
MVSLFLFYTVTPGFRGHQDPGANIITKCDRSKSYTYDDSWYRNECHIFTI

SEQ ID NO: 191851 - protein, 412 aa, Zea Mays
MHVAERDILHDMVKIVKKKSDPRVKEKVLVLIDTWQDVFGGSHARYPQYYAAYHELVRAGAEFPKRPEKPAPLFNGQSQAARNMRSPDQQEAESSAANDFPALSMSEIHNACGIMDVLAEMLNALDPGNREGLRQEVIVELVDQCRTYKQRVVQLVNSTTDEELMSQGLTLNDDLQRVLAKHDAIAAGIAVRVEKKSKSLQALVETKDSTNQDSKKEQGLIDIEDPTSQDAAKDPNQSTSDQSPFEQLALPAPPVSNGAATSAPQSDLGIDLLSWDDTPATTQNPLALVPVTDPLADSTSSNQNALAIVDTFSENSTTNHNAQPADPFGLNPSSAIPGSQLYNTPTQQPFQSQQPPQQAALYANGGAVDPGTSYDQASQFKNVSSGWNGQAANPVVPLPEQALNYVCTFLSF

SEQ ID NO: 191852 - protein, 411 aa, Zea Mays
MHVAERDILHDMVKIVKKKSDPRVKEKVLVLIDTWQDVFGGSHARYPQYYAAYHELVRAGAEFPKRPEKPAPLFNGQSQAARNMRSPDQQEAESSAANDFPALSMSEIHNACGIMDVLAEMLNALDPGNREGLRQEVIVELVDQCRTYKQRVVQLVNSTTDEELMSQGLTLNDDLQRVLAKHDAIAAGIAVRVEKKSKSLQALVETKDSTNQDSKKEQGLIDIEDPTSQDAAKDPNQSTSDQSPFEQLALPAPPVSNGAATSAPQSDLGIDLLSWDDTPATTQNPLALVPVTDPLADSTSSNQNALAIVDTFSENSTTNHNAQPADPFGLNPSSAIPGSQLYNTPTQQPFQSQQPPQQAALYANGGAVDPGTSYDQASQFKNVSSGWNGQAANPVVPLPEQALNYELSVFI

SEQ ID NO: 191853 - protein, 469 aa, Zea Mays
MSQGLTLNDDLQRVLAKHDAIAAGIAVRVEKKSKSLQALVETKDSTNQDSKKEQGLIDIEDPTSQDAAKDPNQSTSDQSPFEQLALPAPPVSNGAATSAPQSDLGIDLLSWDDTPATTQNPLALVPVTDPLADSTSSNQNALAIVDTFSENSTTNHNAQPADPFGLNPSSAIPGSQLYNTPTQQPFQSQQPPQQAALYANGGAVDPGTSYDQASQFKNVSSGWNGQAANPVVPLPEQALNYDDQSGNLPPPPWEAQPASNNELPNGQLGSLQPLPGSAGQIGGMQQPLQPQVNHMGVPQSQPMYSNQPMQPGQVAATTQMQPGFGNQQFGSLPPTSMLGMQFGGMQPPQMYGGSQPVMMYPQQMAVAQYGAMPRQQPTYGGRLAGYMQHPAVAAAHYYNNQGMYGYPGANGLSQSMYGLSVQDNSSMGMRSSYQTTTAPPSTGQPMKPTKPEDKLFGDLLSIAKTKKAS

SEQ ID NO: 191854 - protein, 550 aa, Zea Mays
MRSPDQQEAESSAANDFPALSMSEIHNACGIMDVLAEMLNALDPGNREGLRQEVIVELVDQCRTYKQRVVQLVNSTTDEELMSQGLTLNDDLQRVLAKHDAIAAGIAVRVEKKSKSLQALVETKDSTNQDSKKEQGLIDIEDPTSQDAAKDPNQSTSDQSPFEQLALPAPPVSNGAATSAPQSDLGIDLLSWDDTPATTQNPLALVPVTDPLADSTSSNQNALAIVDTFSENSTTNHNAQPADPFGLNPSSAIPGSQLYNTPTQQPFQSQQPPQQAALYANGGAVDPGTSYDQASQFKNVSSGWNGQAANPVVPLPEQALNYDDQSGNLPPPPWEAQPASNNELPNGQLGSLQPLPGSAGQIGGMQQPLQPQVNHMGVPQSQPMYSNQPMQPGQVAATTQMQPGFGNQQFGSLPPTSMLGMQFGGMQPPQMYGGSQPVMMYPQQMAVAQYGAMPRQQPTYGGRLAGYMQHPAVAAAHYYNNQGMYGYPGANGLSQSMYGLSVQDNSSMGMRSSYQTTTAPPSTGQPMKPTKPEDKLFGDLLSIAKTKKAS

SEQ ID NO: 191855 - protein, 118 aa, Zea Mays
MGWCRFFRRSYLSQPRPFYLACWAQKHLTGPTPCLAARATAPQPPARAHRSAVWGRSRRSAAHITNRVMLMCLQSPPRGTHTVTIIPFPHSSGCYEATCRSRPSPLVGFRPIWRSPWE

SEQ ID NO: 191856 - protein, 124 aa, Zea Mays
MEDRMDLSFWWKSQTISSWPNFLSHCVRPKILEGKFGTRSIDHRILSIRLELEQNLFPHLKLPGNPLLICKMFIPLLSSSQIGLQHLTMLSSVLNKLDSSLILLPCDRRNSKNRCFIAIKGLER

SEQ ID NO: 191857 - protein, 234 aa, Zea Mays
MKQLDSYLCQQWVRSHSRVSVAAHAVAIRVVGGGCLLKGRGRACCAGRGRPQTVKQTSQVASVVVRDTAFGSMGAVEPPAWMSAAARRWLENAGATAEDTPGRAFNALPLSGVRVSLAERGRALCSLRVPPHLTDAEGNWHAGAIAAAADDVCAAAIMSVEGIIKVSVHYDISYFTPAKLHDEVEMDGRVVEHKGRMTAVVVEIRKKKSGELVAIGRQWMTASRPKGAAAHSKI

SEQ ID NO: 191858 - protein, 119 aa, Zea Mays
MDISDLPDDVSRMISSIEENGTQNLHGPKPCVVSIEDDNRTAQDVPSDDCNEPNARKPKSGHNVSKQISAHKTNQVRNQVPLQASLKRNVGSVDKKKRDQSANLADISDLKFCQRKPKR

SEQ ID NO: 191859 - protein, 395 aa, Zea Mays
MTHSRHHDGVPRVGMDVVAPRSCHHDGMQKGRHVPTSMRAQTTTRMSGEIVSVTKHRRWNCVKCLNRVKSPGPTTTSETVSIQQDGTNDGCSISIVRTLPNNSDSRRLFSWTQQSSQGNDQSTLSKSAQECNSKCSSPYGSRAVTTVNVPDTLTEANVPDTFTEGSVPATEGLWSSFNNIDVSANILNDVSMDISDLPDDVSRMISSIEENGTQNLHGPKPCVVSIEDDNRTAQDVPSDDCNEPNARKPKSGHNVSKQISAHKTNQVRNQKVGETQSRAPKNIVNHTVGMVGVGSSLMNWMKNTHNKKIRAQKKDTGHKNLDSCAVSNSNPDTVASSVGDMGQEKMLSTSNGKHGNENTQNNNLEQNMQNVDDLCQNESGNLKRGFSNGKNQRFC

SEQ ID NO: 191860 - protein, 310 aa, Zea Mays
MTHSRHHDGVPRVGMDVVAPRSCHHDGMQKGRHVPTSMRAQTTTRMSGEIVSVTKHRRWNCVKCLNRVKSPGPTTTSETVSIQQDGTNDGCSISIVRTLPNNSDSRRLFSWTQQSSQGNDQSTLSKSAQECNSKCSSPYGSRAVTTVNVPDTLTEANVPDTFTEGSVPATEGLWSSFNNIDVSANILNDVSMDISDLPDDVSRMISSIEENGTQNLHGPKPCVVSIEDDNRTAQDVPSDDCNEPNARKPKSGHNVSKQISAHKTNQVRNQVPLQASLKRNVGSVDKKKRDQSANLADISDLKFCQRKPKR

SEQ ID NO: 191861 - protein, 741 aa, Zea Mays
MSVNIWGPSDLDFLAGAMRSFIPNRAMLHTHSFGADRNASSPQSTDSVIVLDDEVVRVSAMFVKPKYNNGTGSSNDSDMKPGDTAIVYACELPEIKGKFDPSKAAALGLRPGPKYRELQLGNSVQSDQFDEMVHPSDVLGPSIPGPTVLLVDCPTQYHMPELFSLHPLSCFYEDSPEQSGKKVNCIIHLGPSPVTRSVDYQNWMKKFGATQHIMAGHEIKNMEIPILKGSARISSHLNFVCPQLFPSSGFWSEQPSNDVMENDKSVSSEACGSVSAQNLLKFHLRPYAQLGLDRTSIPNLFTYKDFVEELVSEIPAIREVPEQVCKFWQNNVNDNNILTPTGNHMGEEQWINKKSDKVDDGTLFQEIVLRKHPRDNQEIPCCVEDATREDMEITFLGTGSSQPSKYRNVSSIYINLFERGGILLDCGEGTLGQLKRRFGVNDADEAVKGLRCIWISHIHADHHTGLARILALRSKLLKGVPHKPLLVIGPRPLERFLNAYSTLEHLDMQFLDCRHTLKSSVEAFLSENDTDPATPQLETTMFAPGTRMENYNRKPASPRDTTALANFKEVLQESGLEILYSVPVLHCPQAFGVVLKAMEKANSTGKVIPGWKVVYSGDTRPCPGLIDASRDATVLIHEATFEDSMKDEAIARNHSTTKEAIEVGTSAGAYRIILTHFSQRYPKIPVIDEVDMEKTCIAFDLMSVNLADLPVVPKVLPHLKVLFKDELVVDEAEEVQEAAVY

SEQ ID NO: 191862 - protein, 495 aa, Zea Mays
MPQVAAPLRLLLPLSQTLAAPAPLLHHSRRLLSSCPASLSRAAGLRALAYRRRRHTEPRRGTSTLGKAPAKEEMDKEVAFNRKRAEGKDGGKRGSMELKTRRLNPVNTTCYVQILGTGMDTQDTSPSILLFFDKQRFIFNAGEGLQRFCTEHKIKLSKIDHIFLTRVCSETAGGLPGLVLTLAGIGDEGMSVNIWGPSDLDFLAGAMRSFIPNRAMLHTHSFGADRNASSPQSTDSVIVLDDEVVRVSAMFVKPKYNNGTGSSNDSDMKPGDTAIVYACELPEIKGKFDPSKAAALGLRPGPKYRELQLGNSVQSDQFDEMVHPSDVLGPSIPGPTVLLVDCPTQYHMPELFSLHPLSCFYEDSPEQSGKKVNCIIHLGPSPVTRSVDYQNWMKKFGATQHIMAGHEIKNMEIPILKGSARISSHLNFVCPQLFPSSGFWSEQPSNDVMENDKIFLFSFQSVSSEACGSVSAQNLLKNFYSKLVHLQGFCRRACI

SEQ ID NO: 191863 - protein, 937 aa, Zea Mays
MPQVAAPLRLLLPLSQTLAAPAPLLHHSRRLLSSCPASLSRAAGLRALAYRRRRHTEPRRGTSTLGKAPAKEEMDKEVAFNRKRAEGKDGGKRGSMELKTRRLNPVNTTCYVQILGTGMDTQDTSPSILLFFDKQRFIFNAGEGLQRFCTEHKIKLSKIDHIFLTRVCSETAGGLPGLVLTLAGIGDEGMSVNIWGPSDLDFLAGAMRSFIPNRAMLHTHSFGADRNASSPQSTDSVIVLDDEVVRVSAMFVKPKYNNGTGSSNDSDMKPGDTAIVYACELPEIKGKFDPSKAAALGLRPGPKYRELQLGNSVQSDQFDEMVHPSDVLGPSIPGPTVLLVDCPTQYHMPELFSLHPLSCFYEDSPEQSGKKVNCIIHLGPSPVTRSVDYQNWMKKFGATQHIMAGHEIKNMEIPILKGSARISSHLNFVCPQLFPSSGFWSEQPSNDVMENDKIFLFSFQSVSSEACGSVSAQNLLKFHLRPYAQLGLDRTSIPNLFTYKDFVEELVSEIPAIREVPEQVCKFWQNNVNDNNILTPTGNHMGEEQWINKKSDKVDDGTLFQEIVLRKHPRDNQEIPCCVEDATREDMEITFLGTGSSQPSKYRNVSSIYINLFERGGILLDCGEGTLGQLKRRFGVNDADEAVKGLRCIWISHIHADHHTGLARILALRSKLLKGVPHKPLLVIGPRPLERFLNAYSTLEHLDMQFLDCRHTLKSSVEAFLSENDTDPATPQLETTMFAPGTRMENYNRKPASPRDTTALANFKEVLQESGLEILYSVPVLHCPQAFGVVLKAMEKANSTGKVIPGWKVVYSGDTRPCPGLIDASRDATVLIHEATFEDSMKDEAIARNHSTTKEAIEVGTSAGAYRIILTHFSQRYPKIPVIDEVDMEKTCIAFDLMSVNLADLPVVPKVLPHLKVLFKDELVVDEAEEVQEAAVY

SEQ ID NO: 191864 - protein, 898 aa, Zea Mays
MPQVAAPLRLLLPLSQTLAAPAPLLHHSRRLLSSCPASLSRAAGLRALAYRRRRHTEPRRGTSTLGKAPAKEEMDKEVAFNRKRAEGKDGGKRGSMELKTRRLNPVNTTCYVQILGTGMDTQDTSPSILLFFDKQRFIFNAGEGLQRFCTEHKIKLSKIDHIFLTRVCSETAGGLPGLVLTLAGIGDEGMSVNIWGPSDLDFLAGAMRSFIPNRAMLHTHSFGADRNASSPQSTDSVIVLDDEVVRVSAMFVKPKYNNGTGSSNDSDMKPGDTAIVYACELPEIKGKFDPSKAAALGLRPGPKYRELQLGNSVQSDQFDEMVHPSDVLGPSIPGPTVLLVDCPTQYHMPELFSLHPLSCFYEDSPEQSGKKVNCIIHLGPSPVTRSVDYQNWMKKFGATQHIMAGHEIKNMEIPILKGSARISSHLNFVCPQLFPSSGFWSEQPSNDVMENDKSVSSEACGSVSAQNLLKFHLRPYAQLGLDRTSIPNLFTYKDFVEELVSEIPAIREVPEQVCKFWQNNVNDNNILTPTGNHMGEEQWINKKSDKVDDGTLFQEIVLRKHPRDNQEIPCCVEDATREDMEITFLGTGSSQPSKYRNVSSIYINLFERGGILLDCGEGTLGQLKRRFGVNDADEAVKGLRCIWISHIHADHHTGLARILALRSKLLKGVPHKPLLVIGPRPLERFLNAYSTLEHLDMQFLDCRHTLKSSVEAFLSENDTDPATPQLETTMFAPGTRMENYNRKPASPRDTTALANFKEVLQESGLEILYSVPVLHCPQAFGVVLKAMEKANSTGKATFEDSMKDEAIARNHSTTKEAIEVGTSAGAYRIILTHFSQRYPKIPVIDEVDMEKTCIAFDLMSVNLADLPVVPKVLPHLKVLFKDELVVDEAEEVQEAAVY

SEQ ID NO: 191865 - protein, 907 aa, Zea Mays
MPQVAAPLRLLLPLSQTLAAPAPLLHHSRRLLSSCPASLSRAAGLRALAYRRRRHTEPRRGTSTLGKAPAKEEMDKEVAFNRKRAEGKDGGKRGSMELKTRRLNPVNTTCYVQILGTGMDTQDTSPSILLFFDKQRFIFNAGEGLQRFCTEHKIKLSKIDHIFLTRVCSETAGGLPGLVLTLAGIGDEGMSVNIWGPSDLDFLAGAMRSFIPNRAMLHTHSFGADRNASSPQSTDSVIVLDDEVVRVSAMFVKPKYNNGTGSSNDSDMKPGDTAIVYACELPEIKGKFDPSKAAALGLRPGPKYRELQLGNSVQSDQFDEMVHPSDVLGPSIPGPTVLLVDCPTQYHMPELFSLHPLSCFYEDSPEQSGKKVNCIIHLGPSPVTRSVDYQNWMKKFGATQHIMAGHEIKNMEIPILKGSARISSHLNFVCPQLFPSSGFWSEQPSNDVMENDKSVSSEACGSVSAQNLLKDFVEELVSEIPAIREVPEQVCKFWQNNVNDNNILTPTGNHMGEEQWINKKSDKVDDGTLFQEIVLRKHPRDNQEIPCCVEDATREDMEITFLGTGSSQPSKYRNVSSIYINLFERGGILLDCGEGTLGQLKRRFGVNDADEAVKGLRCIWISHIHADHHTGLARILALRSKLLKGVPHKPLLVIGPRPLERFLNAYSTLEHLDMQFLDCRHTLKSSVEAFLSENDTDPATPQLETTMFAPGTRMENYNRKPASPRDTTALANFKEVLQESGLEILYSVPVLHCPQAFGVVLKAMEKANSTGKVIPGWKVVYSGDTRPCPGLIDASRDATVLIHEATFEDSMKDEAIARNHSTTKEAIEVGTSAGAYRIILTHFSQRYPKIPVIDEVDMEKTCIAFDLMSVNLADLPVVPKVLPHLKVLFKDELVVDEAEEVQEAAVY

SEQ ID NO: 191866 - protein, 520 aa, Zea Mays
MEIPILKGSARISSHLNFVCPQLFPSSGFWSEQPSNDVMENDKSVSSEACGSVSAQNLLKFHLRPYAQLGLDRTSIPNLFTYKDFVEELVSEIPAIREVPEQVCKFWQNNVNDNNILTPTGNHMGEEQWINKKSDKVDDGTLFQEIVLRKHPRDNQEIPCCVEDATREDMEITFLGTGSSQPSKYRNVSSIYINLFERGGILLDCGEGTLGQLKRRFGVNDADEAVKGLRCIWISHIHADHHTGLARILALRSKLLKGVPHKPLLVIGPRPLERFLNAYSTLEHLDMQFLDCRHTLKSSVEAFLSENDTDPATPQLETTMFAPGTRMENYNRKPASPRDTTALANFKEVLQESGLEILYSVPVLHCPQAFGVVLKAMEKANSTGKVIPGWKVVYSGDTRPCPGLIDASRDATVLIHEATFEDSMKDEAIARNHSTTKEAIEVGTSAGAYRIILTHFSQRYPKIPVIDEVDMEKTCIAFDLMSVNLADLPVVPKVLPHLKVLFKDELVVDEAEEVQEAAVY

SEQ ID NO: 191867 - protein, 623 aa, Zea Mays
MLLLALRLIKYAIGKSGTDFKREMQRHSAAIRQLVHYKGHPDPLRGDALNKAVRETANEAIAAIFSTEDPKPAVATESLGKRIQGFGNTNYEPSRDEKKSFLSELSEVVGIGSASIKQGLSNFAAAHAIMINDNGSTYKSPNLRRSLTTESEKYGRYDPSEIQSESRASSDASKNVASGSWGPTSSSAPSDDTSSSQPGVKTREERLLETIVTASGVRLQPTRDALRVFLTEASKLDAVALSRALENKLNSPLWQVRMKAICVLEAIVRKQDTDPYSIIASYFIENTASVVKCSELPQVSLREKASKVLNMLIGEEPTGTTATKSAMATPVQMPDLIDTGDQDGLATSSGQESNGQKNTGKAYVSSVDDLLGGEPIADTSVTADSNGSDPFADVSFHEVEAKETNDLFSGLIVEEKSSATMHGSSSSNKNELPDIFGSPPDSFIQGSVTDQGTVNDLMSGLNLNGTGQAHPPVKAEPNSTFSGSQFFDTNNEIGHVASAAALNGIVGQNSFYQQQQTPLQYSFPQHMMLNQSFPGQQLNYGAMGILLAQQQQLLQNFGNFNAELGNSSFNSMNSGNASVLPDIFNSSNQPQNHVAAMSSSKKDDTRAFDFVSDHLAAARASRK

SEQ ID NO: 191868 - protein, 1101 aa, Zea Mays
MDTEYRALQQGSPSPWRTADGVSSWGPAQHQKRQRCQGSSSDQAGSSSSSSLQISEPEPQQNQEEDYYVEDDCDAYDEDDYDFDEAEFNLHLADKFDDLDLPPGVEANVPWLQKIPPKEVVKQPPISITADENANKYDKFKQFDTVQTFSDHHYAKNSHEEPTRAWSKRVQHDWKLLENDLPGFHEVVANSWNQPLHNCGHLERISLKLKRLTRALQSWGHKTVGNFKYQLGLAREILHRLEMAQDSRVLSPDELWLLRKLKHQCLVLASLERTVARLRSRVQYLKEGDANTSFFHLQACFRKKRNHIFSLLDEERVVTSHEQKQEVLHNFYSNLLGYAPQRRLTLRLEECHRAPIDLSALELPFSEEEVWDAIASLPSDKAPGPDGYTGKFYKTCWPILKADLMAALAALHLGNSQNLGPLNTAYITLIPKKTGAMSAGDYRPISLIHSFAKLSTKILANRLAPLLNKMVETNQSAFVRGRSIHDNYMLVQHSIKSLHRKKVASLFLKLDLTKAFDSVSWAFLLEVLTHLGFGIKWRNLVSNLLATSSTLILLNGFPGEQIRHRRGLRQGDPLSPMLFVLVMDVLSSLFKVAEEKELLASLDSAIVKSRLSLYADDVVLFVKPREEDLNCVKLILDCFGEASGLVANLHKSCAIPIRCEVELLHEGCNILQCTPSSFPCTYLGLPISDKKLSRNILMNWVVRFVLSAIPVYLFLAMNVPKWVINKIDKIRKGFVWRGRKEVNGGSCLVAWDSVTRPLKYGGLGIPNLQHMCWALQTKWLWLQKTDQSRPWHGLTIPIQQPVKDLFAASLISYVGNGSNTLFWTDKWLNGCSIRDLAPEVASKVSKRALTSLTVSQALMNRQWIAHIKTPLSLIGIQQFLFLWDTLGEVQLSQEEDRHVWRHEASGLFSSKSCYKVLLFGSTVFEPWKRLWKTWAPPKCKFFLWLAIRNKCWTADILQLRGMPHPDVCPMCDQAQETIQHLLTACIFARQFWHTILAAIGLGHLTPTADEENFADWWGKASHKVVKTRKKGLNSLIILVAWCLWLQRNRAVFHGESPSLPRIFRCFSDEYVCWVMAGAKEFGGLGSVAALGVVGSSSSNNL

SEQ ID NO: 191869 - protein, 984 aa, Zea Mays
MLINMTSSNSLILFRHSLTITMLRILMKSQPEPGQREFNMTGNFWRMIYQARRRFHFESFWTKMPGFHEVVANSWNQPLHNCGHLERISLKLKRLTRALQSWGHKTVGNFKYQLGLAREILHRLEMAQDSRVLSPDELWLLRKLKHQCLVLASLERTVARLRSRVQYLKEGDANTSFFHLQACFRKKRNHIFSLLDEERVVTSHEQKQEVLHNFYSNLLGYAPQRRLTLRLEECHRAPIDLSALELPFSEEEVWDAIASLPSDKAPGPDGYTGKFYKTCWPILKADLMAALAALHLGNSQNLGPLNTAYITLIPKKTGAMSAGDYRPISLIHSFAKLSTKILANRLAPLLNKMVETNQSAFVRGRSIHDNYMLVQHSIKSLHRKKVASLFLKLDLTKAFDSVSWAFLLEVLTHLGFGIKWRNLVSNLLATSSTLILLNGFPGEQIRHRRGLRQGDPLSPMLFVLVMDVLSSLFKVAEEKELLASLDSAIVKSRLSLYADDVVLFVKPREEDLNCVKLILDCFGEASGLVANLHKSCAIPIRCEVELLHEGCNILQCTPSSFPCTYLGLPISDKKLSRNILMNWVVRFVLSAIPVYLFLAMNVPKWVINKIDKIRKGFVWRGRKEVNGGSCLVAWDSVTRPLKYGGLGIPNLQHMCWALQTKWLWLQKTDQSRPWHGLTIPIQQPVKDLFAASLISYVGNGSNTLFWTDKWLNGCSIRDLAPEVASKVSKRALTSLTVSQALMNRQWIAHIKTPLSLIGIQQFLFLWDTLGEVQLSQEEDRHVWRHEASGLFSSKSCYKVLLFGSTVFEPWKRLWKTWAPPKCKFFLWLAIRNKCWTADILQLRGMPHPDVCPMCDQAQETIQHLLTACIFARQFWHTILAAIGLGHLTPTADEENFADWWGKASHKVVKTRKKGLNSLIILVAWCLWLQRNRAVFHGESPSLPRIFRCFSDEYVCWVMAGAKEFGGLGSVAALGVVGSSSSNNL

SEQ ID NO: 191870 - protein, 203 aa, Zea Mays
MCYIFFCLVWVLTYSSMYILFQPTRAWSKRVQHDWKLLENDLPAYIYVRVAEDRMDLLRAAIIGPKGTPYHDGLFFFDVHIPSAYPSGPPDYVILASEAPRDLVAGHFRVHGHTILAACKHYMAGNDIGSVVPEEEEESASRSAPKAKPGVIRTIPLNRRYAGSFDTSLKVLYEDLLMEFNVKGADTRKFMIEKLKKDQPAGT

SEQ ID NO: 191871 - protein, 630 aa, Zea Mays
MGKMLETWAYLGVSTSKRCLSGHQMCSTIAVINYACEVDKVCKALEAVNLKSTEILDHPNVQICNEGRQAALVEILEILTVVCEEHKLPLAQTWVPCKYRSVLAHGGGLKKSCLSFDGSCMGEVCMSTSDVAFHVIDAHMWGFRDACVEHHLQRGQGVSGKAFISHKPCFSKDIRKFCKLAYPLVHYARMFGLSGCFAICLQSSYTGNDDYILEFFLPLDCIDEDDQNALLESILTLMKRCLRSLKLVDDNDLSGVSLHLSNVLKLENEESKTDAQFDGSLRESPEDDRHGGSHKFDNENQKVLDITEGQLLTDDYSQDNGTSVGRPNGSGASDSSLLHKTNKPPERRRGKAEKTISLEVLQQYFSGSLKNAAKSLGVCPTTMKRICRQHGISRWPSRKINKKSLENDDHFDIVMAQQGFIDNNNDVQLEADKASHSRSSSGEGSINSRTSEGSCQGSPANQTFVCKPIASMFAEPQLNQEEFNKEPFQEPQLPLSRMLIEDSGSSKDLKNLFTSTSDQPFLAPPNNLVSMKHSGTVTIKASFKEDIVRFRFPCSGGVIVLKEEVAKRLRMDVGTFDIKYLDDDHEWVKLACNADLEECMEISRLSGSHVIRLLVSDIAAHFGSSCGSSG

SEQ ID NO: 191872 - protein, 564 aa, Zea Mays
MASRMTPSKRPFQRRSSDYDGRGKWQKTKHPSPHKSQFKIEPGVPIFRILCPASKSGNVIGKGGAIIAKIRQETRMRIRVDRAAPGCDERVIFITAANKDEEAGSEQGGENDGGAAASTGGDHEKDKDNNSKEQNVDPEENNCNEQNDDSEKGSGKEEIDGFEKDHGTEEKNDSEKEHNKGEKDDPLVAKVTKLEPERVIPLALKAVSLVFDRIFATEGNNETGNASAASAPVSLRMLVLYSQAGWLLGKGGSVVKQMAADNGCEIRVLKDNLPSCALLNDKLCQITGEIDSVRKGLNAVSEVLLAHPPKETDAVADVHSSGSSSRSLFSQPDGLPSGMQSNFHIPLQGPPSQANGPFDIVDLQPPIHGHASVAIESLSFRMLCPQDKVGSIIGKGGNIVKTIQNDTGCEIKVLDTVPKTDDRIISISGPAHPSDGISPAQNAILHVQRKIMLPSSDKKEGPATCRLIVSGNQVGCVLGKGGSIIAEMRKLSGAFIVVLSKDKIPRGVPEHDEVIQINGSCEAIQEALMQIPSLVHFRETMNHHPCFIKISWDDHWMGLLLLGQ

SEQ ID NO: 191873 - protein, 190 aa, Zea Mays
MWLRRDPRQVRTNPIPNIQLPAVCLLGISGTGSSQSLNSNRGFSNENETKLARPTTLGAIQAQPNYSLVLLFHCFPPQNTPPPHPLGFPHRIAEPRRLHPHHTTGDVHSGGAGRQRQAGAPEARLHQGRPAQAGHQRAHPHRQGRQRHPRAWARAPRRTRRRPIPRAAHRRVPRRGRDRRHRLHRPQRPS

SEQ ID NO: 191874 - protein, 98 aa, Zea Mays
MFHMSFPTNSIAYKLWLSSQRPSAMCLLNILLAPLTSFGHTIGWFLYWSSWTLNSPLLITKMRSSPAFFEGEKMVHDGFSVRYLPSLLIQLPINLHRN

SEQ ID NO: 191875 - protein, 233 aa, Zea Mays
MANGSLGDVLHSSKAGLLDWATRYKVALDAAEGLSYLHHDSVPAIVHRDVKSNNILLDAEFSARVADFGVAKVVEGGTTAMSVIAGSCGYIAPVCIHASCDREERHLQLWRGAAGAGDGEAAGGCGAVRGEGPGEVGVQHDGARGRGARPGQQAGHGFQGGDGPGAPHRAPVRELAADQPAGDAEGGEDAAGGARSAGAGGGGQGREAVAVLLLRGRVVGAREQLACNCLAWH

SEQ ID NO: 191876 - protein, 225 aa, Zea Mays
MANGSLGDVLHSSKAGLLDWATRYKVALDAAEGLSYLHHDSVPAIVHRDVKSNNILLDAEFSARVADFGVAKVVEGGTTAMSVIAGSCGYIAPEYAYTLRVTEKSDTYSFGVVLLELVTGKPPVDVELFGEKDLVKWVCSTMEHEGVEHVLDSRLDMGFKEEMVRVLHIGLLCASSLPINRPAMRRVVKMLQEVRAPPARVVVDRDGKLSPYYYYEDASSEQGSS

SEQ ID NO: 191877 - protein, 436 aa, Zea Mays
MQLENLKLNQFNVSNNQLRGPLPPQYATETYRSSFLGNPGLCGEIAGLCADSEGGRLSRRYRGSGFAWMMRSIFMFAAAILVAGVAWFYWRYRSFSKSKLRVDRSKWTLTSFHKLSFSEYEILDCLDEDNVIGSGASGKVYKAVLSNGEVVAVKKLWSTAVKKEEGSASASAADNSFEAEVRTLGKIRHKNIVKLWCCCSCRDCKLLVYEYMANGSLGDVLHSSKAGLLDWATRYKVALDAAEGLSYLHHDSVPAIVHRDVKSNNILLDAEFSARVADFGVAKVVEGGTTAMSVIAGSCGYIAPEYAYTLRVTEKSDTYSFGVVLLELVTGKPPVDVELFGEKDLVKWVCSTMEHEGVEHVLDSRLDMGFKEEMVRVLHIGLLCASSLPINRPAMRRVVKMLQEVRAPPARVVVDRDGKLSPYYYYEDASSEQGSS

SEQ ID NO: 191878 - protein, 90 aa, Zea Mays
MPSPAQERACEACPVSLAWPQAWAPLAMGPTAARQHGRWPASPPPAMPSHAVTVNRKKKGSCNLQQLLLITLVSRRRHLSMAPVLLSITA

SEQ ID NO: 191879 - protein, 81 aa, Zea Mays
MGTVGIRGPKGLLTEKAYLGLRSCGSRRCLSSGLLPTPATTRAVAVNPRRCLAVRSGSTKRLSLPASAPGRCLLPQQATKE

SEQ ID NO: 191880 - protein, 70 aa, Zea Mays
MPSARLSFHVWNSRVQAYRSMWIIAKSPPQQAYIERSLIDTDGQTFLLNVWSTLHIISQNLIPERDTLLE

SEQ ID NO: 191881 - protein, 137 aa, Zea Mays
MGAAMAGPGRGHRQQGKRRSGEQLAGEVEMARGTERRGPGRFLAVAGKRKRGRHGHGGKELLLPALRRGCCCSPIGSERQGESLPGHLWASVEGGGMDAMAAGLLPAGRRGEPGRKKLTPAVLSCRRRRKEEGWFGR

SEQ ID NO: 191882 - protein, 491 aa, Zea Mays
MPLAAMASASSSPCSRHPLILVVLLCAIAAISFSSSVAAGTVGGGTGGLGPISTNGKNYTKVCDPARFVALGLDMSRFRYCDASLPYADRVRDLVGRLALEEKVRNLGDQAEGAPRVGLPPYKWWGEALHGVSDVGPGGTWFGDVVPGATSFPLVINSAAAFNESLWRAIGGVVSTEIRAMYNLGHAELTYWSPNINVVRDPRWGRASETPGEDPFVVGRYAVNFVRGMQDVDDRPYAAAADPFSRPIKVSSCCKHFAAYDVDAWFKADRLTFDAQVEERDMVETFERPFEMCIRDGDASCVMCSYNRINGIPACADARLLSETVRSQWQLHGYIVSDCDSVRVMVRDAKWLNYTGVEATAAAMKAGLDLDCGMFWEGARDFFTTYGVDAVRQGKIKEGDVDNALSNVYTTLMRLGFFDGMPEFESLGASNVCTDGHKELAADAARQGMVLLKNDARRLPLDPNKINSVSLVGLLEHINATDVMLGDYREL

SEQ ID NO: 191883 - protein, 422 aa, Zea Mays
MSRMGGKDCVPPVAMVLVQLGFAVMNIVSKLALDAGMSPYVLIAYRNLIAAAVISPIAYLLERCFSSSGACTSVHSSASPHTRTHLIRRSGATITKKVLLQIFCSSIFGATLNQVLFVVGLKSTSATVACALTNTLPALTFVMAAALKMEPVRPGTAAGQAKLVGTAVCVGGSMLIPFYKGPVLRVWASPIHWRFAEHASPPAAAAAAGAHTGPAAVLGDVLVIASCVAWAVWFILHTKISQGFSAPYTSTAIMCLMAGVQCAGVSAALDRSLAVWKLGFDIRLYSVLYIGIVGSGAGFTLMSWCIQVRGPLYVSMFSPLLLVIVAVVGWAILGDKIRLGSAIGSVLIVAGLYMVLWGKGREMDRPGLDNDKGDEETAAALGLAVASSKGGAVVVSSRVDAVSSLPVFSTTTSPKRQQLIHG

SEQ ID NO: 191884 - protein, 111 aa, Zea Mays
MEACISNFSRSKFIIIVLIHFICCITFRLLGCVPLSLSRPRIWLETAAARGKLQPLRPSAAPTTSSTLAQVISAKTLNVWRPGTTSRTTNRPNRRLVGRLGRLDKLIESSG

SEQ ID NO: 191885 - protein, 114 aa, Zea Mays
MAIGDVRSRSTILLHIGATPTQDEEQVSQDAGMNQGRAHEEKDKEEEVQQAPPTQVWVTIQRNHLVDQILGDISKGVTTRSHLANFYEHYSFVSSIKSFRVEEALQDSDWVLAM

SEQ ID NO: 191886 - protein, 284 aa, Zea Mays
MARRSGLWVEGGGSRGQWVVRSVGPWSAGTAQIEGSIHNAYFSLIEKAEHFVYIENQFFISGLSGDDTIKNRVLEALYRRILRAEKEKRRFRVIIVIPLLPGFQGGIDDGGAASVRAIMHWQYRTICRGPNSILKNLYDVVGSKADDYISFYGLRAHGRSDDGGPLVTNQIYVHSKLMIIDDRMALIGSANINDRSLLGSRDSEIGIIIEDKEVVSSIMDGRPWEAGKFSLSLRLSLWAEHLGLLPGEVSCIMDPVDDSAYKNIWMATAKVSVAEILYVDPLFI

SEQ ID NO: 191887 - protein, 166 aa, Zea Mays
MHWQYRTICRGPNSILKNLYDVVGSKADDYISFYGLRAHGRSDDGGPLVTNQIYVHSKLMIIDDRMALIGSANINDRSLLGSRDSEIGIIIEDKEVVSSIMDGRPWEAGKFSLSLRLSLWAEHLGLLPGEVSCIMDPVDDSAYKNIWMATAKVSVAEILYVDPLFI

SEQ ID NO: 191888 - protein, 98 aa, Zea Mays
MPSSGVILRKDGFCLQEYFHWEQWWDLTAKFPIMLFSSKGTQTILRVEVLKSRLGLGTGDVLPRLIKDYSECRLDDRGPFNWSHALSWVSASGRLIPE

SEQ ID NO: 191889 - protein, 186 aa, Zea Mays
MDDRTYKGGIKAYWKRRGYYRKGGIKAYWKRRGYYRMDGDAARRRQPLPTVELGGGVAQAQAQAQPPTGDGSGRRRRRGWRVRRGQLGRRLLRALSPRRWLMRLRDAYVSAMLRLASSPAVGYGAGAPFCATATHGAAAAAAFARPAQLKEYDEKVLVEIYRSILARGGPLAGAPAAATLRLPTAV

SEQ ID NO: 191890 - protein, 957 aa, Zea Mays
MDRSLLPPPAPSPPAPSPALPDGESPALPGAILPHPSLAAAVQPAVPFSTSRTSSLTPRAAATLQASGRLLLHQDLVRSSHSSGRGKALRWRDSSPSSDSLDVGSPSSFKDILLAGTVSASVSVTSGDIVSHGAQARTLQASVQNSSGDGGRFVRRSSPLRSLVQPMRQKPLVDRDGFTLVESRRTQKQRRRLEKSFGIQALETFKGRCFKCLSPHHRVALCRSIIRCLLCHAPGHTSYTCPRRLPPVCSRMAGRLRAPVHRLPPVHAAQCSVDAAEGPLPDVSRGRRRRLESDIAVDAGDGVCTEPHFAPTRIIPWSPSFNQRTEVLDRAIVLTVTVAINEAVEEAILDSFARRLALVHDSLSMCRLGPACLLLILPSLEMADRAFDGGRIVNLSPTTKIHVMRWSRTLNSSAAASLPFQVEIDVSGIPAHAWELETVHALLNEWCWIADLHPDCERQREVFKVTAWCSSPGSIPKEFKLEIVDPVTTDGGMLRRSLVYPIRVSVKVLDRPDMLQSLQPSPPPAEDDPDQGRRRRRRRSRRSSFGINAPGKGSTTAVLPRVSVHQRLGPRVQACGKEGVRVPRLAVHKRLGPLGIFNADKGAVKKMKRVWIPKRKLESSVSVWSPKTSSALVSPLPVAVDDAFLEATSSTVVTEDTLVGSPEVIPVDGGICSEAAIISDAPARFPMVESVLQDVNVLSEGVGLPLVESDFQNIHLMESSLSRKHLMSPSLLVYSRKRHQKLQLIDSIDENGNVGAAADAIISPASATGLAADGTYHVGQGPVIIGVVADAIVSPATAITFTSSEPISSLVEPTAAVADILMSPAGVAPSLLPSPSGEQETSQSLQREEFIKSVTRQPSKLLPAPPVILKKKDNKLPSRSVPRRSRRVAGVGVEFNASDLDRRAIKKIMKAVGIIADNVGIDQRAQEEYADLFKTSLSDIHVKALAALFGWQVPDQL

SEQ ID NO: 191891 - protein, 253 aa, Zea Mays
MFEREIGHLSALFLTMEEGFLALVSSLWESQSNITTAGTCCLVSVMHDKTLFIANLGDSGALLGKKDVKTSDVAEEQQQQQQAVDPLARQSSIMSLTLEELQNSLCEPGRNFGSMNMDEFMANIWNAEEFQAATAGWNKEGVYREPVPVATTTDTGENGGGGGGGRGLVLQGSFALSSPLSRKTVEEVSAEISQGPTDFQASAASQPVGEARRGVGGPLTHASARWRRVSCGASMSVRDRRGHGHARAPTLHS

SEQ ID NO: 191892 - protein, 332 aa, Zea Mays
MVVAGGMETVNTSILQQSIQRAAAIEARTPELRFQRVIQISQQHRIVRPASVNRSQGAASTDADRLVWAIQRTHNSLEATRRQKLDDNNLCGNGSAKKDESCDCNSSFECNICLDPAKQPVVTPCGHLFCWPCLYQWLHAHSPHSECPVCKGEVLELNVTPIYGRGGEEGNSTNPDFPPRPRANRRESLRQQLQMTDTRGIATVVRQLIQNQGIISVLPSPTGIEMSVVPAGRQRARARRQQRQDNNASSSIHVVAQNMGNVAPESSNQIQLSHSNGDNAAQMVLAAPQQSSSVEQLSTSSTTAVILGEPGSSRRSRPSESPTIRRTRRRPQ

SEQ ID NO: 191893 - protein, 181 aa, Zea Mays
MEGCRDADPPHPPLVKEGNRGSPTLLPLCSVITGIRCRHQHAPAPHEVAWKVVVTPIRPTHRPSWKVAADPPPSSPSAPRLRGSEATINAHLPHDVDGARVEGVERRYCNSAINALLPLYSAIPSIVAAHLPSTTLHRPRQPLHTYKEQMGRRPVELQIQPLIPLSTFAALNHWSPTSLPP

SEQ ID NO: 191894 - protein, 448 aa, Zea Mays
MERQRKAMWLYPKVVGFNPPERWGHSACFFEGVVYVFGFPVKGASPGVRAGHAALSVGSKIYIIGGVGDKQYYSDVWVLDVANRSWSQLEVSGQRPQGRFSHTAVVMNNDIAIYGGCGEDERPLNELLILQLGSEHPNGRYNISTCKVLSNQWSQERRKFLQSETKDTGASNGETVQKRREAEIEQRNPFLRGLENSRAKRRKTDEARPSEAAESEQQEEHSLTLSQHSSPSQSDQEQNGGGAHKLSPSPNASVSALQPFARLKANDGAPSAPGRGGGGVSSRPALKTDQFLRTVAPQHHRQEVQFLSSDHKKPQPRPAPGPPLIGAEVHGTIDGAFDSGYLMTAVVNGQLFRGVLFAPGPGVTAPRPTVHHQILTSSAMPPQQRPLLAHAIPVHARPVPQATGFVLPNCVHRARQGFPAKAVKSEPERGGSDLHDVVLTLGGPGGGK

SEQ ID NO: 191895 - protein, 288 aa, Zea Mays
MAWSALATTGQRPGTRDSHGAALVGHRMLVFGGTNGGKKVNELHVLDLRTREWSRPQCRGAAPSPRESHSVTVVGGDRLVVFGGSGEGEGNYLSDVHVLDVPTMTWSTPEAIRGGAPAPRDSHSAVAVGARLFVFGGDCGDRYHGGVDVLDVDTMAWSRFPVKGASPGVRAGHAALSVGSKIYIIGGVGDKQYYSDVWVLDVANRSWSQLEVSGQRPQGRFSHTAVVMNNDIAIYGGCGEDERPLNELLILQLGSEHPNGRYNISTCKVLSNQWSQERRKFLQSETVS

SEQ ID NO: 191896 - protein, 941 aa, Zea Mays
MDPRRLPILLSLLLAFFSAVVASDEIHGCGGVVEASSGLAKSRKASDSKLDYSDITVELCTVDGLVKESTQCAPNGYYFIPVYDKGSFMVRVKGPKGWSWKPETVPVIIDHNGCNGNADINFQFTGFMISGKVVGAVGGKSCSKRGGPAGVKIELMTDSDELIASALTSSSGEYSFTNIIPGRYILRASHPDYEIELRGSPEIDLRFGNAVADDVFFVSGYDIYGTVVAQGNPIVGVHLYLYSNDVTKVPCPQGFSDAPKEGALCHAISGADGKFTFRSLPCGSYELLPYYKGENTVFDISPSSLSVSVEHSHLTIPQKFQVTGFSVGGRVIDGYGAGVESANVIVDGQLRAITDSLGYYRLDQVTSKKYTITAEKDHYKFNRLEDFMILPNLASIDDIRSVRYDVCGIVRTVTLNSKAMVTLTHGPENVKPQRKLVGENGHFCFEVPAGEYQLSALPVDSERSSSLMFSPGSISVNVNSPLLDLEFSQSQVNVHGKVSCKQQCSQNILVSLVRLAGGVEQEKKTTTLEQDNVNFVFKKVFPGKYRVEVKNSLPEGLAKDDWCWDQSILNIDVGTDDVRDIVFVQKGYWIELVSTHDTNAYIQQPDSSRLDLLIKKGSQRICVETSGQHEIHLTNPCISFGTSSVLFDTANLMPIHINAKKYLVKGEIHVDMSSIQENIDSKDIVVDILKSDGSFIEKISTSLVLGKDNQNDFTAFEYSIWADLGEDFIFVPHDSSIGRNKVLFYPARQQYSVSMNGCQDTVPLITARTGLYLEGSVLPATSDVDIKILAAGKSNYAHLNKGDVATEAKTDSEGSFFAGPLYDDIVYKVEASKDGYHLKQTGPYTFSCQKLGQILVRIYGENSELLPSVLLSLSGEKGYRNNSISSSGGTFTFDNLFPGSFYLRPLLKEYKFNPSAVAIDLNSGESREAEFRATRVAYRFL

SEQ ID NO: 191897 - protein, 1150 aa, Zea Mays
MDPRRLPILLSLLLAFFSAVVASDEIHGCGGVVEASSGLAKSRKASDSKLDYSDITVELCTVDGLVKESTQCAPNGYYFIPVYDKGSFMVRVKGPKGWSWKPETVPVIIDHNGCNGNADINFQFTGFMISGKVVGAVGGKSCSKRGGPAGVKIELMTDSDELIASALTSSSGEYSFTNIIPGRYILRASHPDYEIELRGSPEIDLRFGNAVADDVFFVSGYDIYGTVVAQGNPIVGVHLYLYSNDVTKVPCPQGFSDAPKEGALCHAISGADGKFTFRSLPCGSYELLPYYKGENTVFDISPSSLSVSVEHSHLTIPQKFQVTSKKYTITAEKDHYKFNRLEDFMILPNLASIDDIRSVRYDVCGIVRTVTLNSKAMVTLTHGPENVKPQRKLVGENGHFCFEVPAGEYQLSALPVDSERSSSLMFSPGSISVNVNSPLLDLEFSQSQVNVHGKVSCKQQCSQNILVSLVRLAGGVEQEKKTTTLEQDNVNFVFKKVFPGKYRVEVKNSLPEGLAKDDWCWDQSILNIDVGTDDVRDIVFVQKGYWIELVSTHDTNAYIQQPDSSRLDLLIKKGSQRICVETSGQHEIHLTNPCISFGTSSVLFDTANLMPIHINAKKYLVKGEIHVDMSSIQENIDSKDIVVDILKSDGSFIEKISTSLVLGKDNQNDFTAFEYSIWADLGEDFIFVPHDSSIGRNKVLFYPARQQYSVSMNGCQDTVPLITARTGLYLEGSVLPATSDVDIKILAAGKSNYAHLNKGDVATEAKTDSEGSFFAGPLYDDIVYKVEASKDGYHLKQTGPYTFSCQKLGQILVRIYGENSELLPSVLLSLSGEKGYRNNSISSSGGTFTFDNLFPGSFYLRPLLKEYKFNPSAVAIDLNSGESREAEFRATRVAYSAMGSVTLLTGQPKEGVFVEARSESTGFYEEATTDSFGRFRLRGLVPGSTYSIRVAAKDNLQFAAVERASPEYLSVNVGHEDMTGIDFVVFERPEVTILSGHVEGDGIDTLHPHLSVEIRSATDSSRVEAVLPLPLSYYFEVRDLPKGKHLVQLRSGLPSHTHRFESELVEVDLEKDPQIHVGPLKYKTEERHQKQELTPAPVFPLIVGVSVVALVISMPRLNDLYQSAVGMTSLGSGMAPTKKEPRKNILRKRV

SEQ ID NO: 191898 - protein, 806 aa, Zea Mays
MILPNLASIDDIRSVRYDVCGIVRTVTLNSKAMVTLTHGPENVKPQRKLVGENGHFCFEVPAGEYQLSALPVDSERSSSLMFSPGSISVNVNSPLLDLEFSQSQVNVHGKVSCKQQCSQNILVSLVRLAGGVEQEKKTTTLEQDNVNFVFKKVFPGKYRVEVKNSLPEGLAKDDWCWDQSILNIDVGTDDVRDIVFVQKGYWIELVSTHDTNAYIQQPDSSRLDLLIKKGSQRICVETSGQHEIHLTNPCISFGTSSVLFDTANLMPIHINAKKYLVKGEIHVDMSSIQENIDSKDIVVDILKSDGSFIEKISTSLVLGKDNQNDFTAFEYSIWADLGEDFIFVPHDSSIGRNKVLFYPARQQYSVSMNGCQDTVPLITARTGLYLEGSVLPATSDVDIKILAAGKSNYAHLNKGDVATEAKTDSEGSFFAGPLYDDIVYKVEASKDGYHLKQTGPYTFSCQKLGQILVRIYGENSELLPSVLLSLSGEKGYRNNSISSSGGTFTFDNLFPGSFYLRPLLKEYKFNPSAVAIDLNSGESREAEFRATRVAYSAMGSVTLLTGQPKEGVFVEARSESTGFYEEATTDSFGRFRLRGLVPGSTYSIRVAAKDNLQFAAVERASPEYLSVNVGHEDMTGIDFVVFERPEVTILSGHVEGDGIDTLHPHLSVEIRSATDSSRVEAVLPLPLSYYFEVRDLPKGKHLVQLRSGLPSHTHRFESELVEVDLEKDPQIHVGPLKYKTEERHQKQELTPAPVFPLIVGVSVVALVISMPRLNDLYQSAVGMTSLGSGMAPTKKEPRKNILRKRV

SEQ ID NO: 191899 - protein, 845 aa, Zea Mays
MDPRRLPILLSLLLAFFSAVVASDEIHGCGGVVEASSGLAKSRKASDSKLDYSDITVELCTVDGLVKESTQCAPNGYYFIPVYDKGSFMVRVKGPKGWSWKPETVPVIIDHNGCNGNADINFQFTGFMISGKVVGAVGGKSCSKRGGPAGVKIELMTDSDELIASALTSSSGEYSFTNIIPGRYILRASHPDYEIELRGSPEIDLRFGNAVADDVFFVSGYDIYGTVVAQGNPIVGVHLYLYSNDVTKVPCPQGFSDAPKEGALCHAISGADGKFTFRSLPCGSYELLPYYKGENTVFDISPSSLSVSVEHSHLTIPQKFQVTGFSVGGRVIDGYGAGVESANVIVDGQLRAITDSLGYYRLDQVTSKKYTITAEKDHYKFNRLEDFMILPNLASIDDIRSVRYDVCGIVRTVTLNSKAMVTLTHGPENVKPQRKLVGENGHFCFEVPAGEYQLSALPVDSERSSSLMFSPGSISVNVNSPLLDLEFSQSQVNVHGKVSCKQQCSQNILVSLVRLAGGVEQEKKTTTLEQDNVNFVFKKVFPGKYRVEVKNSLPEGLAKDDWCWDQSILNIDVGTDDVRDIVFVQKGYWIELVSTHDTNAYIQQPDSSRLDLLIKKGSQRICVETSGQHEIHLTNPCISFGTSSVLFDTANLMPIHINAKKYLVKGEIHVDMSSIQENIDSKDIVVDILKSDGSFIEKISTSLVLGKDNQNDFTAFEYSIWADLGEDFIFVPHDSSIGRNKVLFYPARQQYSVSMNGCQDTVPLITARTGLYLEGSVLPATSDVDIKILAAGKSNYAHLNKGDVATEAKTDSEGSFFAGWLPSQTNWPIHLFLSEAWSDISADLW

SEQ ID NO: 191900 - protein, 778 aa, Zea Mays
MILPNLASIDDIRSVRYDVCGIVRTVTLNSKAMVTLTHGPENVKPQRKLVGENGHFCFEVPAGEYQLSALPVDSERSSSLMFSPGSISVNVNSPLLDLEFSQSQVNVHGKVSCKQQCSQNILVSLVRLAGGVEQEKKTTTLEQDNVNFVFKKVFPGKYRVEVKNSLPEGLAKDDWCWDQSILNIDVGTDDVRDIVFVQKGYWIELVSTHDTNAYIQQPDSSRLDLLIKKGSQRICVETSGQHEIHLTNPCISFGTSSVLFDTANLMPIHINAKKYLVKGEIHVDMSSIQENIDSKDIVVDILKSDGSFIEKISTSLVLGKDNQNDFTAFEYSIWADLGEDFIFVPHDSSIGRNKVLFYPARQQYSVSMNGCQDTVPLITARTGLYLEGSVLPATSDVDIKILAAGKSNYAHLNKGDVATEAKTDSEGSFFAGPLYDDIVYKVEASKDGYHLKQTGPYTFSCQKLGQILVRIYGENSELLPSVLLSLSGEKGYRNNSISSSGGTFTFDNLFPGSFYLRPLLKEYKFNPSAVAIDLNSGESREAEFRATRVAYSAMGSVTLLTGQPKEGVFVEARSESTGFYEEATTDSFGRFRLRGLVPGSTYSIRVAAKDNLQFAAVERASPEYLSVNVGHEDMTGIDFVVFERPEVTILSGHVEGDGIDTLHPHLSVEIRSATDSSRVEAVLPLPLSYYFEVRDLPKGKHLVQLRSGLPSHTHRFESELVEVDLEKDPQIHVGPLKYKTEERHQKQELTPAPVFPLIVGVSVVALVISMPRFAAISQ

SEQ ID NO: 191901 - protein, 393 aa, Zea Mays
MSNEMYSTIARVTDGIYEGIAIGGDVFPGSTLSDHILRFNNIPQVKMMVVLGELGGKDEYSLVEALKQGKVQKPVVAWVSGTCARLFKSEVQFGHAGAKSGGELESAQAKNQALKEAGAIVPTSYEALESAIKETFDKLFEEGKISPVTEITPPLIPEDLKTAIKSGKVRAPTHIISTISDDRGDEPCYAGVPMSTIIEQGYGVGDVISLLWFKRSLPRYCTQFIEICVMLCADHGPCVSGAHNSIVTARAGKDLVSSLVSGLLTIGPRFGGAIDDAARYFKDACDRSLTPYEFVEGMKKKGIRVPGIGHRIKSRDNRDKRVQLLQKYAHTHFPSVKYMEYAVQEIDEIVEIGYLNGLFVLARSIGLIGHTFDQKRLKQPLYRHPWEDVLYTK

SEQ ID NO: 191902 - protein, 426 aa, Zea Mays
MSNEMYSTIARVTDGIYEGIAIGGDVFPGSTLSDHILRFNNIPQVKMMVVLGELGGKDEYSLVEALKQGKVQKPVVAWVSGTCARLFKSEVQFGHAGAKSGGELESAQAKNQALKEAGAIVPTSYEALESAIKETFDKLFEEGKISPVTEITPPLIPEDLKTAIKSGKVRAPTHIISTISDDRGDEPCYAGVPMSTIIEQGYGVGDVISLLWFKRSLPRYCTQFIEICVMLCADHGPCVSGAHNSIVTARAGKDLVSSLVSGLLTIGPRFGGAIDDAARYFKDACDRSLTPYEFVEGMKKKGIRVPGIGHRDNRDKRVQLLQKYAHTHFPSVKYMEYAVQVETYTLSKANNLVMNVDGAIGSLFLDLLSGSGMFTKQEIDEIVEIGYLNGLFVLARSIGLIGHTFDQKRLKQPLYRHPWEDVLYTK

SEQ ID NO: 191903 - protein, 439 aa, Zea Mays
MSNEMYSTIARVTDGIYEGIAIGGDVFPGSTLSDHILRFNNIPQVKMMVVLGELGGKDEYSLVEALKQGKVQKPVVAWVSGTCARLFKSEVQFGHAGAKSGGELESAQAKNQALKEAGAIVPTSYEALESAIKETFDKLVLRLKYIWQFEEGKISPVTEITPPLIPEDLKTAIKSGKVRAPTHIISTISDDRGDEPCYAGVPMSTIIEQGYGVGDVISLLWFKRSLPRYCTQFIEICVMLCADHGPCVSGAHNSIVTARAGKDLVSSLVSGLLTIGPRFGGAIDDAARYFKDACDRSLTPYEFVEGMKKKGIRVPGIGHRIKSRDNRDKRVQLLQKYAHTHFPSVKYMEYAVQVETYTLSKANNLVMNVDGAIGSLFLDLLSGSGMFTKQEIDEIVEIGYLNGLFVLARSIGLIGHTFDQKRLKQPLYRHPWEDVLYTK

SEQ ID NO: 191904 - protein, 183 aa, Zea Mays
MEVKEVCVQDMLVDLEKGKCLLPIEDNSGMKVNSIAGHASTMRPSSWDDLVALKDDKSHHICCFSSHRQDSSVKSGEPMKAEGEIKVGILDKSTADKENKKWYKKPPRPPRSQTTSPLDPADQKLISALSELAVLKKARIERMKALKKMKNSKPASSIGNLVALIITVILCFFILWQVFLCNI

SEQ ID NO: 191905 - protein, 184 aa, Zea Mays
MEVKEVCVQDMLVDLEKGKCLLPIEDNSGMKVNSIAGHASTMRPSSWDDLVALKDDKSHHICCFSSHRQDSSVKSGEPMKAEGEIKVGILDKSTADKENKKWYKKPPRPPRSQTTSPLDPADQKLISALSELAVLKKARIERMKALKKMKNSKPASSIGNLVALIITVILCFFILWQVILEWLR

SEQ ID NO: 191906 - protein, 225 aa, Zea Mays
MEVKEVCVQDMLVDLEKGKCLLPIEDNSGMKVNSIAGHASTMRPSSWDDLVALKDDKSHHICCFSSHRQDSSVKSGEPMKAEGEIKVGILDKSTADKENKKWYKKPPRPPRSQTTSPLDPADQKLISALSELAVLKKARIERMKALKKMKNSKPASSIGNLVALIITVILCFFILWQGFFSRHGVSISFHRPSISSVRMHGGLISIQFYIKNVTTVSPHSSSAAQ

SEQ ID NO: 191907 - protein, 80 aa, Zea Mays
MTTIFGIHTPIKNIYTQHTNLRVLNLFATSNNATRRFSNSRRHPRIQLIDLPITNTQVLSSPPQTLRATHLHTYDLTLIT

SEQ ID NO: 191908 - protein, 477 aa, Zea Mays
MTLPSHRRESDLEINGASQDTVGAKKTACKTTQRQILRSEIEKLKNRVRAFTGAFVVMISPVLLAIVLKKVSLTGTGGRYQGRIRLRALEAFVDLVQRRFAHLAAVTLQMGIMPFLCVMVAEACASLPPLSYVAPRLVAACRVLVFLSNLLLMALGCGILLLFHSNALLVLTICSAMALGVAAVQIRYLCRGVADAGAADDAEAEEYHSKLEQLLELSAGMTVMMFLVLEFVALESLLRNTRQGQAVKRGQTFLGVALLVSFMASTLGVSLMNVWTTPHVISGCVVLTAEFMRVLNFSFHALPIAAVVVLITLDVLPHAWKLAVWLPFFPLVIVLLVLLARYSREAMKQQEPAARGRGKQGPEATGSSTASDPSSSGEKKPDDPKPASLELTKVAFTGFLAVAVPSVTSASFCVPSAFFVLFSAATVLLGLLWRLLTHEAEPPSCVLQAANHASFSAHMSIFLAGIAFWVMAAFALH

SEQ ID NO: 191909 - protein, 126 aa, Zea Mays
MAPAFPTTLLHQASTSFRFPAGAAGCIRPHCLAPLAAPTTLSLAATPAVPRRLLLPVAAGIWDLISGGAGAAAAASLAVRRGMQLFRQGDVAGSLAEFDKAIEMDPRQKQYLWQRGLSLYYLDRCV

SEQ ID NO: 191910 - protein, 241 aa, Zea Mays
MAPAFPTTLLHQASTSFRFPAGAAGCIRPHCLAPLAAPTTLSLAATPAVPRRLLLPVAAGIWDLISGGAGAAAAASLAVRRGMQLFRQGDVAGSLAEFDKAIEMDPRQKQYLWQRGLSLYYLDRFEEGAEQFRIDVAANPNDTEESIWCFLCEAQLYGTEEARKRFLEVGLDSRPVMREAYALLRSGADPEKLVAKFSSGTDGEVFYSSLYAGLYYESQVWSPLAVVDNEGKYYIGSCRGR

SEQ ID NO: 191911 - protein, 168 aa, Zea Mays
MSMQYSPMSEESDDYRYYDTQVNTNGNQTDVLGNPSTSLISSAHRFQRPHTWFSSASPYPLPSCSLPAVICSPARRGCGTEQEGWIPSSPNDMCYGGDLRRTALLRSVQMKVQSPHPCDVHEREQGRSNVHADELQQDQKEAVGVQLDQRPLSCPKSTQDAKCQSSIH

SEQ ID NO: 191912 - protein, 75 aa, Zea Mays
MGIKQMYWEGWIPSSPNDMCYGGDLRRTALLRIRKKLWVYSWTKGLSLVQSQPRMLSARALYTDDADFVEDQITV

SEQ ID NO: 191913 - protein, 76 aa, Zea Mays
MCYGGDLRRTALLRSVQMKVQSPHPCDVHEREQGRSNVHADELQQDQKEAVGVQLDQRPLSCPKSTQDAKCQSSIH

SEQ ID NO: 191914 - protein, 128 aa, Zea Mays
MVVPSSFLPMVDGLTFHGFQDLLNIHSSAHPCFRFLVADAPSLELALAHPLVLVFIAGISALRLLPERNWRNLAKKKRTLSVAPKPRRAPSSRPFPTPSLSMVATLLSLINTRRSSSNMPDLCSPGKS

SEQ ID NO: 191915 - protein, 155 aa, Zea Mays
MVVPSSFLPMVDGLTFHGFQDLLNIHSSAHPCFRFLVADAPSLELALAHPLVLVFIAGISALRLLPERNWRNLAKKKRTLSVAPKPRRAPSSRPFPTPSLSMVATLLSLINTRRSSSNMPDLCSPGETNCLCFVYSPPIPIFDYLLYMFVCLWWR

SEQ ID NO: 191916 - protein, 120 aa, Zea Mays
MTGACGPDNLGGSATTKLIDNDLFICQIYVGDIIFGSTNQLSCEKFRRIMIKKFEMLMMIGAAQLLWMRQVFKNFDNNLSKVPLLCDNESALQIGDNPIDHDRTKHIDIWYQFLRDHSQR

SEQ ID NO: 191917 - protein, 220 aa, Zea Mays
MAAELLSCSMGAGALHGVDRRPCCLLQWCMAQGAAIPSSPLSPPTTAAGLRSPSMENQQELSPPHGRELPSATMALDASFPDRRASISVRPVSHGLNVPPPRSTSPWRVSFPATLHFPPAMDAQEQQLLQLPMARCSRRRGAPPGISPAMARDSASSLLACCCAVTRGACKVLGKMRSSPDVCARCRLAVLGSQVDSTPSTLAGCLLFLHSPVVVVVHPR

SEQ ID NO: 191918 - protein, 271 aa, Zea Mays
MAARRVALLFAILLLHQTVSSLAGKSYYEILQVPKGASEEQIKRAYRKLALKYHPDKNPNNEEAGRRFAEINDAYEVLTDRKKRKADDWHGEEDLAKYMGRAMKVDVEYVFSNGGSPKQEEEQILKGDDVTVELEASLEDLYMGGSLKIWREKNVIKPAPGVRRCRCRNVVRKREVAPGVILNLSHQECDTCPNVKYVREGAFINVDIEKGMQDGQEILFYEDGEPKIDGVPGDLKIKIRTARHERYRRDGNDLHTTVEISQKLLADSRRR

SEQ ID NO: 191919 - protein, 72 aa, Zea Mays
MKQQMQLTPKAHTFQRTLRLTTKEIYNNIHLCIYVFYTQFHIVSSEYRKNQYRPRNLVARADACKTVPYRSY

SEQ ID NO: 191920 - protein, 458 aa, Zea Mays
MAEQERRDAEAGGDAAGAAVASHTSSMQRVKVYRLADGGKWDDQGTGHVSIDYIEGSKELGLTVLDEDDNETLLMHNITSDDIYRKQEETIISWRDREAATDLALSFQEAAGCSYIWEHICEIQRNLQFSNLGAPEVGRRQSSESLEASRIMHSNDDSFRSANGEFRELPPVELSNLPFILKTVLEGGITDQIHMAELITQDRDFFPKLVDIFRMCEDLENIDDLHMIFKLVKGIILLNSPSIFDKIFSDEFILDIIGALEYDPEVPRVQKHRAFLKDHVVFKEAIHIENVSVISKIHQTYRIGYLKDVILPRILDDATLGSFNTMIHSNNASVISMLKDDTPFIRQLFARMRSSDISMESKRELVLFLHEFCTLSKSLPVVQQLRLFRDLSGEGVFEIISDVLQSQDRKIVSAGTDMLILFLNQDPNLLRSYIVQQEGNSLLGLLQYGGCGVGTQQW

SEQ ID NO: 191921 - protein, 499 aa, Zea Mays
MCCRVKIEKSFQLDMLILFLNQDPNLLRSYIVQQEGNSLLGLLVKGMVTDFGEEMHCQFLEILRILMDSFTMSGAHRDVIIEIFYERHLDYLVDVIASSCPPRSLSRPRSNSVRVGGNAEGHHIKPEILLNVCELLCFCVVHHPYRIKCNFLMNNAIEKILTLTQRREKFLVVAAVRFMRTIISRNDEHLIRHVVKFNLLKPIIDIFVDNGERYNMLHSGVLELLEYIRKENIKALTIYVIESFWYELVKFEHFGSIQAFKLKYQQYVESAEPMLNASVPNMRKKAEQRGLEKEEEDYFNKDSDEEDSGSGRRDKHAQNQHSKPKPKVPNGSEADDTDGASRPKSAGLVDYDDDDDEDFNPPPMEPSTPAEDDVPLNISPVKRKPVDVKHADGEGRRRQKIETRISCAKIAAVTSTIIKHTDLQNKHACYLPTSAAPSTEPNGVFRERGTNSEEHQHSVENTETSRQAGGDCIKDGGSMSPEKAVNTTTTSDSEPYSVR

SEQ ID NO: 191922 - protein, 902 aa, Zea Mays
MAEQERRDAEAGGDAAGAAVASHTSSMQRVKVYRLADGGKWDDQGTGHVSIDYIEGSKELGLTVLDEDDNETLLMHNITSDDIYRKQEETIISWRDREAATDLALSFQEAAGCSYIWEHICEIQRNLQFSNLGAPEVGRRQSSESLEASRIMHSNDDSFRSANGEFRELPPVELSNLPFILKTVLEGGITDQIHMAELITQDRDFFPKLVDIFRMCEDLENIDDLHMIFKLVKGIILLNSPSIFDKIFSDEFILDIIGALEYDPEVPRVQKHRAFLKDHVVFKEAIHIENVSVISKIHQTYRIGYLKDVILPRILDDATLGSFNTMIHSNNASVISMLKDDTPFIRQLFARMRSSDISMESKRELVLFLHEFCTLSKSLPVVQQLRLFRDLSGEGVFEIISDVLQSQDRKIVSAGTDMLILFLNQDPNLLRSYIVQQEGNSLLGLLVKGMVTDFGEEMHCQFLEILRILMDSFTMSGAHRDVIIEIFYERHLDYLVDVIASSCPPRSLSRPRSNSVRVGGNAEGHHIKPEILLNVCELLCFCVVHHPYRIKCNFLMNNAIEKILTLTQRREKFLVVAAVRFMRTIISRNDEHLIRHVVKFNLLKPIIDIFVDNGERYNMLHSGVLELLEYIRKENIKALTIYVIESFWYELVKFEHFGSIQAFKLKYQQYVESAEPMLNASVPNMRKKAEQRGLEKEEEDYFNKDSDEEDSGSGRRDKHAQNQHSKPKPKVPNGSEADDTDGASRPKSAGLVDYDDDDDEDFNPPPMEPSTPAEDDVPLNISPVKRKPVDVKHADGEGRRRQKIETRISCAKIAAVTSTIIKHTDLQNKHACYLPTSAAPSTEPNGVFRERGTNSEEHQHSVENTETSRQAGGDCIKDGGSMSPEKAVNTTTTSDSEPYSVR

SEQ ID NO: 191923 - protein, 844 aa, Zea Mays
MAEQERRDAEAGGDAAGAAVASHTSSMQRVKVYRLADGGKWDDQGTGHVSIDYIEGSKELGLTVLDEDDNETLLMHNITSDDIYRKQEETIISWRDREAATDLALSFQEAAGCSYIWEHICEIQRNLQFSNLGAPEVGRRQSSESLEASRIMHSNDDSFRSANGEFRELPPVELSNLPFILKTVLEGGITDQIHMAELITQDRDFFPKLVDIFRMCEDLENIDDLHMIFKLVKGIILLNSPSIFDKIFSDEFILDIIGALEYDPEVPRVQKHRAFLKDHVVFKEAIHIENVSVISKIHQTYRIGYLKVLFLHEFCTLSKSLPVVQQLRLFRDLSGEGVFEIISDVLQSQDRKIVSAGTDMLILFLNQDPNLLRSYIVQQEGNSLLGLLVKGMVTDFGEEMHCQFLEILRILMDSFTMSGAHRDVIIEIFYERHLDYLVDVIASSCPPRSLSRPRSNSVRVGGNAEGHHIKPEILLNVCELLCFCVVHHPYRIKCNFLMNNAIEKILTLTQRREKFLVVAAVRFMRTIISRNDEHLIRHVVKFNLLKPIIDIFVDNGERYNMLHSGVLELLEYIRKENIKALTIYVIESFWYELVKFEHFGSIQAFKLKYQQYVESAEPMLNASVPNMRKKAEQRGLEKEEEDYFNKDSDEEDSGSGRRDKHAQNQHSKPKPKVPNGSEADDTDGASRPKSAGLVDYDDDDDEDFNPPPMEPSTPAEDDVPLNISPVKRKPVDVKHADGEGRRRQKIETRISCAKIAAVTSTIIKHTDLQNKHACYLPTSAAPSTEPNGVFRERGTNSEEHQHSVENTETSRQAGGDCIKDGGSMSPEKAVNTTTTSDSEPYSVR

SEQ ID NO: 191924 - protein, 898 aa, Zea Mays
MAEQERRDAEAGGDAAGAAVASHTSSMQRVKVYRLADGGKWDDQGTGHVSIDYIEGSKELGLTVLDEDDNETLLMHNITSDDIYRKQEETIISWRDREAATDLALSFQEAAGCSYIWEHICEIQRNLQFSNLGAPEVGRRQSSESLEASRIMHSNDDSFRSANGEFRELPPVELSNLPFILKTVLEGGITDQIHMAELITQDRDFFPKLVDIFRMCEDLENIDDLHMIFKLVKGIILLNSPSIFDKIFSDEFILDIIDDPEVPRVQKHRAFLKDHVVFKEAIHIENVSVISKIHQTYRIGYLKDVILPRILDDATLGSFNTMIHSNNASVISMLKDDTPFIRQLFARMRSSDISMESKRELVLFLHEFCTLSKSLPVVQQLRLFRDLSGEGVFEIISDVLQSQDRKIVSAGTDMLILFLNQDPNLLRSYIVQQEGNSLLGLLVKGMVTDFGEEMHCQFLEILRILMDSFTMSGAHRDVIIEIFYERHLDYLVDVIASSCPPRSLSRPRSNSVRVGGNAEGHHIKPEILLNVCELLCFCVVHHPYRIKCNFLMNNAIEKILTLTQRREKFLVVAAVRFMRTIISRNDEHLIRHVVKFNLLKPIIDIFVDNGERYNMLHSGVLELLEYIRKENIKALTIYVIESFWYELVKFEHFGSIQAFKLKYQQYVESAEPMLNASVPNMRKKAEQRGLEKEEEDYFNKDSDEEDSGSGRRDKHAQNQHSKPKPKVPNGSEADDTDGASRPKSAGLVDYDDDDDEDFNPPPMEPSTPAEDDVPLNISPVKRKPVDVKHADGEGRRRQKIETRISCAKIAAVTSTIIKHTDLQNKHACYLPTSAAPSTEPNGVFRERGTNSEEHQHSVENTETSRQAGGDCIKDGGSMSPEKAVNTTTTSDSEPYSVR

SEQ ID NO: 191925 - protein, 499 aa, Zea Mays
MCCRVKIEKSFQTDMLILFLNQDPNLLRSYIVQQEGNSLLGLLVKGMVTDFGEEMHCQFLEILRILMDSFTMSGAHRDVIIEIFYERHLDYLVDVIASSCPPRSLSRPRSNSVRVGGNAEGHHIKPEILLNVCELLCFCVVHHPYRIKCNFLMNNAIEKILTLTQRREKFLVVAAVRFMRTIISRNDEHLIRHVVKFNLLKPIIDIFVDNGERYNMLHSGVLELLEYIRKENIKALTIYVIESFWYELVKFEHFGSIQAFKLKYQQYVESAEPMLNASVPNMRKKAEQRGLEKEEEDYFNKDSDEEDSGSGRRDKHAQNQHSKPKPKVPNGSEADDTDGASRPKSAGLVDYDDDDDEDFNPPPMEPSTPAEDDVPLNISPVKRKPVDVKHADGEGRRRQKIETRISCAKIAAVTSTIIKHTDLQNKHACYLPTSAAPSTEPNGVFRERGTNSEEHQHSVENTETSRQAGGDCIKDGGSMSPEKAVNTTTTSDSEPYSVR

SEQ ID NO: 191926 - protein, 691 aa, Zea Mays
MAEQERRDAEAGGDAAGAAVASHTSSMQRVKVYRLADGGKWDDQGTGHVSIDYIEGSKELGLTVLDEDDNETLLMHNITSDDIYRKQEETIISWRDREAATDLALSFQEAAGCSYIWEHICEIQRNLQFSNLGAPEVGRRQSSESLEASRIMHSNDDSFRSANGEFRELPPVELSNLPFILKTVLEGGITDQIHMAELITQDRDFFPKLVDIFRMCEDLENIDDLHMIFKLVKGIILLNSPSIFDKIFSDEFILDIIGALEYDPEVPRVQKHRAFLKDHVVFKEAIHIENVSVISKIHQTYRIGYLKDVILPRILDDATLGSFNTMIHSNNASVLFLHEFCTLSKSLPVVQQLRLFRDLSGEGVFEIISDVLQSQDRKIVSAGTDMLILFLNQDPNLLRSYIVQQEGNSLLGLLVKGMVTDFGEEMHCQFLEILRILMDSFTMSGAHRDVIIEIFYERHLDYLVDVIASSCPPRSLSRPRSNSVRVGGNAEGHHIKPEILLNVCELLCFCVVHHPYRIKCNFLMNNAIEKILTLTQRREKFLVVAAVRFMRTIISRNDEHLIRHVVKFNLLKPIIDIFVDNGERYNMLHSGVLELLEYIRKENIKALTIYVIESFWYELVKFEHFGSIQAFKLKYQQYVESAEPMLNASVPNMRKKAEQRGLEKEEEDYFNKDRFTIFFLLVIYFFIILAI

SEQ ID NO: 191927 - protein, 902 aa, Zea Mays
MAEQERRDAEAGGDAAGAAVASHTSSMQRVKVYRLADGGKWDDQGTGHVSIDYIEGSKELGLTVLDEDDNETLLMHNITSDDIYRKQEETIISWRDREAATDLALSFQEAAGCSYIWEHICEIQRNLQFSNLGAPEVGRRQSSESLEASRIMHSNDDSFRSANGEFRELPPVELSNLPFILKTVLEGGITDQIHMAELITQDRDFFPKLVDIFRMCEDLENIDDLHMIFKLVKGIILLNSPSIFDKIFSDEFILDIIGALEDDPEVPRVQKHRAFLKDHVVFKEAIHIENVSVISKIHQTYRIGYLKDVILPRILDDATLGSFNTMIHSNNASVISMLKDDTPFIRQLFARMRSSDISMESKRELVLFLHEFCTLSKSLPVVQQLRLFRDLSGEGVFEIISDVLQSQDRKIVSAGTDMLILFLNQDPNLLRSYIVQQEGNSLLGLLVKGMVTDFGEEMHCQFLEILRILMDSFTMSGAHRDVIIEIFYERHLDYLVDVIASSCPPRSLSRPRSNSVRVGGNAEGHHIKPEILLNVCELLCFCVVHHPYRIKCNFLMNNAIEKILTLTQRREKFLVVAAVRFMRTIISRNDEHLIRHVVKFNLLKPIIDIFVDNGERYNMLHSGVLELLEYIRKENIKALTIYVIESFWYELVKFEHFGSIQAFKLKYQQYVESAEPMLNASVPNMRKKAEQRGLEKEEEDYFNKDSDEEDSGSGRRDKHAQNQHSKPKPKVPNGSEADDTDGASRPKSAGLVDYDDDDDEDFNPPPMEPSTPAEDDVPLNISPVKRKPVDVKHADGEGRRRQKIETRISCAKIAAVTSTIIKHTDLQNKHACYLPTSAAPSTEPNGVFRERGTNSEEHQHSVENTETSRQAGGDCIKDGGSMSPEKAVNTTTTSDSEPYSVR

SEQ ID NO: 191928 - protein, 54 aa, Zea Mays
MELPLGLLGVISCHLEEHQTSLQENPALKMKARKKKHRPKIIRENKLAKVRRIT

SEQ ID NO: 191929 - protein, 382 aa, Zea Mays
MSARLRVAELRAELQRRGLDVSGTKPALVRRLDAAICEAEKAVVAAAPTSVANGYDVAVDGKRNGGNNKRKRSGDGGEEGNGDTCTDVTKLEGMSYRELQGLAKARGVAANGGKKDVIQRLLSATADPAAVADGGPQGEKEVIKGGDEEVEVKKEKMVTATKKGAAVLDQHIPDHIKVNYHVLQVGDEIYDATLNQTNVGDNNNKFYIIQVLESDAGGSFMVYNRWGRVGVRGQDKLHGPFPTRDQAIYEFEGKFHNKTNNHWSDRKNFKCYAKKYTWLEMDYGETEKEIEKGSITDQIKETKLETRIAQFISLICNISMMKQRMVEIGYNAEKLPLGKLRKATILKGYHVLKRISDVISKADRRHLEQLTGRPGRLCLMGL

SEQ ID NO: 191930 - protein, 399 aa, Zea Mays
MSARLRVAELRAELQRRGLDVSGTKPALVRRLDAAICEAEKAVVAAAPTSVANGYDVAVDGKRNGGNNKRKRSGDGGEEGNGDTCTDVTKLEGMSYRELQGLAKARGVAANGGKKDVIQRLLSATADPAAVADGGPQGEKEVIKGGDEEVEVKKEKMVTATKKGAAVLDQHIPDHIKVNYHVLQVGDEIYDATLNQTNVGDNNNKFYIIQVLESDAGGSFMVYNRWGRVGVRGQDKLHGPFPTRDQAIYEFEGKFHNKTNNHWSDRKNFKCYAKKYTWLEMDYGETEKEIEKGSITDQIKETKLETRIAQFISLICNISMMKQRMVEIGYNAEKLPLGKLRKATILKGYHVLKRISDVISKADRRHLEQLTGEFYTVIPHDFGFRKMRDKWRWDLMILF

SEQ ID NO: 191931 - protein, 571 aa, Zea Mays
MSARLRVAELRAELQRRGLDVSGTKPALVRRLDAAICEAEKAVVAAAPTSVANGYDVAVDGKRNGGNNKRKRSGDGGEEGNGDTCTDVTKLEGMSYRELQGLAKARGVAANGGKKDVIQRLLSATADPAAVADGGPQGEKEVIKGGDEEVEVKKEKMVTATKKGAAVLDQHIPDHIKVNYHVLQVGDEIYDATLNQTNVGDNNNKFYIIQVLESDAGGSFMVYNRWGRVGVRGQDKLHGPFPTRDQAIYEFEGKFHNKTNNHWSDRKNFKCYAKKYTWLEMDYGETEKEIEKGSITDQIKETKLETRIAQFISLICNISMMKQRMVEIGYNAEKLPLGKLRKATILKGYHVLKRISDVISKADRRHLEQLTGEFYTVIPHDFGFRKMREFIIDTPQKLKAKLEMVEALGEIEIATKLLEDDSSDQDDPLYARYKQLHCDFTPLEADSDEYSMIKSYLRNTHGKTHSGYTVDIVQIFKVSRHGETERFQKFASTRNRMLLWHGSRLSNWAGILSQGLRIAPPEAPVTGYMFGKGVYFADMFSKSANYCYASEACRSGVLLLCEVCRLLNIHA

SEQ ID NO: 191932 - protein, 188 aa, Zea Mays
MREFIIDTPQKLKAKLEMVEALGEIEIATKLLEDDSSDQDDPLYARYKQLHCDFTPLEADSDEYSMIKSYLRNTHGKTHSGYTVDIVQIFKVSRHGETERFQKFASTRNRMLLWHGSRLSNWAGILSQGLRIAPPEAPVTGYMFGKGVYFADMFSKSANYCYASEACRSGVLLLCEGFAEFMVNADYE

SEQ ID NO: 191933 - protein, 813 aa, Zea Mays
MARWLQSAGLQHLAASSAAGGAGAGDLRVGGLSGGGGGGLLPSLLMQGYGPQTIEEKQKLYTLLRSLNVNGGLASASISEPYTSTGQSFAGGAPVDGFYSPELRGEFGAGLLDLHAMDDSELLSENAASEPFEPSPFMPKEMDDDDYDVIAENQQGLVDNQSAFTNEKENTVVSARESNVAKIKVVVRKRPLNKKEVSRKEEDIIDVHNSQFLTVHEPKLKVDLTAYVEKHDFCFDTVLGENVTNDEVYRETVEPIIPLIFQRTKATCFAYGQTGSGKTYTMQPLPLRAAHDMVCLLHQPMYRNQHFKLWLSYFEIYGGKLFDLLSERRQLLMREDGKKQVCIVGLQEFEVSDVQIVKEYIEKGNAARSTGTTGANEESSRSHAILQLSVKKHIPVTETRRQRDRDAIEAKNTKHVGKMSFIDLAGSERGADTTDNDKQTRIEGAEINKSLLALKECIRALDNDQIHIPFRGSKLTEVLRDSFVGNSRTVMISCVSPSSGSCEHTLNTLRYADRVKSLSKGGNTKKEQFAVQSVSSGKESTYTSYPLSCEAEETMEQTQEIRPVDSSRKGVDSFTSNSSIEPEKNSYCMIPSYPHKGKEETSTRSGLNDRERGDLKYNQAGFNSKTHSLQESINSQEEVKVTKVSPPRRKANRDEKSERQVNYMKKESGPEISRTGVKQQQQLKQLQRPSSTSSSQVLSKQSEKEDMEINTILEEEALIAAHRKEIESTMEIVREVSSSYSVVFKCHHRCQCLEMNLLAEVDQPGSLIDNYVAQLSFLLSRKASGLVSLQARLARFQQRLKEQEILSRQKPLR

SEQ ID NO: 191934 - protein, 590 aa, Zea Mays
MARWLQSAGLQHLAASSAAGGAGAGDLRVGGLSGGGGGGLLPSLLMQGYGPQTIEEKQKLYTLLRSLNVNGGLASASISEPYTSTGQSFAGGAPVDGFYSPELRGEFGAGLLDLHAMDDSELLSENAASEPFEPSPFMPKEMDDDDYDVIAENQQGLVDNQSAFTNEKENTVVSARESNVAKIKVVVRKRPLNKKEVSRKEEDIIDVHNSQFLTVHEPKLKVDLTAYVEKHDFCFDTVLGENVTNDEVYRETVEPIIPLIFQRTKATCFAYGQTGSGKTYTMQPLPLRAAHDMVCLLHQPMYRNQHFKLWLSYFEIYGGKLFDLLSERRQLLMREDGKKQVCIVGLQEFEVSDVQIVKEYIEKGNAARSTGTTGANEESSRSHAILQLSVKKHIPVTETRRQRDRDAIEAKNTKHVGKMSFIDLAGSERGADTTDNDKQTRIEGAEINKSLLALKECIRALDNDQIHIPFRGSKLTEVLRDSFVGNSRTVMISCVSPSSGSCEHTLNTLRYADRVKSLSKGGNTKKEQFAVQSVSSGKESTYTSYPLSCEAEETMEQTQEIRPVDSSRKGINKFTRRGESDKSLTTPEKS

SEQ ID NO: 191935 - protein, 532 aa, Zea Mays
MLQILHCNLFNGSGKTYTMQPLPLRAAHDMVCLLHQPMYRNQHFKLWLSYFEIYGGKLFDLLSERRQLLMREDGKKQVCIVGLQEFEVSDVQIVKEYIEKGNAARSTGTTGANEESSRSHAILQLSVKKHIPVTETRRQRDRDAIEAKNTKHVGKMSFIDLAGSERGADTTDNDKQTRIEGAEINKSLLALKECIRALDNDQIHIPFRGSKLTEVLRDSFVGNSRTVMISCVSPSSGSCEHTLNTLRYADRVKSLSKGGNTKKEQFAVQSVSSGKESTYTSYPLSCEAEETMEQTQEIRPVDSSRKGVDSFTSNSSIEPEKNSYCMIPSYPHKGKEETSTRSGLNDRERGDLKYNQAGFNSKTHSLQESINSQEEVKVTKVSPPRRKANRDEKSERQVNYMKKESGPEISRTGVKQQQQLKQLQRPSSTSSSQVLSKQSEKEDMEINTILEEEALIAAHRKEIESTMEIVREEMNLLAEVDQPGSLIDNYVAQLSFLLSRKASGLVSLQARLARFQQRLKEQEILSRQKPLR

SEQ ID NO: 191936 - protein, 197 aa, Zea Mays
MCKKRKGNKKEKISQPLLSFHRFLLDFSLGRVGFLGVSFFSAGSHAHLPGRAHLPAAPARPAPSSDPCLNSPPSRRPPSVPSPPWPSVLPALLSVSLLAAVGSGPGPIGAPPCCSAGPSSDPSQPRLSGVWPWSKLLLVQPPSQAPLAELPHGVSPIHGCVVPLLWWLSYLSCARRNDHEEFCVVCSPICDTVEPRM

SEQ ID NO: 191937 - protein, 53 aa, Zea Mays
MLLLRNLDRCMMVMILRALTMRWLVRFIWNQWRQPQLKMDTVFINRSGFPSAA

SEQ ID NO: 191938 - protein, 70 aa, Zea Mays
MPLYNLVHQDRLRARIPLETKASGSVVVYILISYDFSIPIKLQIFNARANCSCPSLQISILLLEKNYALC

SEQ ID NO: 191939 - protein, 421 aa, Zea Mays
MDREQWMYGIDRSDINYFLHVQGFIKVAEKHRLDNKATAILCPCVDCRNFDPIIDSRVILGHLIMRGFTSGYTCWTNHGECSIGDNNGNTEGPLDTNGGPMDTNEANDHYVHIQDTKSHFADATIVDVPVDHLEYMIHDVTVTRNLSEAQASQDQMSSESSSDTSGSSTSKTSGSTSTSSSTSLHSEDIVEKGSCTSARHRTKRGHAKCKKLEKGGPRRLTFDKNGIAQSPVKHVNEFSSYCGYIARMRVDIRIKDWRKVPTVVKSNLWEDVSKKFVMPRDETHTLNVKKVALKSMIVMSGHVAPPKSSNFFVEFGMDSGYHKKYTSSSSKVQGILFTYTFVQHMLYRILQVAGTVTKAMGARYCIIPIPTSSQNSTISLFRILPKTSLANLRMELLGIRRFSQGCGTSPSSPSGRMTNMK

SEQ ID NO: 191940 - protein, 1012 aa, Zea Mays
MAAEPAATAAASAAAAISAVMDWRSSPDARAAAFAYLESVKSGDVRALASTSFFLVRKDQTSEIRLHGFKMLQHLVRLRWEELSAAERNEFANMTINLISDVVGPHEVWALKSQTAALVAEVVRREGVDLWITLLPSIVSLSNNGPTEAELVAMILRWLPEDITIHNEDLEGDRRRSLLRGLTESLSQILPLLYSLLEKHFGAALSEHAKQQMDLAKQHAGTVTAVLNAVNAYAEWVPVTDLAKYGLIHGCGSLLSYSDFRLHACEFFKVICQRKRPVDVAVAEYDAAMCNIFQVLMNISQQFLTRSGMQPSSIDESEYEFASCVCETMVALGSSNMQCILADGARTFQFLQQMLEYYQHYKITLHFQSLLFWLVVLREPSKSKSIARVSGDNSAAGNSASTGDLSTEKKKGVSVFVTDEIYSTILDVSFKRMLKNNGSATSGLLEIWSEELEGKSDFCNYRTKLLDLIKVIASQRSVIAAAIVVQRINVVFGDANQATKSPQDLDAMEGAQLGLEAVVNAIFDGSVDCGKTDLDTKSQLHKIFEGLLQQLLSLKWTEPNLAVIHGHYLDALGPFLKHHPDAVASVVNKLFELLTSLPITFQDPSNNSRLARLQICSSFIRISRAADKALLPHMKNIADTMAYLQGEGRLLRGEHNHLCEAFLVMSSSAGIQQQQEVLAWLLEPLNKMWTQVEWQTAYLSDPSGLTNMFADSQFMWSIYHTVTFFEKALKRSGTKKSSATPQAPTTTVPGYLHPMSSHLAWIVPPLLRLLRCIHVLWSEPFAQSQTAEIKAAKSMTVAEQASLLGETGKLTKGQVAPADGLLDVQRDGESKENNIKNWLRGIRDSGYNVLGLAATLGEAFFRCIEGSSVTLAIMENVQVMEFRHLRQLIHLVIIPFVKYCPADLWLWLVNLLQPLFVHCQQALNYSWSSLLHEGRAKVPDSIGNLSGSELKVEVMEEKLLRDLTREVCSVLWALSSPGLNNGLPSLEQLGPSNRMDSVLKNLESFASSSLTG

SEQ ID NO: 191941 - protein, 1031 aa, Zea Mays
MAAEPAATAAASAAAAISAVMDWRSSPDARAAAFAYLESVKSGDVRALASTSFFLVRKDQTSEIRLHGFKMLQHLVRLRWEELSAAERNEFANMTINLISDVVGPHEVWALKSQTAALVAEVVRREGVDLWITLLPSIVSLSNNGPTEAELVAMILRWLPEDITIHNEDLEGDRRRSLLRGLTESLSQILPLLYSLLEKHFGAALSEHAKQQMDLAKQHAGTVTAVLNAVNAYAEWVPVTDLAKYGLIHGCGSLLSYSDFRLHACEFFKVICQRKRPVDVAVAEYDAAMCNIFQVLMNISQQFLTRSGMQPSSIDESEYEFASCVCETMVALGSSNMQCILADGARTFQFLQQMLEYYQHYKITLHFQSLLFWLVVLREPSKSKSIARVSGDNSAAGNSASTGDLSTEKKKGVSVFVTDEIYSTILDVSFKRMLKNNGSATSGLLEIWSEELEGKSDFCNYRTKLLDLIKVIASQRSVIAAAIVVQRINVVFGDANQATKSPQDLDAMEGAQLGLEAVVNAIFDGSVDCGKTDLDTKSQLHKIFEGLLQQLLSLKWTEPNLAVIHGHYLDALGPFLKHHPDAVASVVNKLFELLTSLPITFQDPSNNSRLARLQICSSFIRISRAADKALLPHMKNIADTMAYLQGEGRLLRGEHNHLCEAFLVMSSSAGIQQQQEVLAWLLEPLNKMWTQVEWQTAYLSDPSGLTNMFADSQFMWSIYHTVTFFEKALKRSGTKKSSATPQAPTTTVPGYLHPMSSHLAWIVPPLLRLLRCIHVLWSEPFAQSQTAEIKAAKSMTVAEQASLLGETGKLTKGQVAPADGLLDVQRDGESKENNIKNWLRGIRDSGYNVLGLAATLGEAFFRCIEGSSVTLAIMENVQVMEFRHLRQLIHLVIIPFVKYCPADLWLWLVNLLQPLFVHCQQALNYSWSSLLHEGRAKVPDSIGNLSGSELKVEVMEEKLLRDLTREVCSVLWALSSPGLNNGLPSLEQLGPSNRMDSVLKNLESFASSSLTGQQYSFHRMLLHCPSKPETK

SEQ ID NO: 191942 - protein, 701 aa, Zea Mays
MAAEPAATAAASAAAAISAVMDWRSSPDARAAAFAYLESVKSGDVRALASTSFFLVRKDQTSEIRLHGFKMLQHLVRLRWEELSAAERNEFANMTINLISDVVGPHEVWALKSQTAALVAEVVRREGVDLWITLLPSIVSLSNNGPTEAELVAMILRWLPEDITIHNEDLEGDRRRSLLRGLTESLSQILPLLYSLLEKHFGAALSEHAKQQMDLAKQHAGTVTAVLNAVNAYAEWVPVTDLAKYGLIHGCGSLLSYSDFRLHACEFFKVICQRKRPVDVAVAEYDAAMCNIFQVLMNISQQFLTRSGMQPSSIDESEYEFASCVCETMVALGSSNMQCILADGARTFQFLQQMLEYYQHYKITLHFQSLLFWLVVLREPSKSKSIARVSGDNSAAGNSASTGDLSTEKKKGVSVFVTDEIYSTILDVSFKRMLKNNGSATSGLLEIWSEELEGKSDFCNYRTKLLDLIKVIASQRSVIAAAIVVQRINVVFGDANQATKSPQDLDAMEGAQLGLEAVVNAIFDGSVDCGKTDLDTKSQLHKIFEGLLQQLLSLKWTEPNLAVIHGHYLDALGPFLKHHPDAVASVVNKLFELLTSLPITFQDPSNNSRLARLQICSSFIRISRAADKALLPHMKNIADTMAYLQGEGRLLRGEHNHLCEAFLVMSSSAGNKKFLLGYLNLLIKCGLKWNGKLHTCLILLV

SEQ ID NO: 191943 - protein, 372 aa, Zea Mays
MAYLQGEGRLLRGEHNHLCEAFLVMSSSAGIQQQQEVLAWLLEPLNKMWTQVEWQTAYLSDPSGLTNMFADSQFMWSIYHTVTFFEKALKRSGTKKSSATPQAPTTTVPGYLHPMSSHLAWIVPPLLRLLRCIHVLWSEPFAQSQTAEIKAAKSMTVAEQASLLGETGKLTKGQVAPADGLLDVQRDGESKENNIKNWLRGIRDSGYNVLGLAATLGEAFFRCIEGSSVTLAIMENVQVMEFRHLRQLIHLVIIPFVKYCPADLWLWLVNLLQPLFVHCQQALNYSWSSLLHEGRAKVPDSIGNLSGSELKVEVMEEKLLRDLTREVCSVLWALSSPGLNNGLPSLEQLGPSNRMDSVLKNLESFASSSLTG

SEQ ID NO: 191944 - protein, 316 aa, Zea Mays
MALEKIASIVQVTPFNVTSDSYATFIQNVRVALAGAKPDTVVGPKSKVSRPVLAKEASSSGLQPPKWIHVVLNGKGGAAPTVAIRSDNAYIVGFTNSKGTWYQLSRTGAQEKLVDDNPVMAGFDGNYNTLIGGSDKLLTLNVAKFSVAAAAATFWNHKAGNTSYGDDCGSDEEEESGMLRAGDPLKVAVATLAVAICEAARFVPVSTVIGKGWGEQRVSVTAKEVSYIMDWGDLSRALLKWKSGGYKDDKPFQPFKGIGINNGEEALAVVALLKLMSGSQSLLAWLKCFWGLLVKKLKREDMNYEKPKTAAIVNPL

SEQ ID NO: 191945 - protein, 478 aa, Zea Mays
MARYFRSSNLASRIFDRQLISPLPGATVNTIRQFYENLVPSYTIYDIDCPDYSFRKFTDDGKYLVAFSRNHQDLIVYRPIWFTYSCNEECETHELPPKAKKFDSFFKQLYSIPLASSNEYICKDFFLYMECHRFGLFATSTAQSNESTATEGAIHGVPLIEKITFHLVRLEDGVILDEKAFCNDFINLAHSIGAYMYEDLLCIVSLRYQTIHILQIRDSGNLVEVRNIGAFCREDDELFLHSHIQTGYGGSFLPGIKQRLLSYIFCKTWNEVPDQTLRVQHLKKKFYFHFQDYVDLIIWKVQFLDRHHLFVKFGSVDGGVSRSTDQNLAFFAVYNMETTDIVSLHQNSSEDIYALFEQFYDHFHANPQASSHGKFISSHSNDIHALDQLRVIKNKASSSSQLISAIDRHRHCTEHPIKFMSVRQNVVKFKIKPGSDSGASDSRAKRISSFLFHPFFPLALSIQQTYMQPTVVNIHFRR

SEQ ID NO: 191946 - protein, 1432 aa, Zea Mays
MSHHSPTFSHAVDPLDADDWLKVIGKKLDIAQCNDREKVLYASGRLEGAASDWWDAFTAAHPNADTITWQEFQENFRAHHIPSGIMKLKKKEFLSLTQGNMSVSEYRDRFTQLSRYAPEEVDTDEKRQERFLEGLIGPLNYQLQSHTFPNFQTLLNKAIGLESKRKELSDHKRKFQGQSSRNTRPNNAQGSQFRSGNQGGNNYQVQRSGQQSQRSNQNQYQQRSNSQTNQRSGGNSQNRQGGTNNTQARNNAPVQPNGCFKCGELGHYANNCPRRNQQTPQKGNNQRNDQNTPARGSAQNKTPQNQSRGRVNHVTAESVPEDADIVYGMFLVNSIPASVLFDSGASHSFITESFVEKHNIPKYPLKRILHISSPGGDMKATHSCPHVNIKIQGIDFTVDPVVLGSNGIDVILGCNWLKSCDGVIQCANITIMLTSPQGERIQVNIDKSTDEKGKTVINHLEEKPLENIKVVCEYPDVFPEELPGMPPDRDIEFSIELVPGTAPILKRPYRMDGKDLVELKKQIEELLEKGFIRPSSSPWGAPVLFVNKKDGSRRMCVDYRSLNEVTVKNKYPLPRIEDLFDQMKGAKIFSKIDLRSGYHQLKIRAEDVPKTAFTTRYGLYEFLVMSFGLTNAPAYFMNLMNKVFMEYLDQFVVVFIDDILIYSPNEEAHEDHLRLVLQKLRDNQLYAKFSKCDFWLKEVAFLGHIVTDRGIKVDPGKISEILDWKQPKDASKIRSFLGLAGYYRRFIEGFSKLVKPLTSLLEKGKEFKWDEACQNCFEELKKRLTTAPILVMPDIHKGFDVYCDASHLGLGCVLMQEGKVIAYASRQLRKHEKNYPTHDLELAAVVHALKIWRHYMIGNKCKIFTDHKSLKYIFTQKELNLRQRRWLELIKDYDLEIQYHPGKANVVADALSRKGQVNNITTHLMSQELCWEMERLNLGLLNNVEATVMEVESTLEEEIRKGQESDEKIKEIKALISLGKAPYFTEDDQGTVWFKKRICVPEIEHLRQLILREAHDSAYSIHPGSTKMYQDLKEKYWWYGLKRDVATHVALCDVCQRVKAEHQRPAGLLQPLKIPEWKWEEISMDFIVGLPRTRDGYDSIWVIVDRLTKVAHFIPVKTTYSGAQLAELYMSRIVCLHGVPKKIVSDRGTQFTSRFWKRLHESMDTKLNFSSAYHPQTNGQTERTNQVLEDMLRACALKHGRSWDKSLPYAEFSYNNSYQASLKMAPFEALYGRKCRTPLYWNQSGESQVFGPEILQEAEKQVQIIRENLKTAQSRQKSYADNRRRELMFEVGDFVYLKVSPMRGMKRFKVKGKLSPRYIGPFKILERKGEVAYQLELPDRLSDVHDVFHVSQLKKCLRVPEEQLPMEELNVNEDLTYSEYPIRILETSRRITRSKVINMCKVQWSHHSEDEATWEREDELKAEFPQLFSEGS

SEQ ID NO: 191947 - protein, 58 aa, Zea Mays
MLFPVPGDHTRNLSISPWPGRPQRFHAQRGCAAVDRSRGQLHRRPTNLHLPQAITCTH

SEQ ID NO: 191948 - protein, 1178 aa, Zea Mays
MAKPMKYDDEEEISSSAEEEDQSDAAGSVSGEEGDDDDEDAAAPPAEEAEGEGQQEEEVDEEEIEAVTTGAGAEDEEDAGAVTAAEGDDESQSTEDDEPVARDKDDDDETDAVVGKREKARLKELQKMKKHKIQEILDTQNAAIDADMNNKGKGRLKYLLQQTEIFAHFAKGSQSNEKKPRGRGRHASKMTEEEEDEEYLKEEEDALAGAGGTRLVSQPSCIKGKMRDYQLAGLNWLIRLYENGINGILADEMGLGKTLQTISLLGYLHEFRGITGPHMVVAPKSTLGNWMKEIQRFCPILRAVKFLGNPEERNHIRDDLLQPGKFDVCVTSFEMAIKEKSALRRFSWRYIIIDEAHRIKNENSLLSKTMRIYNTNYRLLITGTPLQNNLHELWALLNFLLPEIFSSAETFDEWFQISGENDQQEVVQQLHKVLRPFLLRRLKSDVEKGLPPKKETILKVGMSQMQKQYYRALLQKDLEVINAGGERKRLLNIAMQLRKCCNHPYLFQGAEPGPPYTTGEHLVENAGKMVLLDKLLPKLKERDSRVLIFSQMTRLLDILEDYLMYRGYQYCRIDGNTGGEDRDASIEAFNKPGSEKFVFLLSTRAGGLGINLATADVVVLYDSDWNPQADLQAQDRAHRIGQKKEVQVFRFCTEYTIEEKVIERAYKKLALDALVIQQGRLAEQKTVNKDDLLQMVRFGAEMVFSSKDSTITDEDIDRIIAKGEETTAELDAKMKKFTEDAIKFKMDDNAELYDFDDEKDENKVDFKKLVSDNWIEPPRRERKRNYSESDYFKQALRQGAPAKPREPRIPRMPHLHDFQFFNNQRLNELYEKEVRYLMQANQKKDTIDGEDEDQLEPLTAEEQEEKEQLLEEGFASWTRRDFNTFIRACEKYGRNDIKSISSEMEGKTEEEVQRYAKVFKERYKELTDYDRIIKNIERGEARISRKDEIMKAIGKKLDRYKNPWLELKIQYGQNKGKFYNEECDRFMLCMVHKLGYGNWDELKAAFRMSPLFRFDWFVKSRTTQELARRCDTLIRLVEKENQEYDEQERQARKEKRLAKNTTPTKRAALRNSEGESAPLSSFKRRRQSLMDDYVGSLSARCSLCNALSPYVLCLVSCARELNASRAGDFVVAVDSDFAIATVATLLIHFFIVALTLIPNYKIRDFNLTLEFDQIYAIK

SEQ ID NO: 191949 - protein, 1102 aa, Zea Mays
MAKPMKYDDEEEISSSAEEEDQSDAAGSVSGEEGDDDDEDAAAPPAEEAEGEGQQEEEVDEEEIEAVTTGAGAEDEEDAGAVTAAEGDDESQSTEDDEPVARDKDDDDETDAVVGKREKARLKELQKMKKHKIQEILDTQNAAIDADMNNKGKGRLKYLLQQTEIFAHFAKGSQSNEKKPRGRGRHASKMTEEEEDEEYLKEEEDALAGAGGTRLVSQPSCIKGKMRDYQLAGLNWLIRLYENGINGILADEMGLGKTLQTISLLGYLHEFRGITGPHMVVAPKSTLGNWMKEIQRFCPILRAVKFLGNPEERNHIRDDLLQPGKFDVCVTSFEMAIKEKSALRRFSWRYIIIDEAHRIKNENSLLSKTMRIYNTNYRLLITGTPLQNNLHELWALLNFLLPEIFSSAETFDEWFQISGENDQQEVVQQLHKVLRPFLLRRLKSDVEKGLPPKKETILKVGMSQMQKQYYRALLQKDLEVINAGGERKRLLNIAMQLRKCCNHPYLFQGAEPGPPYTTGEHLVENAGKMVLLDKLLPKLKERDSRVLIFSQMTRLLDILEDYLMYRGYQYCRIDGNTGGEDRDASIEAFNKPGSEKFVFLLSTRAGGLGINLATADVVVLYDSDWNPQADLQAQDRAHRIGQKKEVQVFRFCTEYTIEEKVIERAYKKLALDALVIQQGRLAEQKTVNKDDLLQMVRFGAEMVFSSKDSTITDEDIDRIIAKGEETTAELDAKMKKFTEDAIKFKMDDNAELYDFDDEKDENKVDFKKLVSDNWIEPPRRERKRNYSESDYFKQALRQGAPAKPREPRIPRMPHLHDFQFFNNQRLNELYEKEVRYLMQANQKKDTIDGEDEDQLEPLTAEEQEEKEQLLEEGFASWTRRDFNTFIRACEKYGRNDIKSISSEMEGKTEEEVQRYAKVFKERYKELTDYDRIIKNIERGEARISRKDEIMKAIGKKLDRYKNPWLELKIQYGQNKGKFYNEECDRFMLCMVHKLGYGNWDELKAAFRMSPLFRFDWFVKSRTTQELARRCDTLIRLVEKENQEYDEQERQARKEKRLAKNTTPTKRAALRNSEGESAPLSSFKRRRQSLMDDYVGSGRRKRG

SEQ ID NO: 191950 - protein, 1097 aa, Zea Mays
MAKPMKYDDEEEISSSAEEEDQSDAAGSVSGEEGDDDDEDAAAPPAEEAEGEGQQEEEVDEEEIEAVTTGAGAEDEEDAGAVTAAEGDDESQSTEDDEPVARDKDDDDETDAVVGKREKARLKELQKMKKHKIQEILDTQNAAIDADMNNKGKGRLKYLLQQTEIFAHFAKGSQSNEKKPRGRGRHASKMTEEEEDEEYLKEEEDALAGAGGTRLVSQPSCIKGKMRDYQLAGLNWLIRLYENGINGILADEMGLGKTLQTISLLGYLHEFRGITGPHMVVAPKSTLGNWMKEIQRFCPILRAVKFLGNPEERNHIRDDLLQPGKFDVCVTSFEMAIKEKSALRRFSWRYIIIDEAHRIKNENSLLSKTMRIYNTNYRLLITGTPLQNNLHELWALLNFLLPEIFSSAETFDEWFQISGENDQQEVVQQLHKVLRPFLLRRLKSDVEKGLPPKKETILKVGMSQMQKQYYRALLQKDLEVINAGGERKRLLNIAMQLRKCCNHPYLFQGAEPGPPYTTGEHLVENAGKMVLLDKLLPKLKERDSRVLIFSQMTRLLDILEDYLMYRGYQYCRIDGNTGGEDRDASIEAFNKPGSEKFVFLLSTRAGGLGINLATADVVVLYDSDWNPQADLQAQDRAHRIGQKKEVQVFRFCTEYTIEEKVIERAYKKLALDALVIQQGRLAEQKTVNKDDLLQMVRFGAEMVFSSKDSTITDEDIDRIIAKGEETTAELDAKMKKFTEDAIKFKMDDNAELYDFDDEKDENKVDFKKLVSDNWIEPPRRERKRNYSESDYFKQALRQGAPAKPREPRIPRMPHLHDFQFFNNQRLNELYEKEVRYLMQANQKKDTIDGEDEDQLEPLTAEEQEEKEQLLEEGFASWTRRDFNTFIRACEKYGRNDIKSISSEMEGKTEEEVQRYAKVFKERYKELTDYDRIIKNIERGEARISRKDEIMKAIGKKLDRYKNPWLELKIQYGQNKGKFYNEECDRFMLCMVHKLGYGNWDELKAAFRMSPLFRFDWFVKSRTTQELARRCDTLIRLVEKENQEYDEQERQARKEKRLAKNTTPTKRAALRNSEGESAPLSSFKRRRQSLMDDYVGSM

SEQ ID NO: 191951 - protein, 1104 aa, Zea Mays
MAKPMKYDDEEEISSSAEEEDQSDAAGSVSGEEGDDDDEDAAAPPAEEAEGEGQQEEEVDEEEIEAVTTGAGAEDEEDAGAVTAAEGDDESQSTEDDEPVARDKDDDDETDAVVGKREKARLKELQKMKKHKIQEILDTQNAAIDADMNNKGKGRLKYLLQQTEIFAHFAKGSQSNEKKPRGRGRHASKMTEEEEDEEYLKEEEDALAGAGGTRLVSQPSCIKGKMRDYQLAGLNWLIRLYENGINGILADEMGLGKTLQTISLLGYLHEFRGITGPHMVVAPKSTLGNWMKEIQRFCPILRAVKFLGNPEERNHIRDDLLQPGKFDVCVTSFEMAIKEKSALRRFSWRYIIIDEAHRIKNENSLLSKTMRIYNTNYRLLITGTPLQNNLHELWALLNFLLPEIFSSAETFDEWFQISGENDQQEVVQQLHKVLRPFLLRRLKSDVEKGLPPKKETILKVGMSQMQKQYYRALLQKDLEVINAGGERKRLLNIAMQLRKCCNHPYLFQGAEPGPPYTTGEHLVENAGKMVLLDKLLPKLKERDSRVLIFSQMTRLLDILEDYLMYRGYQYCRIDGNTGGEDRDASIEAFNKPGSEKFVFLLSTRAGGLGINLATADVVVLYDSDWNPQADLQAQDRAHRIGQKKEVQVFRFCTEIMQTKLQYTIEEKVIERAYKKLALDALVIQQGRLAEQKTVNKDDLLQMVRFGAEMVFSSKDSTITDEDIDRIIAKGEETTAELDAKMKKFTEDAIKFKMDDNAELYDFDDEKDENKVDFKKLVSDNWIEPPRRERKRNYSESDYFKQALRQGAPAKPREPRIPRMPHLHDFQFFNNQRLNELYEKEVRYLMQANQKKDTIDGEDEDQLEPLTAEEQEEKEQLLEEGFASWTRRDFNTFIRACEKYGRNDIKSISSEMEGKTEEEVQRYAKVFKERYKELTDYDRIIKNIERGEARISRKDEIMKAIGKKLDRYKNPWLELKIQYGQNKGKFYNEECDRFMLCMVHKLGYGNWDELKAAFRMSPLFRFDWFVKSRTTQELARRCDTLIRLVEKENQEYDEQERQARKEKRLAKNTTPTKRAALRNSEGESAPLSSFKRRRQSLMDDYVGSM

SEQ ID NO: 191952 - protein, 1117 aa, Zea Mays
MAKPMKYDDEEEISSSAEEEDQSDAAGSVSGEEGDDDDEDAAAPPAEEAEGEGQQEEEVDEEEIEAVTTGAGAEDEEDAGAVTAAEGDDESQSTEDDEPVARDKDDDDETDAVVGKREKARLKELQKMKKHKIQEILDTQNAAIDADMNNKGKGRLKYLLQQTEIFAHFAKGSQSNEKKPRGRTIRHSSMKFEMTEEEEDEEYLKEEEDALAGAGGTRLVSQPSCIKGKMRDYQLAGLNWLIRLYENGINGILADEMGLGKTLQTISLLGYLHEFRGITGPHMVVAPKSTLGNWMKEIQRFCPILRAVKFLGNPEERNHIRDDLLQPGKFDVCVTSFEMAIKEKSALRRFSWRYIIIDEAHRIKNENSLLSKTMRIYNTNYRLLITGTPLQNNLHELWALLNFLLPEIFSSAETFDEWFQISGENDQQEVVQQLHKVLRPFLLRRLKSDVEKGLPPKKETILKVGMSQMQKQYYRALLQKDLEVINAGGERKRLLNIAMQLRKCCNHPYLFQGAEPGPPYTTGEHLVENAGKMVLLDKLLPKLKERDSRVLIFSQMTRLLDILEDYLMYRGYQYCRIDGNTGGEDRDASIEAFNKPGSEKFVFLLSTRAGGLGINLATADVVVLYDSDWNPQADLQAQDRAHRIGQKKEVQVFRFCTEIMQTKLQYTIEEKVIERAYKKLALDALVIQQGRLAEQKTVNKDDLLQMVRFGAEMVFSSKDSTITDEDIDRIIAKGEETTAELDAKMKKFTEDAIKFKMDDNAELYDFDDEKDENKVDFKKLVSDNWIEPPRRERKRNYSESDYFKQALRQGAPAKPREPRIPRMPHLHDFQFFNNQRLNELYEKEVRYLMQANQKKDTIDGEDEDQLEPLTAEEQEEKEQLLEEGFASWTRRDFNTFIRACEKYGRNDIKSISSEMEGKTEEEVQRYAKVFKERYKELTDYDRIIKNIERGEARISRKDEIMKAIGKKLDRYKNPWLELKIQYGQNKGKFYNEECDRFMNTTPTKRAALRNSEGESAPLSSFKRRRQSLMDDYVGSLSARCSLCNALSPYVLCLVSCARELNASRAGDFVVAVDSDFAIATVATLLIHFFIVALTLIPNYKIRDFNLTLEFDQIYAIK

SEQ ID NO: 191953 - protein, 1066 aa, Zea Mays
MAKPMKYDDEEEISSSAEEEDQSDAAGSVSGEEGDDDDEDAAAPPAEEAEGEGQQEEEVDEEEIEAVTTGAGAEDEEDAGAVTAAEGDDESQSTEDDEPVARDKDDDDETDAVVGKREKARLKELQKMKKHKIQEILDTQNAAIDADMNNKGKGRLKYLLQQTEIFAHFAKGSQSNEKKPRGRGRHASKMTEEEEDEEYLKEEEDALAGAGGTRLVSQPSCIKGKMRDYQLAGLNWLIRLYENGINGILADEMGLGKTLQTISLLGYLHEFRGITGPHMVVAPKSTLGNWMKEIQRFCPILRAVKFLGNPEERNHIRDDLLQPGKFDVCVTSFEMAIKEKSALRRFSWRYIIIDEAHRIKNENSLLSKTMRIYNTNYRLLITGTPLQNNLHELWALLNFLLPEIFSSAETFDEWFQISGENDQQEVVQQLHKVLRPFLLRRLKSDVEKGLPPKKETILKVGMSQMQKQYYRALLQKDLEVINAGGERKRLLNIAMQLRKCCNHPYLFQGAEPGPPYTTGEHLVENAGKMVLLDKLLPKLKERDSRVLIFSQMTRLLDILEDYLMYRGYQYCRIDGNTGGEDRDASIEAFNKPGSEKFVFLLSTRAGGLGINLATADVVVLYDSDWNPQADLQAQDRAHRIGQKKEVQVFRFCTEIMQTKLQYTIEEKVIERAYKKLALDALVIQQGRLAEQKTVNKDDLLQMVRFGAEMVFSSKDSTITDEDIDRIIAKGEETTAELDAKMKKFTEDAIKFKMDDNAELYDFDDEKDENKVDFKKLVSDNWIEPPRRERKRNYSESDYFKQALRQGAPAKPREPRIPRMPHLHDFQFFNNQRLNELYEKEVRYLMQANQKKDTIDGEDEDQLEPLTAEEQEEKEQLLEEGFASWTRRDFNTFIRACEKYGRNDIKSISSEMEGKTEEEVQRYAKVFKERYKELTDYDRIIKNIERGEARISRKDEIMKAIGKKLDRYKNPWLELKIQYGQNKGKFYNEECDRFMNTTPTKRAALRNSEGESAPLSSFKRRRQSLMDDYVGSLSARCSLCNALSPYVLCLVSCARELNASRAGDFVV

SEQ ID NO: 191954 - protein, 964 aa, Zea Mays
MTEEEEDEEYLKEEEDALAGAGGTRLVSQPSCIKGKMRDYQLAGLNWLIRLYENGINGILADEMGLGKTLQTISLLGYLHEFRGITGPHMVVAPKSTLGNWMKEIQRFCPILRAVKFLGNPEERNHIRDDLLQPGKFDVCVTSFEMAIKEKSALRRFSWRYIIIDEAHRIKNENSLLSKTMRIYNTNYRLLITGTPLQNNLHELWALLNFLLPEIFSSAETFDEWFQISGENDQQEVVQQLHKVLRPFLLRRLKSDVEKGLPPKKETILKVGMSQMQKQYYRALLQKDLEVINAGGERKRLLNIAMQLRKCCNHPYLFQGAEPGPPYTTGEHLVENAGKMVLLDKLLPKLKERDSRVLIFSQMTRLLDILEDYLMYRGYQYCRIDGNTGGEDRDASIEAFNKPGSEKFVFLLSTRAGGLGINLATADVVVLYDSDWNPQADLQAQDRAHRIGQKKEVQVFRFCTEIMQTKLQYTIEEKVIERAYKKLALDALVIQQGRLAEQKTVNKDDLLQMVRFGAEMVFSSKDSTITDEDIDRIIAKGEETTAELDAKMKKFTEDAIKFKMDDNAELYDFDDEKDENKVDFKKLVSDNWIEPPRRERKRNYSESDYFKQALRQGAPAKPREPRIPRMPHLHDFQFFNNQRLNELYEKEVRYLMQANQKKDTIDGEDEDQLEPLTAEEQEEKEQLLEEGFASWTRRDFNTFIRACEKYGRNDIKSISSEMEGKTEEEVQRYAKVFKERYKELTDYDRIIKNIERGEARISRKDEIMKAIGKKLDRYKNPWLELKIQYGQNKGKFYNEECDRFMSRTTQELARRCDTLIRLVEKENQEYDEQERQARKEKRLAKNTTPTKRAALRNSEGESAPLSSFKRRRQSLMDDYVGSLSARCSLCNALSPYVLCLVSCARELNASRAGDFVVAVDSDFAIATVATLLIHFFIVALTLIPNYKIRDFNLTLEFDQIYAIK

SEQ ID NO: 191955 - protein, 993 aa, Zea Mays
MAKPMKYDDEEEISSSAEEEDQSDAAGSVSGEEGDDDDEDAAAPPAEEAEGEGQQEEEVDEEEIEAVTTGAGAEDEEDAGAVTAAEGDDESQSTEDDEPVARDKDDDDETDAVVGKREKARLKELQKMKKHKIQEILDTQNAAIDADMNNKGKGRLKYLLQQTEIFAHFAKGSQSNEKKPRGRGRHASKMTEEEEDEEYLKEEEDALAGAGGTRLVSQPSCIKGKMRDYQLAGLNWLIRLYENGINGILADEMGLGKTLQTISLLGYLHEFRGITGPHMVVAPKSTLGNWMKEIQRFCPILRAVKFLGNPEERNHIRDDLLQPGKFDVCVTSFEMAIKEKSALRRFSWRYIIIDEAHRIKNENSLLSKTMRIYNTNYRLLITGTPLQNNLHELWALLNFLLPEIFSSAETFDEWFQISGENDQQEVVQQLHKVLRPFLLRRLKSDVEKGLPPKKETILKVGMSQMQKQYYRALLQKDLEVINAGGERKRLLNIAMQLRKCCNHPYLFQGAEPGPPYTTGEHLVENAGKMVLLDKLLPKLKERDSRVLIFSQMTRLLDILEDYLMYRGYQYCRIDGNTGGEDRDASIEAFNKPGSEKFVFLLSTRAGGLGINLATADVVVLYDSDWNPQADLQAQDRAHRIGQKKEVQVFRFCTEYTIEEKVIERAYKKLALDALVIQQGRLAEQKTVNKDDLLQMVRFGAEMVFSSKDSTITDEDIDRIIAKGEETTAELDAKMKKFTEDAIKFKMDDNAELYDFDDEKDENKVDFKKLVSDNWIEPPRRERKRNYSESDYFKQALRQGAPAKPREPRIPRMPHLHDFQFFNNQRLNELYEKEVRYLMQANQKKDTIDGEDEDQLEPLTAEEQEEKEQLLEEGFASWTRRDFNTFIRACEKYGRNDIKSISSEMEGKTEEEVQRYAKVFKERYKELTDYDRIIKNIERGEARISRKDEIMKAIGKKLDRYKNPWLELKIQYGQNKGKFYNEECDRFMNYPRVG

SEQ ID NO: 191956 - protein, 1095 aa, Zea Mays
MAKPMKYDDEEEISSSAEEEDQSDAAGSVSGEEGDDDDEDAAAPPAEEAEGEGQQEEEVDEEEIEAVTTGAGAEDEEDAGAVTAAEGDDESQSTEDDEPVARDKDDDDETDAVVGKREKARLKELQKMKKHKIQEILDTQNAAIDADMNNKGKGRLKYLLQQTEIFAHFAKGSQSNEKKPRGRGRHASKMTEEEEDEEYLKEEEDALAGAGGTRLVSQPSCIKGKMRDYQLAGLNWLIRLYENGINGILADEMGLGKTLQTISLLGYLHEFRGITGPHMVVAPKSTLGNWMKEIQRFCPILRAVKFLGNPEERNHIRDDLLQPGKFDVCVTSFEMAIKEKSALRRFSWRYIIIDEAHRIKNENSLLSKTMRIYNTNYRLLITGTPLQNNLHELWALLNFLLPEIFSSAETFDEWFQISGENDQQEVVQQLHKVLRPFLLRRLKSDVEKGLPPKKETILKVGMSQMQKQYYRALLQKDLEVINAGGERKRLLNIAMQLRKCCNHPYLFQGAEPGPPYTTGEHLVENAGKMVLLDKLLPKLKERDSRVLIFSQMTRLLDILEDYLMYRGYQYCRIDGNTGGEDRDASIEAFNKPGSEKFVFLLSTRAGGLGINLATADVVVLYDSDWNPQADLQAQDRAHRIGQKKEVQVFRFCTEYTIEEKVIERAYKKLALDALVIQQGRLAEQKTVNKDDLLQMVRFGAEMVFSSKDSTITDEDIDRIIAKGEETTAELDAKMKKFTEDAIKFKMDDNAELYDFDDEKDENKVDFKKLVSDNWIEPPRRERKRNYSESDYFKQALRQGAPAKPREPRIPRMPHLHDFQFFNNQRLNELYEKEVRYLMQANQKKDTIDGEDEAEEQEEKEQLLEEGFASWTRRDFNTFIRACEKYGRNDIKSISSEMEGKTEEEVQRYAKVFKERYKELTDYDRIIKNIERGEARISRKDEIMKAIGKKLDRYKNPWLELKIQYGQNKGKFYNEECDRFMLCMVHKLGYGNWDELKAAFRMSPLFRFDWFVKSRTTQELARRCDTLIRLVEKENQEYDEQERQARKEKRLAKNTTPTKRAALRNSEGESAPLSSFKRRRQSLMDDYVGSGRRKRG

SEQ ID NO: 191957 - protein, 1030 aa, Zea Mays
MAKPMKYDDEEEISSSAEEEDQSDAAGSVSGEEGDDDDEDAAAPPAEEAEGEGQQEEEVDEEEIEAVTTGAGAEDEEDAGAVTAAEGDDESQSTEDDEPVARDKDDDDETDAVVGKREKARLKELQKMKKHKIQEILDTQNAAIDADMNNKGKGRLKYLLQQTEIFAHFAKGSQSNEKKPRGRGRHASKMTEEEEDEEYLKEEEDALAGAGGTRLVSQPSCIKGKMRDYQLAGLNWLIRLYENGINGILADEMGLGKTLQTISLLGYLHEFRGITGPHMVVAPKSTLGNWMKEIQRFCPILRAVKFLGNPEERNHIRDDLLQPGKFDVCVTSFEMAIKEKSALRRFSWRYIIIDEAHRIKNENSLLSKTMRIYNTNYRLLITGTPLQNNLHELWALLNFLLPEIFSSAETFDEWFQISGENDQQEVVQQLHKVLRPFLLRRLKSDVEKGLPPKKETILKVGMSQMQKQYYRALLQKDLEVINAGGERKRLLNIAMQLRKCCNHPYLFQGAEPGPPYTTGEHLVENAGKMVLLDKLLPKLKERDSRVLIFSQMTRLLDILEDYLMYRGYQYCRIDGNTGGEDRDASIEAFNKPGSEKFVFLLSTRAGGLGINLATADVVVLYDSDWNPQADLQAQDRAHRIGQKKEVQVFRFCTEYTIEEKVIERAYKKLALDALVIQQGRLAEQKTVNKDDLLQMVRFGAEMVFSSKDSTITDEDIDRIIAKGEETTAELDAKMKKFTEDAIKFKMDDNAELYDFDDEKDENKVDFKKLVSDNWIEPPRRERKRNYSESDYFKQALRQGAPAKPREPRIPRMPHLHDFQFFNNQRLNELYEKEVRYLMQANQKKDTIDGEDEDQLEPLTAEEQEEKEQLLEEGFASWTRRDFNTFIRACEKYGRNDIKSISSEMEGKTEEEVQRYAKVFKERYKELTDYDRIIKNIERGEARISRKDEIMKAIGKKLDRYKNPWLELKIQYGQNKGKFYNEECDRFMNTTPTKRAALRNSEGESAPLSSFKRRRQSLMDDYVGSGRRKRG

SEQ ID NO: 191958 - protein, 113 aa, Zea Mays
MVHKLGYGNWDELKAAFRMSPLFRFDWFVKSRTTQELARRCDTLIRLVEKENQEYDEQERQARKEKRLAKNTTPTKRAALRNSEGESAPLSSFKRRRQSLMDDYVGSAKERVM

SEQ ID NO: 191959 - protein, 91 aa, Zea Mays
MHRNGLLAANPSRSGAHRRTATDHRPIHRSDGGAARSSGGATPARPMATPRGPESLVLLRLPNPGVDANMLEAKLPWITPRRSLVTGGGGG

SEQ ID NO: 191960 - protein, 124 aa, Zea Mays
MWLVVHELPVLVPGWNWWWWWRHWCLLLSHYYLLSHFLPHVLPFLAHLLAFLPHLRLHILHSIGHLLQHLHLGCNHLTSPGRWRIWRIHLCLLLSNNSPVVGVGRFRSIPSPFLVLTIWVRNTW

SEQ ID NO: 191961 - protein, 201 aa, Zea Mays
MSSSINPNPGTSPLSHICVSSVVICQCHVTTLGPHVPYTRTPNRHTPVKPRGSALIPLITPCPIPGPTILAPGSSLVSYIVPTDQHELFVHTLSSLMRTRENFPVGHPSQIATSQTRLTWRFFRDSLPEKKMHLVGLDTLIIILSLGPGYHHSRGQDITLRDALVHDLLLGTCIYKIVQKCFITWISRALSIYSLIILFKL

SEQ ID NO: 191962 - protein, 228 aa, Zea Mays
MSWALQAKWLWLEKTDPTRPWLGLCIPVQQQVRQFFNASVISVVGNGTNTFFWSDRWLNGQRIQDFAPEVVNMVSSKPFSSRTVAQALHNGQWIRDITNPLSLIGLHQYLQLWDALSGVVLNLEEDRHVWVHSSSGVFSSKSCYSALFMGAIIFQPWKWVWKSWAPPKCKFFIWLAIRINVGLRIDFRGKDYLTRWSVHFVIKSRKLYCTSCAPAVSLDNFGILYFQL

SEQ ID NO: 191963 - protein, 188 aa, Zea Mays
MVQVSLQVAASNWNGKGSFLFTSSTAVYDCSDNGFCSEDSPCVPIGQSTRTDVLLKAENVVLEAGGCVLRLKSDRGPHVYWLSKGTLDVRPDHILNLIHYEDAASLVISIMKKRLRSCIFVGCDNEPLSRLEIMDRVNRSRKFDTQFHGFTGTDGPLGKRMDNSKTRAKLGWQPKYPSFTEFLGLSNL

SEQ ID NO: 191964 - protein, 98 aa, Zea Mays
MAIRQGEVAPPCAEINCHQGCLKHSPMHLLHSPSCKEATSSSLYAHSRLRLEPCGQRQLVLLMLHCCLDLQQPLLNLLERGLHLCEISPYVGPQIPHR

SEQ ID NO: 191965 - protein, 192 aa, Zea Mays
MVQVSLQVAASNWNGKGSFLFTSSTAVYDCSDNGFCSEDSPCVPIGQSTRTDVLLKAENVVLEAGGCVLRLVGLYKSDRGPHVYWLSKGTLDVRPDHILNLIHYEDAASLVISIMKKRLRSCIFVGCDNEPLSRLEIMDRVNRSRKFDTQFHGFTGTDGPLGKRMDNSKTRAKLGWQPKYPSFTEFLGLSNL

SEQ ID NO: 191966 - protein, 70 aa, Zea Mays
MFPLIADRLSVVLLDLTVVFSLAVLLDHSAIDSLSGFNLLVDPRYIHDMPDDFDDLFSNYGLLTSIFGTF

SEQ ID NO: 191967 - protein, 159 aa, Zea Mays
MNPGHQRLGLTAEGYLPPVCARLLLLWQREARQGAVRRGLAAPPRRHQMASLTRAPRPRTRPRREPRHRRIPLCVPWEGPLHPLPPHRQSLGIRSARCVQRRVLLGGGSAHPSRRTRCWAASSTTTARRRRAVAHLRHRSSYVRGLPAWACAHVPLPQG

SEQ ID NO: 191968 - protein, 691 aa, Zea Mays
MAAVGVGAADERWASLCNCVVNFLLEERYHLTALELLQELQEDGRSAHALRLRAFFSDPALFPPDLVARSSSAPPGADPQILLEEKIAAEEKLALTEYDLRLAKEDLSQLKLELQKQKESSPDDSNGLLLGASIREGYTRQQENWDVKISALGPLKDNERKDLNCAVKEYLLLAGYRLAVMTFIEEVPDQDLDVWPNSSACVPDALRRYYYQYLSSTAEAAEEKISILQENETLLKDNERLNAENDSLMKSREGANSQVAALRKSLEAAHKDIKDKEKMIQDLRQSLDVQRKELNDCRAEITALKMYIEGTQSIKQLFVGTSDGVKSHSFANSVGASSLNNEDEDSKGSEAITNKLASAVNITDDTQKDRQVLESSAEGSSVSETPVSFTAVENDSYGTSKEDKSVSNISSNNVCFQSNLHGASMTGKSQGSSDGISMYLSIEKLESPSKQKSSDKIALETIKIVSDALPKIVPYVLINHREELLPLIICAIEKHPDSDVRDSLTHTLFNLIKRPDGEQRRIIMDACVELAKSVGEMRTETELLPQCWEQINHQYEERRLLVAQSCGELAVYVRPEIRDSLILSIVQQLVEDAATVVREAATHNLALLLPMFPNLDKYYKVEELMFQLVCDPSGAVVEVALKELVPAVVRWGDKLDQISRVLLAHILASAQRCPPISGVEESYTNLPLCIS

SEQ ID NO: 191969 - protein, 682 aa, Zea Mays
MLHMHNLSRHTAFFVLIPVFLVMCLQACVELAKSVGEMRTETELLPQCWEQINHQYEERRLLVAQSCGELAVYVRPEIRDSLILSIVQQLVEDAATVVREAATHNLALLLPMFPNLDKYYKVEELMFQLVCDPSGAVVEVALKELVPAVVRWGDKLDQISRVLLAHILASAQRCPPISGVEGTIDSHLRVLGEQERWNIGVLLRMLTELLPFIHQKAIQTCPFASADPTSSTPENFSASCLKSYATGDSEWSAFEWMHTDCLPDLIKLACLLPVKEDNLRTIITKYLLEVSGLYGKDYLEHIMLPVFLVAAGDIDSGDFTYFPLSIQPKVRGLRPKTSTAEKLAIMCVFPLLLSGILGSPSSRQQLEEYLRKVLIQNTKDGSFSMHHTTEIINAVRFLCLFVEHHSVIFNILWEMVASSDTSLKINAAALLRALVPYTDVKIASTHILPALVTLGSDQNLKVKYASIDAFGAVAQHFKNDMVVDKIRIQMDAFLEDGSHEASVSVIRALAVAVPHSTDRLREYLLTKIFKMTCITPVGNDIERRRERANVLCEALRALDATDLPAMGIRDLLLPSIQNLLKDLDALDPAHKEALEIISRERSGGTLESISKVMGAHLGIASSVSSFFGENSLLTKKEGGEEHDPAGPTAPEQNLQAQPESTRFGRIMRSGFGDILRGQSKGQ

SEQ ID NO: 191970 - protein, 483 aa, Zea Mays
MAAVGVGAADERWASLCNCVVNFLLEERYHLTALELLQELQEDGRSAHALRLRAFFSDPALFPPDLVARSSSAPPGADPQILLEEKIAAEEKLALTEYDLRLAKEDLSQLKLELQKQKESSPDDSNGLLLGASIREGYTRQQENWDVKISALGPLKDNERKDLNCAVKEYLLLAGYRLAVMTFIEEVPDQDLDVWPNSSACVPDALRRYYYQYLSSTAEAAEEKISILQENETLLKDNERLNAENDSLMKSREGANSQVAALRKSLEAAHKDIKDKEKMIQDLRQSLDVQRKELNDCRAEITALKMYIEGTQSIKQLFVGTSDGVKSHSFANSVGASSLNNEDEDSKGSEAITNKLASAVNITDDTQKDRQVLESSAEGSSVSETPVSFTAVENDSYGTSKEDKSVSNISSNNVCFQSNLHGASMTGKSQGSSDGISMYLSIEKLESPSKQKSSDKIALETIKIVSDALPKIVPYVLINHREV

SEQ ID NO: 191971 - protein, 323 aa, Zea Mays
MFFDFFEPPNLAEKIHVEEWIPSIQQVVTMASDLAKALQYLQILGVVHRDIKPANILLDKDLHPYLADFGLAMFQKDIKRVSVENWKSSGKPTGGFHKKNMVGTLIYMAPEILRKDIHTEKSDVYSFAISINELLTGVVPYTDLRAEAQRCWDPDPEKRPSFEDIIDELNIVQKHIVSNASVPSSPVSKTQNGTIEVHHYQEALNWFNQGELFVKGSSRSDLKNLWSDCFDQSSEYHPTLSWGSFATCGRRETMEDTHFVLPHVSEENDVFAFGIFDGHRGSAAAEFSVRAVPGFLKQFGQGASPTDALSEAFVRTDIAFREN

SEQ ID NO: 191972 - protein, 192 aa, Zea Mays
MFFDFFEPPNLAEKIHVEEWIPSIQQVVTMASDLAKALQYLQILGVVHRDIKPANILLDKDLHPYLADFGLAMFQKDIKRVSVENWKSSGKPTGGFHKKNMVGTLIYMAPEILRKDIHTEKSDVYSFAISINELLTGVVPYTDLRAEAQQQLFLKDCVQHLPFLNLVPHQLFCHLSSVAGILILKRDHHLKI

SEQ ID NO: 191973 - protein, 186 aa, Zea Mays
MFFDFFEPPNLAEKIHVEEWIPSIQQVVTMASDLAKALQYLQILGVVHRDIKPANILLDKDLHPYLADFGLAMFQKDIKRVSVENWKSSGKPTGGFHKKNMVGTLIYMAPEILRKDIHTEKSDVYSFAISINELLTGVVPYTDLRAEAQDCVQHLPFLNLVPHQLFCHLSSVAGILILKRDHHLKI

SEQ ID NO: 191974 - protein, 182 aa, Zea Mays
MFFDFFEPPNLAEKIHVEEWIPSIQQVVTMASDLAKALQYLQILGVVHRDIKPANILLDKDLHPYLADFGLAMFQKDIKRVSVENWKSSGKPTGGFHKKNMVGTLIYMAPEILRKDIHTEKSDVYSFAISINELLTGVVPYTDLRAEAQVQQPLNFLSEQFLDFSSNLVRVQAQLTLFQKRL

SEQ ID NO: 191975 - protein, 230 aa, Zea Mays
MFFDFFEPPNLAEKIHVEEWIPSIQQVVTMASDLGLRPALALPESGAPPTLLSLIQRCWDPDPEKRPSFEDIIDELNIVQKHIVSNASVPSSPVSKTQNGTIEVHHYQEALNWFNQGELFVKGSSRSDLKNLWSDCFDQSSEYHPTLSWGSFATCGRRETMEDTHFVLPHVSEENDVFAFGIFDGHRGSAAAEFSVRAVPGFLKQFGQGASPTDALSEAFVRTDIAFREN

SEQ ID NO: 191976 - protein, 70 aa, Zea Mays
MEDTHFVLPHVSEENDVFAFGIFDGHRGSAAAEFSVRAVPGFLKQFGQGASPTDALSEAFVRTDIAFREN

SEQ ID NO: 191977 - protein, 79 aa, Zea Mays
MAGWGGGVGDLKEKKRGWFDCLEEKQGVAYKRSKGCLDDKQNMKQSKLFKGRKISRGICRCGEQGEPASGERESEEREK

SEQ ID NO: 191978 - protein, 90 aa, Zea Mays
MIHQEKGLPDPGERRGRQQDQLNDQQECYEVLGARIYGKKHGLDRVCATRHQQQFFLTQQVHKETWVVLAVKLWEFTSCAGATLRLKLKG

SEQ ID NO: 191979 - protein, 136 aa, Zea Mays
MFGPWAMKPEKLVLYNSREGNKLQVVGAFLERQMLNKNRGGALCTGADGPRPRAGRSAAWCEARRCSLHRGGRSARRGPDGPRPGARLGLLPDGRTVRTLGPDGPRVRRGGGRSPAAPGSRSREGPRRGGEILRVV

SEQ ID NO: 191980 - protein, 145 aa, Zea Mays
MSTPALATAAEGATRIILVHGTGHGGWCWYRVATLLRAAGHRVDAPDLAASGIDSRQLRDVPTFEDYTRPLLDALRALPPGERAVLVGHSFGGMSIALAAETFPEKVAAAVFVTAFLPDCTNPRSQVIEKVVARVRLLLLVFQFS

SEQ ID NO: 191981 - protein, 90 aa, Zea Mays
MPSPSQMVACPHHTRTSLMPRCPRGRKSCLRSQKKSDLRSWNRCAARAKTDALRGPALRASARSGSRTRTNAPGLRRQRPTQVPRGPGHQ

SEQ ID NO: 191982 - protein, 173 aa, Zea Mays
MAAPIHARLLPLPLHPNPSPSLHASGTRRVPWPPRHRRRCFATPPSRNGSSSSPEIDWCPVPPDQLPVNEYEALAASLPFSWAAGGLRVYCSRLALTGAAVALFVGLPVAAFGGRGGAGGDALHLALGATGSGILAVTLAVVRMYLGWAYVGNRLLSATVEYEETGWYDGQMG

SEQ ID NO: 191983 - protein, 599 aa, Zea Mays
MQGDIGVARSFDQGATWEFLGIALDEAWHLSYPFVFKYENEIYMMPEGNKKKELRLYRATKFPLEWTLEKVLVNKPLIDASLVQFEGYWWLFASDFTRYGVEKNAELEIWYSNSPLGPWTEHKKNPIYKSDKSLGARNGGRLFIFEGSLYRPGQDCSGTYGRMVKLHKVEKLSKEEYKEVPVNLGIEEPKKGRNAWNGMRYHHMDAQQLASGGWIAVMDGDRVPSGDSTRRSLIGYLAFLLASALVVFVGFMKGAISCYVPPSLWVPLTRRTELSRIFYVHRFNQKVRRYSTSISRYISAAKTKLSEKTWSNVLFFCVVALFGAINVCIAVHFLCGGNGAEEAYTYQGQHSQFTMITMTYEARLWNLKVFIEHYSRCESVREIVVVWNKGNPPSSDAFDSTVPVRIRVEETNSLNNRFRVDPLIKTRAVLELDDDIMMTCTDLEKGFRVWREHPERMVGFYPRMIDGNPMQYRNERYARGKNGYNLILTGAAFMDKEFAFKTYWSEKAREGRDYVHKNFNCEDLLMNFLYANASSTTRTVEYVHPAWAIDTSKLSSVAISRDTQKHYDIRTHCLANFSSIYGPLPQKWEFGMREDRWDK

SEQ ID NO: 191984 - protein, 493 aa, Zea Mays
MACAAYSIRSPLKLAVSNCSAVTMRHVASHCHSIVKTPAMWPSKASATDAATASDERITVLVIGGGGREHALCYALNHSPSCAAVLCAPGNAGIAQSRDATCIPDLDISSSDDVISFCRKRGVGMVVVGPEAPLVAGLANDLVKVGIPTFGPSSEAAALEGSKDFMKKLCDKYNIPTAKYHTFTDAVEAKKYVKNEGAPIVVKADGLAAGKGVVVAMTLDEALEAIDSMLVEGSFGSAGSRVIIEEFLEGEEASFFALVDGENALPLESAQDHKRVGDGDVGPNTGGMGAYSPAPIVTDELKRIVMESIIIPTVKGMAAEGCKFVGVLYAGLMIEKKSGLPKLIEYNVRFGDPECQVLMMRLESDLAQVLLSACKGELSNVSLTWSPEMAMVVVMASQGYPGSYKKGTVIKNVDKAERVSPAVKIFHAGTAVDGDGNLVAVGGRVLGFTAKGKDIEEARARAYGAVDAIEWVEGFCRRDIGWRALRQKQVANQ

SEQ ID NO: 191985 - protein, 345 aa, Zea Mays
MACAAYSIRSPLKLAVRHGSDVLSSNNLCNGFKSSVSYLNSQRWSSNCSAVTMRHVASHCHSIVKTPAMWPSKASATDAATASDERITVLVIGGGGREHALCYALNHSPSCAAVLCAPGNAGIAQSRDATCIPDLDISSSDDVISFCRKRGVGMVVVGPEAPLVAGLANDLVKVGIPTFGPSSEAAALEGSKDFMKKLCDKYNIPTAKVLMMRLESDLAQVLLSACKGELSNVSLTWSPEMAMVVVMASQGYPGSYKKGTVIKNVDKAERVSPAVKIFHAGTAVDGDGNLVAVGGRVLGFTAKGKDIEEARARAYGAVDAIEWVEGFCRRDIGWRALRQKQVANQ

SEQ ID NO: 191986 - protein, 144 aa, Zea Mays
MNTEEFAIMKSPARQQQNSRIDAVASPDRECPGRGNNNNNGGPQTCPDDKKGSSSGSEGSIWPKFAVTLSNREKEEDFLVFRGSKLPQRPKKRAKVIQRTVNFVCPGTWLCDLTLERYEVREKKVSKKRPRGLKAMHDLDSDSE

SEQ ID NO: 191987 - protein, 156 aa, Zea Mays
MGNGINRTRLYLIQSMGNGINRTRLKVGTPSQPDRLGPGYYRVVRRETQICGCRSRSLFSFTLCYYLLKCIAASSRLQRFGRLSAVYVFARKMMMSARSEQINCCCNNPLRAPTSATAENRQRSKPHGNEQQRMVLKFQYGTEAWWTAPAQHVAVK

SEQ ID NO: 191988 - protein, 82 aa, Zea Mays
MEDMIPPFFLPRHSFFSWKKLLWQKGSEMWDFSRRKLHAADVVHQIPVYGPSESQGEEASNPATPNERNGPPIVATDDDEGG

SEQ ID NO: 191989 - protein, 551 aa, Zea Mays
MIVKSRGVKRTCGGMKEMSGMGTEKTSGLGAHIACECFVPWMGLSSRLELNRKSTQSFTDWYELITPGCVVPSAMIYCTHCADYCPSIKDPDKGYICCGTCGKVLDQEVYTDEPTFVKDNTGQSRLAGSILASIESGYSISHQRTLDKGRDEIRQIVNNLHVSGGETVVSKAYRFYELAVDRNFTRGRRTSHVAAACLYIACRQSKKAYLLIDFSDYLQISVYVLGAVFLQLCQVLLLADHPVVQKLVDPSLFIHRFTKCLLGRRDNAVSDTAFSREVSDTALRIVASMKRDWMQTGRKPSGLCGAALYIAALSHGCNYTKADIVSVVHVCEATLTKRLIEFENTDSGSLTALSGDKSSTIGSGGLINDSVPPKDPEEGGENCEGNADPESLSDIDDVEVDWYLHNEEETQYKKIIWEEMNKEYLEEQAAKEALAAELAARGIVVEEGKKKRKRNEDTKSSTPADTPAEATYNMLKRKGLGSKINEGAVGELYKTKDEVESASRKEEMEFDALFGPDNADGETVDDGGYGYGGCGDGGAEAYNGIDDDFDF

SEQ ID NO: 191990 - protein, 309 aa, Zea Mays
MIYCTHCADYCPSIKDPDKGYICCGTCGKVLDQEVYTDEPTFVKDNTGQSRLAGSILASIESGYSISHQRTLDKGRDEIRQIVNNLHVSGGETVVSKAYRFYELAVDRNFTRGRRTSHVAAACLYIACRQSKKAYLLIDFSDYLQISVYVLGAVFLQLCQVLLLADHPVVQKLVDPSLFIHRFTKCLLGRRDNAVSDTAFSREVSDTALRIVASMKRDWMQTGRKPSGLCGAALYIAALSHGCNYTKADIVSVVHVCEATLTKRLIEFENTDSGSLTIEEFLATADEYNEASVSKYSPKSGEILCKHKD

SEQ ID NO: 191991 - protein, 486 aa, Zea Mays
MIYCTHCADYCPSIKDPDKGYICCGTCGKVLDQEVYTDEPTFVKDNTGQSRLAGSILASIESGYSISHQRTLDKGRDEIRQIVNNLHVSGGETVVSKAYRFYELAVDRNFTRGRRTSHVAAACLYIACRQSKKAYLLIDFSDYLQISVYVLGAVFLQLCQVLLLADHPVVQKLVDPSLFIHRFTKCLLGRRDNAVSDTAFSREVSDTALRIVASMKRDWMQTGRKPSGLCGAALYIAALSHGCNYTKADIVSVVHVCEATLTKRLIEFENTDSGSLTFTKLSGGLEGGANPPAFQRAENKRLEAAKRAEEAAAVKEAALEESLCDTQNSEIESTTTPKKALSGDKSSTIGSGGLINDSVPPKDPEEGGENCEGNADPESLSDIDDVEVDWYLHNEEETQYKKIIWEEMNKEYLEVSNTMVTFFHLDQRMLLPAFLFYRNKQPRKLWQLNWQLEGLLWKRERKNGNVTKTPRARRLLTHRQKPHTTC

SEQ ID NO: 191992 - protein, 424 aa, Zea Mays
MIYCTHCADYCPSIKDPDKGYICCGTCGKVLDQEVYTDEPTFVKDNTGQSRLAGSILASIESGYSISHQRTLDKGRDEIRQIVNNLHVSGGETVVSKAYRFYELAVDRNFTRGRRTSHVAAACLYIACRQSKKAYLLIDFSDYLQISVYVLGAVFLQLCQVLLLADHPVVQKLVDPSLFIHRFTKCLLGRRDNAVSDTAFSREVSDTALRIVASMKRDWMQTGRKPSGLCGAALYIAALSHGCNYTKADIVSVVHVCEATLTKRLIEFENTDSGSLTALSGDKSSTIGSGGLINDSVPPKDPEEGGENCEGNADPESLSDIDDVEVDWYLHNEEETQYKKIIWEEMNKEYLEVSNTMVTFFHLDQRMLLPAFLFYRNKQPRKLWQLNWQLEGLLWKRERKNGNVTKTPRARRLLTHRQKPHTTC

SEQ ID NO: 191993 - protein, 285 aa, Zea Mays
MNIMKRLFQNIRLSLGKSFANTRFTKLSGGLEGGANPPAFQRAENKRLEAAKRAEEAAAVKEAALEESLCDTQNSEIESTTTPKKALSGDKSSTIGSGGLINDSVPPKDPEEGGENCEGNADPESLSDIDDVEVDWYLHNEEETQYKKIIWEEMNKEYLEEQAAKEALAAELAARGIVVEEGKKKRKRNEDTKSSTPADTPAEATYNMLKRKGLGSKINEGAVGELYKTKDEVESASRKEEMEFDALFGPDNADGETVDDGGYGYGGCGDGGAEAYNGIDDDFDF

SEQ ID NO: 191994 - protein, 204 aa, Zea Mays
MSLSSVKIGEEVWLTCLSHALTTETEEVMGLLLGDIELSSKVATALVWGASPQMRCERKKDRVELNPELLAAASAQAEKMTATIKRTTRVIGWYHSHPHITVLPSHVDVRTQAMFQLLDTGFVGLIFSCFSEDAQKVGKIQVTAFQSEGGQQHPLPLAIDPVIDLDSSCSSSDNVSASHSASVEGMEQDTGDSRVSKNNKWCRV

SEQ ID NO: 191995 - protein, 225 aa, Zea Mays
MPLPRPHYRDRGGHGAPPRRHRAFQQGRHSPGMGGVAADEVRAEEGPRRAQPRASRRRIRASRENDGHHQEDYEGDRMVPLAPTYHRSTVPSMFQLLDTGFVGLIFSCFSEDAQKVGKIQVTAFQSEGGQQHPLPLAIDPVIDLDSSCSSSDNVSASHSASVEGMEQDTGDSRVSKNNKAWRRSMDSTPIMTQIIPQIMNPEKAYSFRTILITHKKRMLIHMIQI

SEQ ID NO: 191996 - protein, 215 aa, Zea Mays
MLFTMLRDVPFRLRVVSLCMSPVNDSFMSGSLDHSVRIWDLRVNACQGILRLRGRPSVAYDQQGLVFAVAMEGGAINLFDSRSYDKGPFDTFLVGGDTAEVSDIKFSNDGKSMLLTTTNNHIYVLDAYVGDKRCGFSLEPSPNVTNEAAFTPDGQYVISGSGDGTLHAWNINTVQEVACWNSRIGPITALKWAPRRAMFATASTALTFWIPNRSN

SEQ ID NO: 191997 - protein, 316 aa, Zea Mays
MAAALPQLDDEIVHGMAIGAVFTDYTGKINCLDFHRTEDLMITSSEDDSIRLYNITSATLLKTTYHRKHGADRVCFSHHPSSILCSSRYNLESIESLRYLSLYDNRCLRYFKGHKDRVVSLCMSPVNDSFMSGSLDHSVRIWDLRVNACQGILRLRGRPSVAYDQQGLVFAVAMEGGAINLFDSRSYDKGPFDTFLVGGDTAEVSDIKFSNDGKSMLLTTTNNHIYVLDAYVGDKRCGFSLEPSPNVTNEAAFTPDGQYVISGDGTLHAWNINTVQEVACWNSRIGPITALKWAPRRAMFATASTALTFWIPNRSN

SEQ ID NO: 191998 - protein, 97 aa, Zea Mays
MDTSLGRRARPRLSSLFVVVLRRRPTLARRPRRSSPLEHLCPRPRHRLELGAPLSTSLDRLIHRRPELHSLSAPERKKQRGEEDQNTFEDDPQDTFE

SEQ ID NO: 191999 - protein, 253 aa, Zea Mays
MPPGKKGPRVPRCHADTEPTPTDYEKQRAITIMKNNQMMQRLGIRQLQSMMASIPSGRMNDNAPHESGSLYDGDDIEDSEDEMVSKESLVDKSVASHIPNNGAEISSKNTRASKRVVAPGVQEQPIRVTRRRSATINQESNQNIMAGILSDSCDATNQDCTQRISTVVQPSSPIETESEDPTGDQELVPRQRSMGRQLESLSRGLGIKIPIQIREGKRRPEAPIQAAKFASEGGIVLRQHMPIFSHWKEYKKK

SEQ ID NO: 192000 - protein, 251 aa, Zea Mays
MPPGKKGPRVPRCHAEPTPTDYEKQRAITIMKNNQMMQRLGIRQLQSMMASIPSGRMNDNAPHESGSLYDGDDIEDSEDEMVSKESLVDKSVASHIPNNGAEISSKNTRASKRVVAPGVQEQPIRVTRRRSATINQESNQNIMAGILSDSCDATNQDCTQRISTVVQPSSPIETESEDPTGDQELVPRQRSMGRQLESLSRGLGIKIPIQIREGKRRPEAPIQAAKFASEGGIVLRQHMPIFSHWKEYKKK

SEQ ID NO: 192001 - protein, 556 aa, Zea Mays
MASMQSWRKAYGAIKDTTTVSIANLNSDFKDLDVAIVKATNHVECPPKERHLRRVVAATSITRPRADVAYCIHALARRLAKTRNWIVALKALVVIHRLLREGDPTFREELLNFTQRGRILQLSNFKDDSSPIAWDCSAWVRTYGLYLEERLECFRVLKYDVEAERLSKQGQGPEKGHSRTRELDSQDLLEQLPALQQLLYRLVGCRPEGAANNNYLVQYALALVLKESFKIYCAINDGIINLVDKFFEMPRHDALKALEIYRRAGQQAGNLSDFYENCRGLELARNFQFPTLREPPQTFLATMEDYVKEAPRMVPVREPLELPERLLLTYKPEESEEILEPAPVEEEKVPVEEPVLVPPVTEVVSPPPKAEGLDDTNPAVSAIEESNALALAIVPTDGASTTGNTAFQDKGFDPTGWELALVTAPSNTTSSTSVGQLGGGLDKLILESLYDDGAYRQRQQQQLYGSAAPNPFMANDPFAMSNQVAPPPSVQMAAMSQQHQQIPTMMQPNPFGPPMHPQVSMAPATNNPFLDAGFGAFPAANNGHQQHNPFGSAQLL

SEQ ID NO: 192002 - protein, 378 aa, Zea Mays
MASMQSWRKAYGAIKDTTTVSIANLNSDFKDLDVAIVKATNHVECPPKERHLRRVVAATSITRPRADVAYCIHALARRLAKTRNWIVALKALVVIHRLLREGDPTFREELLNFTQRGRILQLSNFKDDSSPIAWDCSAWVRTYGLYLEERLECFRVLKYDVEAERLSKQGQGPEKGHSRTRELDSQDLLEQLPALQQLLYRLVGCRPEGAANNNYLVQYALALVLKESFKIYCAINDGIINLVDKFFEMPRHDALKALEIYRRAGQQAGNLSDFYENCRGLELARNFQFPTLREPPQTFLATMEDYVKEAPRMVPVREPLELPERLLLTYKPEESEEILEPAPVEEEKVPVEEPVLVPPVTEVVSPPPKAEVPDTGLR

SEQ ID NO: 192003 - protein, 319 aa, Zea Mays
MMHLKLLKSTEGLANRLFDTFQAGNLSDFYENCRGLELARNFQFPTLREPPQTFLATMEDYVKEAPRMVPVREPLELPERLLLTYKPEESEEILEPAPVEEEKVPVEEPVLVPPVTEVVSPPPKAEVPDTGDLLGLDDTNPAVSAIEESNALALAIVPTDGASTTGNTAFQDKGFDPTGWELALVTAPSNTTSSTSVGQLGGGLDKLILESLYDDGAYRQRQQQQLYGSAAPNPFMANDPFAMSNQVAPPPSVQMAAMSQQHQQIPTMMQPNPFGPPMHPQVSMAPATNNPFLDAGFGAFPAANNGHQQHNPFGSAQLL

SEQ ID NO: 192004 - protein, 166 aa, Zea Mays
MESDAEEEAAATPAAAATPGAGRLKGNPELTVDADMREMAKTAAWSVSSCKAGNGVAALRDDNLDTYWQSDGAQPHLVNIQFQKKVQLQLVVLYVDFKLDESYTPSKISIRAGDGFHNLKEIRTVELAKPVGWVHISLSGIDPRNPVPHQPFHFTSREFITYSTIR

SEQ ID NO: 192005 - protein, 71 aa, Zea Mays
MNLQQLCKQRIPMYPHAYQNESPMYRGMAAKKKNPAMDLVEEQKCPTNFVFISLNVASYSPIHITWLPHYI

SEQ ID NO: 192006 - protein, 133 aa, Zea Mays
MPPGHPAEIASFLPRTATSASKAVAVSASSLAANEERLREEFVRESRKLPPKQQSQTCDSNVITPRTEFMAVLSVALECYIHLRLNYDHEWKQNKVILSDANVPGERDLSGFNPNPLPVWPGRISDHASFADT

SEQ ID NO: 192007 - protein, 380 aa, Zea Mays
MAVPAPLASGAAVLLLLVSLAPVVADEAARYNPGACRGVLLPLRRHRRRGTAYAKSYCGYPGMGVACEGGRATLRLGADNYTVLAIDYSNHTVTVAGAASGDDHCPRVARNVTVPPGTWLSLSDTANEDLVFWFDCVFTAETPPPRADVPPPISCSGFRSPSGATSFVVVARPGVDEWEWPRACKKPVVVPVLKDQLLNPDADYLSRLNGDGYGQLLKLGFQLTWDPSAGPCYFCENSGGQCSYNQVGEFIGCLCSDGRVRSTDCGSKKNKKAIAIGTSIAAGVLSLLLVVMACLYIRKRRQYKVTSSSRLLKPTASGGTPRSRGSTDMESGSVRSLQTHHFTYEELEEATDSFSGTMEIGDGGFGTVYKVCCHAILRWI

SEQ ID NO: 192008 - protein, 496 aa, Zea Mays
MSDFVGSRYTKQEDFHVLLSKKDPGEPPEHKHVLWMAHWTKASSNNGSSNPLEGTTKGTTTKDSETLPYEFTESTVAKRLMVGVSHGSASMQHDRQFNSSVWGMARHISNELGPKNSEHVDGSFEKFVKKDAVNLRARAVVSETYSVHKLSELPLDFQHLGNSDDPSPDWSHFPMFEINRKIDSILNRKRRPAEGFASHLEDPAGLNSDPSGPKLKGQLLDTVSCSCSKDDTNSADCLIDEQHTSHYFANSKHELPSVSNEKKFKFAGNNHNRILASASHKHESVAEAMFCAPVLGSELQNEPITISNIGKKDGENFHEMYNCNSKAVPCSLLAHEHHRHLKTQRTESAGNLKVCTLPDQQTANELADKSNGDLLTYGPKPKKGSCNRRSLYLFEKLTIPSKSQSAYPKNSASSGKSSGFGVCMYGTNIGSQLFGAQNQSSSKTETLHSDALIGSKSSAGQRLPSPSPSPSPRRSEKRAASSSVVQHQAGRRISIQ

SEQ ID NO: 192009 - protein, 544 aa, Zea Mays
MSDFVGSRYTKQEDFHVLLSKKDPGEPPEHKHVLWMAHWTKASSNNGSSNPLEGTTKGTTTKDSETLPYEFTESTVAKRLMVGVSHGSASMQHDRQFNSSVWGMARHISNELGPKNSEHVDGSFEKFVKKDAVNLRARAVVSETYSVHKLSELPLDFQHLGNSDDPSPDWSHFPMFEINRKIDSILNRKRRSAPLNLNASASHVLALSSQEYMMHSHQIADENLDMCRPAEGFASHLEDPAGLNSDPSGPKLKGQLLDTVSCSCSKDDTNSADCLIDEQHTSHYFANSKHELPSVSNEKKFKFAGNNHNRILASASHKHESVAEAMFCAPVLGSELQNEPITISNIGKKDGENFHEMYNCNSKAVPCSLLAHEHHRHLKTQRTESAGNLKVCTLPDQQTANELADKSNGDLLTYGPKPKKGSCNRRSLYLFEKLTIPSKSQSAYPKNSASSGKSSGFGVCMYGTNIGSQLFGAQNQSSSKTETLHSDALIGSKSSAGERSSIFIIQCQLRVWFKYGCLCATYMLTEQRHWNVSSNTYRVFFFFC

SEQ ID NO: 192010 - protein, 717 aa, Zea Mays
MSDFVGSRYTKQEDFHVLLSKKDPGEPPEHKHVLWMAHWTKASSNNGSSNPLEGTTKGTTTKDSETLPYEFTESTVAKRLMVGVSHGSASMQHDRQFNSSVWGMARHISNELGPKNSEHVDGSFEKFVKKDAVNLRARAVVSETYSVHKLSELPLDFQHLGNSDDPSPDWSHFPMFEINRKIDSILNRKRRPAEGFASHLEDPAGLNSDPSGPKLKGQLLDTVSCSCSKDDTNSADCLIDEQHTSHYFANSKHELPSVSNEKKFKFAGNNHNRILASASHKHESVAEAMFCAPVLGSELQNEPITISNIGKKDGENFHEMYNCNSKAVPCSLLAHEHHRHLKTQRTESAGNLKVCTLPDQQTANELADKSNGDLLTYGPKPKKGSCNRRSLYLFEKLTIPSKSQSAYPKNSASSGKSSGFGVCMYGTNIGSQLFGAQNQSSSKTETLHSDALIGSKSSAGIASLSAQKDNGCPAPAPAPAPDEAKSEQLAAPSSNTKQGGESAYSKEDGSHNLNEGHDVSSKAAIGSKQPCMPGAGITNLDLILSQMSRMRNQIPSGGVTQPPIGAEPSDRWLKRLQLGVPDPDVLGSKTKRPKVGDSPPPPRQINRSFDVALPCNPGKQEEQSLNGGGKVQGRAPPIPEKSVNRWIGRWCQGGTPVFREGPGQGRQATKPAGRLSEELEGQFFPSTAAMAMMGRAMHKLRPCEQQQKGPFVVWKID

SEQ ID NO: 192011 - protein, 149 aa, Zea Mays
MLWSSIATLLLHIPLCWLLVFKTSMGYIGASLAISLSYWLNVMMLAAYIRYSDSCKETRSPPTVEAFKGVSVFLRLALPSALMLCFEWWSFEILILVSGILPNPELQTSVLSICLTTITLMYTIPYGLGAAASTRVANELGGGNPEGAR

SEQ ID NO: 192012 - protein, 325 aa, Zea Mays
MEVRVPLLPQHILRNGDGREKKCGVRRWRELLAREAGKVGCVALPMAAVSVSQYAVQVASNMMVGPLPGVLPLSASAIATSLTTVSGFSLLIGMASGLETLCGQAYGAKQYDKLGMHTYRAIVTLIAGKLLILIGQDPLISREAGRYIVWLIPGLYAYAISQPLTKFLQSQSLIIPMLWSSIATLLLHIPLCWLLVFKTSMGYIGASLAISLSYWLNVMMLAAYIRYSDSCKETRSPPTVEAFKGVSVFLRLALPSALMLCFEWWSFEILILVSGILPNPELQTSVLSICLTTITLMYTIPYGLGAAASTRVANELGGGNPEGAR

SEQ ID NO: 192013 - protein, 307 aa, Zea Mays
MEAKQRPRHGEERRPPATDNGGGGGEEYDPWTAWLYKPHTISVLLVGACLLIWASGALDPEGAAAHSSLTSIKRGVWAMIAAFLAYCTLQAPSTILIRPHPAVWRLVHGLAVVYLVALTFLLFQNRDDARQFMKHLHPDLGVELPERSYGADCRLYVPENPKNKFINIYETLFDEFVVAHILGWFGKAVMIRNQLLLWVLSIGFELMELTFRHMLPNFNECWWDSIILDILICNWFGIWAGMHTVRYFDGKTYEWVGLSRQRSIMGEKIAEPVHPCSMGQGSVASFHGATAVHPSSVPLCCLHDRGA

SEQ ID NO: 192014 - protein, 423 aa, Zea Mays
MEAKQRPRHGEERRPPATDNGGGGGEEYDPWTAWLYKPHTISVLLVGACLLIWASGALDPEGAAAHSSLTSIKRGVWAMIAAFLAYCTLQAPSTILIRPHPAVWRLVHGLAVVYLVALTFLLFQNRDDARQFMKHLHPDLGVELPERSYGADCRLYVPENPKNKFINIYETLFDEFVVAHILGWFGKAVMIRNQLLLWVLSIGFELMELTFRHMLPNFNECWWDSIILDILICNWFGIWAGMHTVRYFDGKTYEWVGLSRQRSIMGKVKRSLSQFTPAQWDKDQWHPFMGPLRFIQVLFLCVVFMTVELNTFFLKFCLWIPPRNPLVVYRLILWWLIAIPTIREYNSYLQDSKPAKKVGAFCWLSLAICIVELLICMKFGHGLFHDPMPTWLIIFWSLVGIALVVFLLSWSWRSHRRFRRKRL

SEQ ID NO: 192015 - protein, 291 aa, Zea Mays
MKHLHPDLGVELPERSYGADCRLYVPENPKNKFINIYETLFDEFVVAHILGWFGKAVMIRNQLLLWVLSIGFELMELTFRHMLPNFNECWWDSIILDILICNWFGIWAGMHTVRYFDGKTYEWVGLSRQRSIMGKVKRSLSQFTPAQWDKDQWHPFMGPLRFIQVLFLCVVFMTVELNTFFLKFCLWIPPRNPLVVYRLILWWLIAIPTIREYNSYLQDSKPAKKVGAFCWLSLAICIVELLICMKFGHGLFHDPMPTWLIIFWSLVGIALVVFLLSWSWRSHRRFRRKRL

SEQ ID NO: 192016 - protein, 136 aa, Zea Mays
MAFFPVQVAQLPALARTPLLPPCSTVPSPPMESCRVRPAHVPARLCPAFLSWSPSYLSRGSWFSMAPSLSSRPSSCASPCFSLSWLSLLCSHGGRALWCRVSLLARALPSGSTCARPSVPARIRPCARAARARIGP

SEQ ID NO: 192017 - protein, 116 aa, Zea Mays
MWNNDHIVSLIAQNRQVIMSLVVPALEQNIQNHWNQAVLNLAVNVKKMFSEMDGDHFSSCLARYKEEEERLVSLEAKRKLTWEKLESAAAFQPVTGQTAVLVGHQPSANMIANLIF

SEQ ID NO: 192018 - protein, 157 aa, Zea Mays
MASRAARKPNASIRVACHLAAETPRGCKNSVIILHVPFGPVSAARENFWGQLLGRGRRRGRPLRGDSQGGREPRRHEPPRARRRAQRSGVGSGGAAEDWLLVVAGGNNAGCRADRAASTADLAIPGGTKGFFINKWSPKEELKHQDGVCFYILPLRI

SEQ ID NO: 192019 - protein, 172 aa, Zea Mays
MASRAARKPNASIRVACHLAAETPRGCKNSVIILHVPFGPVSAARENFWGQLLGRGRRRGRPLRGDSQGGREPRRHEPPRARRRAQRSGVGSGGAAEDWLLVVAGGNNAGCRADRAASTADLAIPGEEKRADLCLLITGGDLQCYLHVCVACRSSNSRIFATPCVRCVLRMD

SEQ ID NO: 192020 - protein, 219 aa, Zea Mays
MGYPSYCRPNIWPKDHLPELEIAFKGLGKLMLEVGLMLAHHCDRYVIQRGVGQYIGESLEKTLARSRCPKGRLLYYFPKSFSKQDEVSSWCGWHTDYGFLTGLTCGLFTRKSEEVPCPDIGTGLYVRTRDNQVVKVTLVDDELVYQIGETAEILSRGHLCATPHCVKAPSSEDASDVGRSTFVLFIQPNCAFHQPGHLRTASTPKESWRVLAARAWNKP

SEQ ID NO: 192021 - protein, 160 aa, Zea Mays
MLEVGLMLAHHCDRYVIQRGVGQYIGESLEKTLARSRCPKGRLLYYFPKSFSKQDEVSSWCGWHTDYGFLTGLTCGLFTRKSEEVPCPDIGTGLYVRTRDNQVVKVTLVDDELVYQIGETAEILSRGHLCATPHCVKAPSSEDASDVGRSTFVLFIQPNW

SEQ ID NO: 192022 - protein, 75 aa, Zea Mays
MHGTPMGWFGSDLHVACSRENQRRSPVLILELGCMFGLVIIKSSRSHLWMMSWSTKLGRLLKYYQEGIYVQPHTV

SEQ ID NO: 192023 - protein, 185 aa, Zea Mays
MRCRRDCASASPQRRQAGGKIPRRSSSPAADNLMPPPSAAPYARGSNLRYATPRPPRSGASDAHHGRGALPNPLSNRSTGASRAWRASTATPTDHRPTAAGRRACGGSNAARRRRRRRFGDSEGCVSTATRSRRLTLSRWVKGCQKEQEEGGFSRKKTILFRVNHSGAVLYSRRFVYLGSDETMS

SEQ ID NO: 192024 - protein, 318 aa, Zea Mays
MRCRRDCASASPQRRQAGGKIPRRSSSPAADNLMPPPSAAPYARGSNLRYATPRPPRSGASDAHHGRGALPNPLRSAEDCAGACAGAGEKFLAVAEAAARAQKQRAVSPHKVGLGVPDPKQQQNQWGSSGSGHQQQAGAAAGASSKPAAKLEVPRIYTTLSRKEKEEDFMAMKGTKLPQRPKRRPKIIEKTVSAICPGVWLTDATRSSNRSTGASRAWRASTATPTDHRPTAAGRRACGGSNAARRRRRRRFGDSEGCVSTATRSRRLTLSRWVKGCQKEQEEGGFSRKKTILFRVNHSGAVLYSRRFVYLGSDETMS

SEQ ID NO: 192025 - protein, 143 aa, Zea Mays
MIQIAASQTKIYMVLQLVNGGKLFDGITLGYVIGGNNMRSDANHLTEGINILIATLDRLLDHLQNTGSFKYKELKSTKKVSRRYPKIEKSQATRKRRRAFFKIKIMSALPFLMDASRDYTKMIFRGFREPCKIPLVYFKIGVQ

SEQ ID NO: 192026 - protein, 167 aa, Zea Mays
MTALSTYLGWVAPNLDVCIDEGVLPDQKISSEKQVDQKVSISFDSREEISADSTKTAHELKSKIVVLPVKCDTHDNIVEQNSSCKKRDLEDNNTTDVSTESNDEGLNPKQLPFHEVAQDYQEVDSVISESNENQDRLFTGDATHQVSSNDCYEAGISIASEASNLSF

SEQ ID NO: 192027 - protein, 509 aa, Zea Mays
MSSVGRSNGTRAANGAAAISTSTTEAGSADARFHSQLLHQDRKGGKRIVPAARTSDGNGSNTRGNGLQSGANSNQNLPMNLSLLAPPSSPASFSNSALPSTAQSPNCFLSVSANSPGGPTSNMFAVGPYANEPQLVSPPVFSTYTTEPSTAPLTPPPELAHATTPSSPDVPYARFLSSSMGIKTASKDHNMPFLSTTYSGGSGLQTSYPLYPESPCSSLISPASVTPRTGLSSPIPEQEVPPAHWKTSRSACDTPYFRASPIPEQETTAQWKTSRSACDTPYARTSPTNIFGLDSSTPRNYMLDNNFFRPAASAQFYLDQAQQTFSHNGGRVSVSREKQGADEIEAYRASFGFSADEIVQSQSYVGIPDAVDESFSISPFGNNTPATEICPFSDLPNEVDKSCAYAKDDTSPKKSANQLSTDSPNKVLRLDVFKGTKGGHQSEDECIRKDGHLFRKTADEISLKPIEVRKKSLPGHSCSDAEIEYRRTRSLRDANGVLSRRSALARQLH

SEQ ID NO: 192028 - protein, 431 aa, Zea Mays
MNLSLLAPPSSPASFSNSALPSTAQSPNCFLSVSANSPGGPTSNMFAVGPYANEPQLVSPPVFSTYTTEPSTAPLTPPPELAHATTPSSPDVPYARFLSSSMGIKTASKDHNMPFLSTTYSGGSGLQTSYPLYPESPCSSLISPASVTPRTGLSSPIPEQEVPPAHWKTSRSACDTPYFRASPIPEQETTAQWKTSRSACDTPYARTSPTNIFGLDSSTPRNYMLDNNFFRPAASAQFYLDQAQQTFSHNGGRVSVSREKQGADEIEAYRASFGFSADEIVQSQSYVGIPDAVDESFSISPFGNNTPATEICPFSDLPNEVDKSCAYAKDDTSPKKSANQLSTDSPNKVLRLDVFKGTKGGHQSEDECIRKDGHLFRKTADEISLKPIEVRKKSLPGHSCSDAEIEYRRTRSLRDANGVLSRRSALARQLH

SEQ ID NO: 192029 - protein, 120 aa, Zea Mays
MRYFNVMILGPAQSPYEGGVFKLELFLPEEYPMAAPKVRFLTKIYHPNIDKLGRICLDILKDKWSPALQIRTVLLSIQALLSAPNPDDPLSDNIAKHWKSNEAEAVETAKEWTRLYTSGA

SEQ ID NO: 192030 - protein, 80 aa, Zea Mays
MANSNLPRRIIKETQRLLSEPAPGISASPSEENMRYFNVMILGPAQSPYEGGVFKLELFLPEEYPMAAPKWLDRSTGLTQ

SEQ ID NO: 192031 - protein, 127 aa, Zea Mays
MANSNLPRRIIKETQRLLSEPAPGISASPSEENMRYFNVMILGPAQSPYEGGVFKLELFLPEEYPMAAPKVRFLTKIYHPNIDKLGRICLDILKDKWSPALQIRTVLLSIQFSACICSSRVSTYLYG

SEQ ID NO: 192032 - protein, 139 aa, Zea Mays
MANSNLPRRIIKETQRLLSEPAPGISASPSEENMRYFNVMILGPAQSPYEGGVFKLELFLPEEYPMAAPKLGRICLDILKDKWSPALQIRTVLLSIQALLSAPNPDDPLSDNIAKHWKSNEAEAVETAKEWTRLYTSGA

SEQ ID NO: 192033 - protein, 85 aa, Zea Mays
MTAKCCSRCNNTSIVWGRLNTPLAWCAQICEMLQWGKKQKAPIMLCTCGCSSVRCSAHEHQSRCCFVRSYPTISCLSPLFHVLWL

SEQ ID NO: 192034 - protein, 474 aa, Zea Mays
MSFVNFHEQEKISKEIVTHAIESCMKKQADNLLNSLDVISGRLSQLELYCYRLERSIGELRSDVMDYHNEANLNFRCVEKQVKEKSVQAVQEKQELAETQKEMTKLQIVHEDSAQKSEGTAPSVFMNRENEVALVPLHQVNAVQSPPVQFQSCSGLILQQLMPVQDQQRSNQTAVYCMRGQSHLEHRQAQMFEAAGQSLQTHTRKTQPPTVVEVSQVTSQAPEFYPHPQHQWQHQTGQQVFSQARQPQPHVLQQQYSNIQQGPAQMVQLQTSSPHAHSTPQVTVVYPPYGPHQSACGNAEARSGGIVVPPSYSTISSSHRKHHEAAPVYVQSNTVSVPLAEQHQQLHSLGNGSFVPQPSKVSPCGLASYTVQGNAQTYSPAYGSPSSNPATIVAVLNQQAHGSSPMVLHHLGPQSVLNHPIDIAEKVTRMGYSKDQVEGLALRMVAAGQPADHNPLHDRLSSVSHGVAPHAWSG

SEQ ID NO: 192035 - protein, 1716 aa, Zea Mays
MESSDDGGSGPAAGSPGPPSAPAAVGGASSAPGASGSGGKPPVKRVMKTPYQLEVLERTYAEDSYPNETKRAELSVQLNLTDRQLQMWFCHRRLKDRKPPAKRQLRDEEVSVPVIGPPPPVLPPPLPPSEMMVGTVGTYGEQLLPYSRRGSGRLSAAPRLSVPEIGRRYYEPPQVMLPHMAPVHLMQAEHRVIDSVEALIGEPLRDDGPVLGIEFDPLPPGAFGAPIVPEQPRQPFRSYETKMFSGPKTMKAVHEYQFLPEQPSDTYERASQSHFYDSSAEASNLRVAPLSTGSRFLHGVEQAPSYTFHSQSSGSSHLTQRGSGRSPIASALTDHEGALSNINASTTPIHGQLGIPQVAGFESPLASPERLGYHDEDTYHMDRKRKHNEEAKIAREVEAHEKRIRKELEKQDLLNRKREEQMRREMERHDRERRKEEERLMRERQREEEKFQREQRREHKRMEKFMQKQSIRAEKLRQREELRREKEAARQKAANERATARRIARESMELMEDERLELLELASRSKGLPSMVSLDSDTLQQLDSFRGMLGKFPPETVRLKVPFSIKPWAASEDIIGNLLMAWKFFVTFGDVLGLPSFTLDEFVQALHDYDSRLLGELHVSLLKSVIKDIEDVARTPSVALGVNQSSSANPGGGHPQIVEGAYAWGINILNWQRHLNFLTWPEILRQFGLCAGFGPQLKKSDAEIVHHRDDNEGRNGVDVISILRNGSAAVKAAALMKERGYTNRRRSRHRLTPGTVKFAAFHVLSLEGSKGLTILEVAEKIQKSGLRDLTTSKTPEASISAALSRDTKLFERTAPSTYCVKTPYRKDPDDSEAVLAAAREKIRAFQNALPECEEVEKDVDEAERDDDSECDDADDDADGDDVNIEDKDAKSPLVGAQYGAQITVVGDIKKESNIVMNTSVPPSIQIKSSASVPFHTLDSKASSSTDPEVGDDAKDIEIDESNQGESWVQGLAEGDYCDLSVDERLNALVALIAVANEGNSIRAILEERLEAASALKKQLWAEAQLDKRRIRDDFTSKMQYDSYLYVYRSLPLGQDRRRNRYWQFSASSSSYDPGSGRIFFESRDGYWRVIDTSEAFEALVASLDTRGIRESHLHSILQSIEPTFKEAVERKRCANLEHPTGRTSENGSNESPNCNNEFGSPCSTLSGVASDNLMAHSDIFKIEVGRNEAEKNSISKRASVFLKWIWRECYSHQSTYAMRYGKKRCPELIHSCDYCYQIYLAEERHCSCHKTFKHIHNFLEHSSQCEEKQRTDPNWKMQTVDLSVPVGLRLLRLLLATIEALVPAEALLPFWTDGYRKSWGAKLYSASSAEEVLQMLSVLESAIKRDYLSSNFETTTELLNSSTQDFATQNSAGGSGSATALPWVPDTTAAVALRLLDLDASISYTLHPKLGSNKEQESGDFMKLPPRYPSMNKGKQEIEQFRPIGFDQQDGTLLPNSNGRRGRGRGGRGGSRGGRSRGHGGRVPRGIGSSSRIQFRDDNSMLYGRAPRKNARGGRGRGRGRGRGLRTVRPRQPSELSARSIPKANLLGSFSMLSKTNHTGTTHSPESSGAEEWAFERREYVKDDENNLVSQSDESEENVEPMNEEYGEHISGYPRDNSDSRPVQMMGDGSDDNDEDAEGDEGEEDGEDYEAEDPGDEDDDVEMDGDDDVEVDEDDDIEMDGDDDIEDDDDDDGGDGAANGDEDGGGTSSYSSEYSE

SEQ ID NO: 192036 - protein, 812 aa, Zea Mays
MDRKRKHNEEAKIAREVEAHEKRIRKELEKQDLLNRKREEQMRREMERHDRERRKEEERLMRERQREEEKFQREQRREHKRMEKFMQKQSIRAEKLRQREELRREKEAARQKAANERATARRIARESMELMEDERLELLELASRSKGLPSMVSLDSDTLQQLDSFRGMLGKFPPETVRLKVPFSIKPWAASEDIIGNLLMAWKFFVTFGDVLGLPSFTLDEFVQALHDYDSRLLGELHVSLLKSVIKDIEDVARTPSVALGVNQSSSANPGGGHPQIVEGAYAWGINILNWQRHLNFLTWPEILRQFGLCAGFGPQLKKSDAEIVHHRDDNEGRNGVDVISILRNGSAAVKAAALMKERGYTNRRRSRHRLTPGTVKFAAFHVLSLEGSKGLTILEVAEKIQKSGLRDLTTSKTPEASISAALSRDTKLFERTAPSTYCVKTPYRKDPDDSEAVLAAAREKIRAFQNALPECEEVEKDVDEAERDDDSECDDADDDADGDDVNIEDKDAKSPLVGAQYGAQITVVGDIKKESNIVMNTSVPPSIQIKSSASVPFHTLDSKASSSTDPEVGDDAKDIEIDESNQGESWVQGLAEGDYCDLSVDERLNALVALIAVANEGNSIRAILEERLEAASALKKQLWAEAQLDKRRIRDDFTSKMQYDSYNQLTTGDVYHQRNGASRESSTNAESLSVQQYASSEKTRSQLKSFIGHKAEQLYVYRSLPLGQDRRRNRYWQFSASSSSYDPGSGRIFFESRDGYWRVIDTSEAFEALVASLDTRGIRESHLHSILQSIEPTFKEAVERKRYFQDRGWAQ

SEQ ID NO: 192037 - protein, 629 aa, Zea Mays
MDRKRKHNEEAKIAREVEAHEKRIRKELEKQDLLNRKREEQMRREMERHDRERRKEEERLMRERQREEEKFQREQRREHKRMEKFMQKQSIRAEKLRQREELRREKEAARQKAANERATARRIARESMELMEDERLELLELASRSKGLPSMVSLDSDTLQQLDSFRGMLGKFPPETVRLKVPFSIKPWAASEDIIGNLLMAWKFFVTFGDVLGLPSFTLDEFVQALHDYDSRLLGELHVSLLKSVIKDIEDVARTPSVALGVNQSSSANPGGGHPQIVEGAYAWGINILNWQRHLNFLTWPEILRQFGLCAGFGPQLKKSDAEIVHHRDDNEGRNGVDVISILRNGSAAVKAAALMKERGYTNRRRSRHRLTPGTVKFAAFHVLSLEGSKGLTILEVAEKIQKSGLRDLTTSKTPEASISAALSRDTKLFERTAPSTYCVKTPYRKDPDDSEAVLAAAREKIRAFQNALPECEEVEKDVDEAERDDDSECDDADDDADGDDVNIEDKDAKSPLVGAQYGAQITVVGDIKKESNIVMNTSVPPSIQIKSSASVPFHTLDSKASSSTDPEVGDDAKDIEIDESNQGESWVQGLAEGDYCDLSVDERLNALVALIAVANEGNSIRAILERVL

SEQ ID NO: 192038 - protein, 1433 aa, Zea Mays
MESSDDGGSGPAAGSPGPPSAPAAVGGASSAPGASGSGGKPPVKRVMKTPYQLEVLERTYAEDSYPNETKRAELSVQLNLTDRQLQMWFCHRRLKDRKPPAKRQLRDEEVSVPVIGPPPPVLPPPLPPSEMMVGTVGTYGEQLLPYSRRGSGRLSAAPRLSVPEIGRRYYEPPQVMLPHMAPVHLMQAEHRVIDSVEALIGEPLRDDGPVLGIEFDPLPPGAFGAPIVPEQPRQPFRSYETKMFSGPKTMKAVHEYQFLPEQPSDTYERASQSHFYDSSAEASNLRVAPLSTGSRFLHGVEQAPSYTFHSQSSGSSHLTQRGSGRSPIASALTDHEGALSNINASTTPIHGQLGIPQVAGFESPLASPERLGYHDEDTYHMDRKRKHNEEAKIAREVEAHEKRIRKELEKQDLLNRKREEQMRREMERHDRERRKEEERLMRERQREEEKFQREQRREHKRMEKFMQKQSIRAEKLRQREELRREKEAARQKAANERATARRIARESMELMEDERLELLELASRSKGLPSMVSLDSDTLQQLDSFRGMLGKFPPETVRLKVPFSIKPWAASEDIIGNLLMAWKFFVTFGDVLGLPSFTLDEFVQALHDYDSRLLGELHVSLLKSVIKDIEDVARTPSVALGVNQSSSANPGGGHPQIVEGAYAWGINILNWQRHLNFLTWPEILRQFGLCAGFGPQLKKSDAEIVHHRDDNEGRNGVDVISILRNGSAAVKAAALMKERGYTNRRRSRHRLTPGTVKFAAFHVLSLEGSKGLTILEVAEKIQKSGLRDLTTSKTPEASISAALSRDTKLFERTAPSTYCVKTPYRKDPDDSEAVLAAAREKIRAFQNALPECEEVEKDVDEAERDDDSECDDADDDADGDDVNIEDKDAKSPLVGAQYGAQITVVGDIKKESNIVMNTSVPPSIQIKSSASVPFHTLDSKASSSTDPEVGDDAKDIEIDESNQGESWVQGLAEGDYCDLSVDERLNALVALIAVANEGNSIRAILEERLEAASALKKQLWAEAQLDKRRIRDDFTSKMQYDSYVSMKVDTDQENNAAEITLTPVHDPIKNNNGNANLMNNGLLVDKQNQLTTGDVYHQRNGASRESSTNAESLSVQQYASSEKTRSQLKSFIGHKAEQLYVYRSLPLGQDRRRNRYWQFSASSSSYDPGSGRIFFESRDGYWRVIDTSEAFEALVASLDTRGIRESHLHSILQSIEPTFKEAVERKRCANLEHPTGRTSENGSNESPNCNNEFGSPCSTLSGVASDNLMAHSDIFKIEVGRNEAEKNSISKRASVFLKWIWRECYSHQSTYAMRYGKKRCPELIHSCDYCYQIYLAEERHCSCHKTFKHIHNFLEHSSQCEEKQRTDPNWKMQTVDLSVPVGLRLLRLLLATIEALVPAEALLPFWTDGYRKSWGAKLYSASSAEEVLQAMHE

SEQ ID NO: 192039 - protein, 1066 aa, Zea Mays
MESSDDGGSGPAAGSPGPPSAPAAVGGASSAPGASGSGGKPPVKRVMKTPYQLEVLERTYAEDSYPNETKRAELSVQLNLTDRQLQMWFCHRRLKDRKPPAKRQLRDEEVSVPVIGPPPPVLPPPLPPSEMMVGTVGTYGEQLLPYSRRGSGRLSAAPRLSVPEIGRRYYEPPQVMLPHMAPVHLMQAEHRVIDSVEALIGEPLRDDGPVLGIEFDPLPPGAFGAPIVPEQPRQPFRSYETKMFSGPKTMKAVHEYQFLPEQPSDTYERASQSHFYDSSAEASNLRVAPLSTGSRFLHGVEQAPSYTFHSQSSGSSHLTQRGSGRSPIASALTDHEGALSNINASTTPIHGQLGIPQVAGFESPLASPERLGYHDEDTYHMDRKRKHNEEAKIAREVEAHEKRIRKELEKQDLLNRKREEQMRREMERHDRERRKEEERLMRERQREEEKFQREQRREHKRMEKFMQKQSIRAEKLRQREELRREKEAARQKAANERATARRIARESMELMEDERLELLELASRSKGLPSMVSLDSDTLQQLDSFRGMLGKFPPETVRLKVPFSIKPWAASEDIIGNLLMAWKFFVTFGDVLGLPSFTLDEFVQALHDYDSRLLGELHVSLLKSVIKDIEDVARTPSVALGVNQSSSANPGGGHPQIVEGAYAWGINILNWQRHLNFLTWPEILRQFGLCAGFGPQLKKSDAEIVHHRDDNEGRNGVDVISILRNGSAAVKAAALMKERGYTNRRRSRHRLTPGTVKFAAFHVLSLEGSKGLTILEVAEKIQKSGLRDLTTSKTPEASISAALSRDTKLFERTAPSTYCVKTPYRKDPDDSEAVLAAAREKIRAFQNALPECEEVEKDVDEAERDDDSECDDADDDADGDDVNIEDKDAKSPLVGAQYGAQITVVGDIKKESNIVMNTSVPPSIQIKSSASVPFHTLDSKASSSTDPEVGDDAKDIEIDESNQGESWVQGLAEGDYCDLSVDERLNALVALIAVANEGNSIRAILEERLEAASALKKQLWAEAQLDKRRIRDDFTSKMQYDSYVSTTWTRPETEPVLAVLCIFIIL

SEQ ID NO: 192040 - protein, 1746 aa, Zea Mays
MESSDDGGSGPAAGSPGPPSAPAAVGGASSAPGASGSGGKPPVKRVMKTPYQLEVLERTYAEDSYPNETKRAELSVQLNLTDRQLQMWFCHRRLKDRKPPAKRQLRDEEVSVPVIGPPPPVLPPPLPPSEMMVGTVGTYGEQLLPYSRRGSGRLSAAPRLSVPEIGRRYYEPPQVMLPHMAPVHLMQAEHRVIDSVEALIGEPLRDDGPVLGIEFDPLPPGAFGAPIVPEQPRQPFRSYETKMFSGPKTMKASAILPTTDPLLQNTGKRKSFIGSSHLGSQAVHEYQFLPEQPSDTYERASQSHFYDSSAEASNLRVAPLSTGSRFLHGVEQAPSYTFHSQSSGSSHLTQRGSGRSPIASALTDHEGALSNINASTTPIHGQLGIPQVAGFESPLASPERLGYHDEDTYHMDRKRKHNEEAKIAREVEAHEKRIRKELEKQDLLNRKREEQMRREMERHDRERRKEEERLMRERQREEEKFQREQRREHKRMEKFMQKQSIRAEKLRQREELRREKEAARQKAANERATARRIARESMELMEDERLELLELASRSKGLPSMVSLDSDTLQQLDSFRGMLGKFPPETVRLKVPFSIKPWAASEDIIGNLLMAWKFFVTFGDVLGLPSFTLDEFVQALHDYDSRLLGELHVSLLKSVIKDIEDVARTPSVALGVNQSSSANPGGGHPQIVEGAYAWGINILNWQRHLNFLTWPEILRQFGLCAGFGPQLKKSDAEIVHHRDDNEGRNGVDVISILRNGSAAVKAAALMKERGYTNRRRSRHRLTPGTVKFAAFHVLSLEGSKGLTILEVAEKIQKSGLRDLTTSKTPEASISAALSRDTKLFERTAPSTYCVKTPYRKDPDDSEAVLAAAREKIRAFQNALPECEEVEKDVDEAERDDDSECDDADDDADGDDVNIEDKDAKSPLVGAQYGAQITVVGDIKKESNIVMNTSVPPSIQIKSSASVPFHTLDSKASSSTDPEVGDDAKDIEIDESNQGESWVQGLAEGDYCDLSVDERLNALVALIAVANEGNSIRAILEERLEAASALKKQLWAEAQLDKRRIRDDFTSKMQYDSYLYVYRSLPLGQDRRRNRYWQFSASSSSYDPGSGRIFFESRDGYWRVIDTSEAFEALVASLDTRGIRESHLHSILQSIEPTFKEAVERKRCANLEHPTGRTSENGSNESPNCNNEFGSPCSTLSGVASDNLMAHSDIFKIEVGRNEAEKNSISKRASVFLKWIWRECYSHQSTYAMRYGKKRCPELIHSCDYCYQIYLAEERHCSCHKTFKHIHNFLEHSSQCEEKQRTDPNWKMQTVDLSVPVGLRLLRLLLATIEALVPAEALLPFWTDGYRKSWGAKLYSASSAEEVLQMLSVLESAIKRDYLSSNFETTTELLNSSTQDFATQNSAGGSGSATALPWVPDTTAAVALRLLDLDASISYTLHPKLGSNKEQESGDFMKLPPRYPSMNKGKQEIEQFRPIGFDQQDGTLLPNSNGRRGRGRGGRGGSRGGRSRGHGGRVPRGIGSSSRIQFRDDNSMLYGRAPRKNARGGRGRGRGRGRGLRTVRPRQPSELSARSIPKANLLGSFSMLSKTNHTGTTHSPESSGAEEWAFERREYVKDDENNLVSQSDESEENVEPMNEEYGEHISGYPRDNSDSRPVQMMGDGSDDNDEDAEGDEGEEDGEDYEAEDPGDEDDDVEMDGDDDVEVDEDDDIEMDGDDDIEDDDDDDGGDGAANGDEDGGGTSSYSSEYSE

SEQ ID NO: 192041 - protein, 1041 aa, Zea Mays
MESSDDGGSGPAAGSPGPPSAPAAVGGASSAPGASGSGGKPPVKRVMKTPYQLEVLERTYAEDSYPNETKRAELSVQLNLTDRQLQMWFCHRRLKDRKPPAKRQLRDEEVSVPVIGPPPPVLPPPLPPSEMMVGTVGTYGEQLLPYSRRGSGRLSAAPRLSVPEIGRRYYEPPQVMLPHMAPVHLMQAEHRVIDSVEALIGEPLRDDGPVLGIEFDPLPPGAFGAPIVPEQPRQPFRSYETKMFSGPKTMKASAILPTTDPLLQNTGKRKSFIGSSHLGSQAVHEYQFLPEQPSDTYERASQSHFYDSSAEASNLRVAPLSTGSRFLHGVEQAPSYTFHSQSSGSSHLTQRGSGRSPIASALTDHEGALSNINASTTPIHGQLGIPQVAGFESPLASPERLGYHDEDTYHMDRKRKHNEEAKIAREVEAHEKRIRKELEKQDLLNRKREEQMRREMERHDRERRKEEERLMRERQREEEKFQREQRREHKRMEKFMQKQSIRAEKLRQREELRREKEAARQKAANERATARRIARESMELMEDERLELLELASRSKGLPSMVSLDSDTLQQLDSFRGMLGKFPPETVRLKVPFSIKPWAASEDIIGNLLMAWKFFVTFGDVLGLPSFTLDEFVQALHDYDSRLLGELHVSLLKSVIKDIEDVARTPSVALGVNQSSSANPGGGHPQIVEGAYAWGINILNWQRHLNFLTWPEILRQFGLCAGFGPQLKKSDAEIVHHRDDNEGRNGVDVISILRNGSAAVKAAALMKERGYTNRRRSRHRLTPGTVKFAAFHVLSLEGSKGLTILEVAEKIQKSGLRDLTTSKTPEASISAALSRDTKLFERTAPSTYCVKTPYRKDPDDSEAVLAAAREKIRAFQNALPECEEVEKDVDEAERDDDSECDDADDDADGDDVNIEDKDAKSPLVGAQYGAQITVVGDIKKESNIVMNTSVPPSIQIKSSASVPFHTLDSKASSSTDPEVGDDAKDIEIDESNQGESWVQGLAEGDYCDLSVDERLNALVALIAVANEGNSIRAILEKQRVL

SEQ ID NO: 192042 - protein, 1569 aa, Zea Mays
MFSGPKTMKAVHEYQFLPEQPSDTYERASQSHFYDSSAEASNLRVAPLSTGSRFLHGVEQAPSYTFHSQSSGSSHLTQRGSGRSPIASALTDHEGALSNINASTTPIHGQLGIPQVAGFESPLASPERLGYHDEDTYHMDRKRKHNEEAKIAREVEAHEKRIRKELEKQDLLNRKREEQMRREMERHDRERRKEEERLMRERQREEEKFQREQRREHKRMEKFMQKQSIRAEKLRQREELRREKEAARQKAANERATARRIARESMELMEDERLELLELASRSKGLPSMVSLDSDTLQQLDSFRGMLGKFPPETVRLKVPFSIKPWAASEDIIGNLLMAWKFFVTFGDVLGLPSFTLDEFVQALHDYDSRLLGELHVSLLKSVIKDIEDVARTPSVALGVNQSSSANPGGGHPQIVEGAYAWGINILNWQRHLNFLTWPEILRQFGLCAGFGPQLKKSDAEIVHHRDDNEGRNGVDVISILRNGSAAVKAAALMKERGYTNRRRSRHRLTPGTVKFAAFHVLSLEGSKGLTILEVAEKIQKSGLRDLTTSKTPEASISAALSRDTKLFERTAPSTYCVKTPYRKDPDDSEAVLAAAREKIRAFQNALPECEEVEKDVDEAERDDDSECDDADDDADGDDVNIEDKDAKSPLVGAQYGAQITVVGDIKKESNIVMNTSVPPSIQIKSSASVPFHTLDSKASSSTDPEVGDDAKDIEIDESNQGESWVQGLAEGDYCDLSVDERLNALVALIAVANEGNSIRAILEERLEAASALKKQLWAEAQLDKRRIRDDFTSKMQYDSYVSMKVDTDQENNAAEITLTPVHDPIKNNNGNANLMNNGLLVDKQNQLTTGDVYHQRNGASRESSTNAESLSVQQYASSEKTRSQLKSFIGHKAEQLYVYRSLPLGQDRRRNRYWQFSASSSSYDPGSGRIFFESRDGYWRVIDTSEAFEALVASLDTRGIRESHLHSILQSIEPTFKEAVERKRCANLEHPTGRTSENGSNESPNCNNEFGSPCSTLSGVASDNLMAHSDIFKIEVGRNEAEKNSISKRASVFLKWIWRECYSHQSTYAMRYGKKRCPELIHSCDYCYQIYLAEERHCSCHKTFKHIHNFLEHSSQCEEKQRTDPNWKMQTVDLSVPVGLRLLRLLLATIEALVPAEALLPFWTDGYRKSWGAKLYSASSAEEVLQMLSVLESAIKRDYLSSNFETTTELLNSSTQDFATQNSAGGSGSATALPWVPDTTAAVALRLLDLDASISYTLHPKLGSNKEQESGDFMKLPPRYPSMNKGKQEIEQFRPIGFDQQDGTLLPNSNGRRGRGRGGRGGSRGGRSRGHGGRVPRGIGSSSRIQFRDDNSMLYGRAPRKNARGGRGRGRGRGRGLRTVRPRQPSELSARSIPKANLLGSFSMLSKTNHTGTTHSPESSGAEEWAFERREYVKDDENNLVSQSDESEENVEPMNEEYGEHISGYPRDNSDSRPVQMMGDGSDDNDEDAEGDEGEEDGEDYEAEDPGDEDDDVEMDGDDDVEVDEDDDIEMDGDDDIEDDDDDDGGDGAANGDEDGGGTSSYSSEYSE

SEQ ID NO: 192043 - protein, 419 aa, Zea Mays
MSKSNQEVPIMQALVTSRFVLPTSMYNPCMPAAAVNIYIPQTQSFGLGNVLPPSLHSQVSTGTIDENNSSFNFGDSAIGSMKRKTAVVAGNHHILHGFAGSSSSVHVPQNPVYGPWNASSQSNCLPSSAASNLPEYHNSNGWPFLEESSANASNSFTSVDACPELVPHGNNLYPACHIIQCNTWVPQTASHGVPQWGYGNVMVNPPGTVDMPNGNIQDYQAGHSSIHGPLPHFCQIPLRTAGLPLDPRMLAFPFNDEHTFGHQVHPPLINQANNGALRILPYQNATVMDHSRIYEAGHVIDEHRDMRLDVDNMTYEELVALQEQIGDVNTGLTESYIQENLRSTFHVPGAASISDQFCELSLENDACIICQEEYEARELIGALECGHKYHEDCIKQWLMVKNVCPICKTTALSSDRRNG

SEQ ID NO: 192044 - protein, 270 aa, Zea Mays
MSYRNMLWTHQSVNPEWEQGHVQVQPRSSYYAGTVSDSSNLGMQVAVGVPVNTVNVGICDLWNHERLPVHNSYPHASVTSRFVLPTSMYNPCMPAAAVNIYIPQTQSFGLGNVLPPSLHSQVSTGTIDENNSSFNFGDSAIGSMKRKTAVVAGNHHILHGFAGSSSSVHVPQNPVYGPWNASSQSNCLPSSAASNLPEYHNSNGWPFLEESSANASNSFTSVDACPELVPHGNNLYPACHIIQCNTWVPQTASHGVPQWGYGNVMVNPPG

SEQ ID NO: 192045 - protein, 553 aa, Zea Mays
MWAVSLESTFSVMERRNWTCGRGDDKGYLLTKLAVFLLKEIEIGVMSYRNMLWTHQSVNPEWEQGHVQVQPRSSYYAGTVSDSSNLGMQVAVGVPVNTVNVGICDLWNHERLPVHNSYPHASVTSRFVLPTSMYNPCMPAAAVNIYIPQTQSFGLGNVLPPSLHSQVSTGTIDENNSSFNFGDSAIGSMKRKTAVVAGNHHILHGFAGSSSSVHVPQNPVYGPWNASSQSNCLPSSAASNLPEYHNSNGWPFLEESSANASNSFTSVDACPELVPHGNNLYPACHIIQCNTWVPQTASHGVPQWGYGNVMVNPPGTVDMPNGNIQDYQAGHSSIHGPLPHFCQIPLRSMQVPQIQVPHQQFIGNNVVHGLNPSAAGLPLDPRMLAFPFNDEHTFGHQVHPPLINQANNGALRILPYQNATVMDHSRIYEAGHVIDEHRDMRLDVDNMTYEELVALQEQIGDVNTGLTESYIQENLRSTFHVPGAASISDQFCELSLENDACIICQEEYEARELIGALECGHKYHEDCIKQWLMVKNVCPICKTTALSSDRRNG

SEQ ID NO: 192046 - protein, 146 aa, Zea Mays
MVAHRFHQYQVVGRALPTPTDEHPKIYRMKLWATNEVRAKSKFWYFLRKLKKVKKSNGQMLAINEIFERNPTTIKNYGIWLRYQSRTGYHNMYKEYRDTTLNGAVEQMYNEMASRHRVRSPCIQIIKTATAQPFHVRGISYPCSVS

SEQ ID NO: 192047 - protein, 209 aa, Zea Mays
MASHDHHHSHSHDDHHHHSHGDGGGHAAGGSWVGEDGRVWHSHDGLAPHSHEPIYSPGDFTKRAPPLASRDFADRAFTVGIGGPVGTGFLRDKYSLAAVTNDIFTKEDGEFLIKHGALPEERIRAVETGGCPHAAIREDISINLGPLEELSNLYKADLLLCESGGGIFFYLIQNKCRSFLLLCMLESTPERQPCRLPASSYLPGKFLQV

SEQ ID NO: 192048 - protein, 101 aa, Zea Mays
MASHDHHHSHSHDDHHHHSHGDGGGHAAGGSWVGEDGRVWHSHDGLAPHSHEPIYSPGDFTKRAPPLASRDFADRAFTVGIGGPVGTGSQMIYSQKKMENS

SEQ ID NO: 192049 - protein, 103 aa, Zea Mays
MLALCRFLRDKYSLAAVTNDIFTKEDGEFLIKHGALPEERIRAVETGGCPHAAIREDISINLGPLEELSNLSFLLLCMLESTPERQPCRLPASSYLPGKFLQV

SEQ ID NO: 192050 - protein, 444 aa, Zea Mays
MFIHVSQTFRVDKIFRDMLREIRKDRQSDSNSVKCLHDELKENASCWYWMISGSLSGSRVLVTAQKKDVAAAIGAEEQIPIPDMEEKQYFSMFMHYALEGKRVGDGRFIAIGRKIAKKLGRSPIAAVTVAARLRSNSSIDFWETTANLDMLDETMGALWWSYQQIGVDVRRCFAYCSTFPRGYRLVRGELVHIWIVQGFINTRVNATEQPEDIGLHYINELRTFSFLQIERTVFGTETEAFTIHDLLHELAERVSGSECFRVVSNSSPKHIPQEVRHLFVGTGTDSRAAIAKKILGLVNLRTLIIVEEYSENKRKTFAAEDDEERVELIFPSTFSKLYHMQSIYSEKISCAKDVTQNLTSLRHSSSSWMGFANVGRLTSLQSLRYFQVKREQGHELKQLKHLNNLRGTLAIDGLGVVRSKEEALEAHLASKEQLRKLELTFSVR

SEQ ID NO: 192051 - protein, 712 aa, Zea Mays
MVTDGLAVSLQSSCGFQHGGWSGTPGQLSMVDIVKMGRPQGKASSKPVVTADRGYAGQYPSLPSTNQNLKQSGSMVSPAELDKGLQPAHNLVQVKNHGHFTADSKLPYGTDWSPQDDPTSENQSSQPETSGDPSLYESSFQSSTLVTDVVNSHENSHLELDENSTFAMRSTPASERHLEPSDSIPEYNDGILNNSSSYQPHNYSYTEQDVEDSSADVSAAAENFQSLSLHNDELAAKKTAEDNPAVIIPDHLQVTNTECVSLSFGSFGSGAFSGLLPQKTTDSNVEFLVQEDSATVDPIDARNQDYYESGAVTSPAEENLEAMLGTNMENVDAPSVSQANELSQDVLDPSVLKYDVSSVSSHAYSNMNTPQPSTIEDPQGNNQAHTLSHLSNMMQANPLSTSSLLASNQNHPSLHGLEFDLPYLEAKYNAGTTTNPRPAISMQEALKAGVFSNARSTQSLPSTSIPTGHPLPQQLAHHPYSQPTLAPITHFPNIVGYPPYLPQNYAAYLSSGTFQQAYPSNGAFHQSAAALLGSGMKYSAPEYKNNLSATGLQQQHQPQPQPPSSVISGYGGLGSSSNIQGNFTLNQSTGTGSTLVFDDALGRQYKDTSQHIALQQPDNSGMWLHGSGSRAAALPPNHFYGYQGQSQLGGFGQAQQQQPSQFGGHGYPTFYQSQGGLTQEHHPQNLAEGSLNGFQVAPSQPSHPSWQHQHTY

SEQ ID NO: 192052 - protein, 829 aa, Zea Mays
MSGGGAGGKGAAAPVPAGSRKLVQCLKEIVNRPEAEIYSALRECGMDPDEAVSRLLSQDTFQEVKSKRDKKKEIKEVPETRYRSANSSTNRSLRSGADRGGRSNSVHSSSTDNMTSRPPVSGSCTASVNSNQMQTIASSSANKHMVTDGLAVSLQSSCGFQHGGWSGTPGQLSMVDIVKMGRPQGKASSKPVVTADRGYAGQYPSLPSTNQNLKQSGSMVSPAELDKGLQPAHNLVQVKNHGHFTADSKLPYGTDWSPQDDPTSENQSSQPETSGDPSLYESSFQSSTLVTDVVNSHENSHLELDENSTFAMRSTPASERHLEPSDSIPEYNDGILNNSSSYQPHNYSYTEQDVEDSSADVSAAAENFQSLSLHNDELAAKKTAEDNPAVIIPDHLQVTNTECVSLSFGSFGSGAFSGLLPQKTTDSNVEFLVQEDSATVDPIDARNQDYYESGAVTSPAEENLEAMLGTNMENVDAPSVSQANELSQDVLDPSVLKYDVSSVSSHAYSNMNTPQPSTIEDPQGNNQAHTLSHLSNMMQANPLSTSSLLASNQNHPSLHGLEFDLPYLEAKYNAGTTTNPRPAISMQEALKAGVFSNARSTQSLPSTSIPTGHPLPQQLAHHPYSQPTLAPITHFPNIVGYPPYLPQNYAAYLSSGTFQQAYPSNGAFHQSAAALLGSGMKYSAPEYKNNLSATGLQQQHQPQPQPPSSVISGYGGLGSSSNIQGNFTLNQSTGTGSTLVFDDALGRQYKDTSQHIALQQGQSQLGGFGQAQQQQPSQFGGHGYPTFYQSQGGLTQEHHPQNLAEGSLNGFQVAPSQPSHPSWQHQHTY

SEQ ID NO: 192053 - protein, 85 aa, Zea Mays
MTIHRMTHGHELNAKFTPFEQRHIFFPVLTSQIPFLFFAHVMLTVYKILLSLVCLLHALLCISRIFTVKQKFHHSWLATSKQNLW

SEQ ID NO: 192054 - protein, 234 aa, Zea Mays
MGDVLVDGKSTGFCAGGCAAIADSGTSLLAGPTIGAAGVVSQECKTVVSQYGQQILDLLLAETQPAKICSQVGLCTFDGTHGVSTGIRSVVDDKAGKSNGGLKSDPMCNACEMAVVWMQNQLAQNKTQELILTYINQLCERLPSPMGESAVDCASLGSMPDIAFTIGGKKFKLKPEQYILKVGEGQAAQCISGFTAMDIPPPRGPLWILGDVFMGVYHTVFDYGKLRVGFAESA

SEQ ID NO: 192055 - protein, 239 aa, Zea Mays
MGDVLVDGKSTGFCAGGCAAIADSGTSLLAGPTAIITEINEKIGAAGVVSQECKTVVSQYGQQILDLLLAETQPAKICSQVGLCTFDGTHGVSTGIRSVVDDKAGKSNGGLKSDPMCNACEMAVVWMQNQLAQNKTQELILTYINQLCERLPSPMGESAVDCASLGSMPDIAFTIGGKKFKLKPEQVGEGQAAQCISGFTAMDIPPPRGPLWILGDVFMGVYHTVFDYGKLRVGFAESA

SEQ ID NO: 192056 - protein, 128 aa, Zea Mays
MCNACEMAVVWMQNQLAQNKTQELILTYINQLCERLPSPMGESAVDCASLGSMPDIAFTIGGKKFKLKPEQYILKVGEGQAAQCISGFTAMDIPPPRGPLWILGDVFMGVYHTVFDYGKLRVGFAESA

SEQ ID NO: 192057 - protein, 317 aa, Zea Mays
MDGRKKRHRDGYEEGNTTLRKVGLASDFIWSDAQAPLEFLGSYNAISFDNPESLPIKNHELTTDDIKNFCEDLLLLDKNSFKHILKWRIRLRKALSVSSQVTLKANDAVENTKVMDDDVLLQEMEELTSVIDRKKKREKKRLSKRRAKDKARKATGMQIDATGDDYGDPDLFSISVIKGGKELEAVESAEVDVQNEIGDSENEDTQAREHSDEEMDSDEEQQRYDAQLEEMLDEAYERFVTRKGGEIKQERKRAKRINPDADADLLEGGEDDGVAEMDQDFDEDQDLDEHQDQETNPLLLALDEQRPTKEQIVKQMV

SEQ ID NO: 192058 - protein, 496 aa, Zea Mays
MRWRIRLRKALSVSSQVTLKANDAVENTKVMDDDVLLQEMEELTSVIDRKKKREKKRLSKRRAKDKARKATGMQIDATGDDYGDPDLFSISVIKGGKELEAVESAEVDVQNEIGDSENEDTQAREHSDEEMDSDEEQQRYDAQLEEMLDEAYERFVTRKGGEIKQERKRAKRINPDADADLLEGGEDDGVAEMDQDFDEDQDLDEHQDQETNPLLLALDEQRPTKEQIVKQMSDTEDERESLQRNMKKMVTGKTEKVAKAQRLQRDDIEIVPAEPVRDEEDTSSSSGESDVSEDELDDYRKAEVLAYAKKMLRKKQREQILDDAYNKYMFDDEGLPNWFVEDEKRHRQPMKPVTREEVAAMRAQFKEIDARPSKKVAEAKARKKRVAMKKLDKARQKADAIADQNDINELSKRKMIDRIYRKAMPTKPQKEYVVAKKGVQLRTGKGKVLVDPRMKKDKRASGTCKKGKKGGKGGKGKGGQKGMRGKTGKKAGKAPS

SEQ ID NO: 192059 - protein, 395 aa, Zea Mays
MEVVGLPRFVSCHSSSSSPVSLSIHPIPPGEKRDKSNLAASWALSAGAMASNSAPGAGYECGSDNDGGLHKPLLPNSGSCQRTGSRQPSLNAAGTSSRAVLRESHVSAFLCTLIVALGPIQCGFTSGYSSPTQDGIIRDLNLSISEFSAFGSLSNVGAMVGAIASGQMAKYIGRRGSLIIAAVPNIMGWLAISFAKHTSFLYMGRLLEGFGVGVISYVVPVYIAEISPQNMRGALGAVNPLSATFGVMFVYVLGLFFPWRLLALIGTLPCLFLIPGLFFIPESPRWLARMNRMDDCETSLQVLRGFNADITAEANDIKIAVTSANKSGTISFQELNQKKNRTPLILGIGLLVLQQLSGINCIVFYSGSIFKAADEGILFNGGNESSTIELDEPFD

SEQ ID NO: 192060 - protein, 215 aa, Zea Mays
MTTSALMAVDVWSALQHTSFLYMGRLLEGFGVGVISYVVPVYIAEISPQNMRGALGAVNPLSATFGVMFVYVLGLFFPWRLLALIGTLPCLFLIPGLFFIPESPRWLARMNRMDDCETSLQVLRGFNADITAEANDIKIAVTSANKSGTISFQELNQKKNRTPLILGIGLLVLQQLSGINCIVFYSGSIFKAADEGILFNGGNESSTIELDEPFD

SEQ ID NO: 192061 - protein, 354 aa, Zea Mays
MEVVGLPRFVSCHSSSSSPVSLSIHPIPPGEKRDKSNLAASWALSAGAMASNSAPGAGYECGSDNDGGLHKPLLPNSGSCQRTGSRQPSLNAAGTSSRAVLRESHVSAFLCTLIVALGPIQCGFTSGYSSPTQDGIIRDLNLSISEFSAFGSLSNVGAMVGAIASGQMAKYIGRRGSLIIAAVPNIMGWLAISFAKHTSFLYMGRLLEGFGVGVISYVVPVYIAEISPQNMRGALGAVNPLSATFGVMFVYVLGLFFPWRLLALIGTLPCLFLIPGLFFIPESPRWLARMNRMDDCETSLQVLRGFNADITAEANDIKIAVTSANKSGTISFQELNQKKNRTPLIELAYLCCNS

SEQ ID NO: 192062 - protein, 370 aa, Zea Mays
MEVVGLPRFVSCHSSSSSPVSLSIHPIPPGEKRDKSNLAASWALSAGAMASNSAPGAGYECGSDNDGGLHKPLLPNSGSCQRTGSRQPSLNAAGTSSRAVLRESHVSAFLCTLIVALGPIQCGFTSGYSSPTQDGIIRDLNLSISEFSAFGSLSNVGAMVGAIASGQMAKYIGRRGSLIIAAVPNIMGWLAISFAKHTSFLYMGRLLEGFGVGVISYVVPVYIAEISPQNMRGALGAVNPLSATFGVMFVYVLGLFFPWRLLALIGTLPCLFLIPGLFFIPESPRWLARMNRMDDCETSLQVLRGFNADITAEANDIKLYADSCDISKQKWYNKFSRVEPKEKPHAPNSRNWPTCVATAKWNKLYSILFR

SEQ ID NO: 192063 - protein, 466 aa, Zea Mays
MASDGDHGGALQKPLLPKAPRSGGWFRKGTSTARLGAAAAGTSSKAAALRPPHHVPALLCTLVVALGTVQFGFTSGYSSPAQDGVTRDLDLSISESLMIAAVPNVMGWLAISLARDTSFLYVGRLLEGFGVGVISYVVPVYVAEISPQNMRGALGAVNPLSATFGVVFADVLGLFFPWRLLALIGTLPCLLLIPGLFFIPESPRWLARMNMMDECEASLQVLRGVDADITVEANDIKIAVASANKSGAMSFQELNQKKYRTPLILGMGLLVLQQLSGINGIIFYAGSIFKAAGLKNSNLDTCILGVIAVLATAVTTKILDRAGRRILLIISSFGMTLSLLVVAVVFYIKDNISHDSDLGNTLSMVSLVGVLAYVTAYSFGMGAIPWIIMAEILPVSIKSVAGSFATLANWLTSFGITMTANLLLSWSAAGTFAFYMMVSAFTLVFVILWVPETKGRTLEEIQWSFQ

SEQ ID NO: 192064 - protein, 476 aa, Zea Mays
MASDGDHGGALQKPLLPKAPRSGGWFRKGTSTARLGAAAAGTSSKAAALRPPHHVPALLCTLVVALGTVQFGFTSGYSSPAQDGVTRDLDLSISEFSVFGSLSNVGAMVGAIASGQMAKYVGRRGSLMIAAVPNVMGWLAISLARDTSFLYVGRLLEGFGVGVISYVVPVYVAEISPQNMRGALGAVNPLSATFGVVFADVLGLFFPWRLLALIGTLPCLLLIPGLFFIPESPRWLARMNMMDECEASLQVLRGVDADITVEANDIKIAVASANKSGAMSFQELNQKKYRTPLILGMGLLVLQQLSGINGIIFYAGSIFKAAGLKNSNLDTCILGVIAVLATAVTTKILDRAGRRILLIDNISHDSDLGNTLSMVSLVGVLAYVTAYSFGMGAIPWIIMAEILPVSIKSVAGSFATLANWLTSFGITMTANLLLSWSAAGTFAFYMMVSAFTLVFVILWVPETKGRTLEEIQWSFQ

SEQ ID NO: 192065 - protein, 411 aa, Zea Mays
MASDGDHGGALQKPLLPKAPRSGGWFRKGTSTARLGAAAAGTSSKAAALRPPHHVPALLCTLVVALGTVQFGFTSGYSSPAQDGVTRDLDLSISEFSVFGSLSNVGAMVGAIASGQMAKYVGRRGSLMIAAVPNVMGWLAISLARDTSFLYVGRLLEGFGVGVISYVVPVYVAEISPQNMRGALGAVNPLSATFGVVFADVLGLFFPWRLLALIGTLPCLLLIPGLFFIPESPRWLARMNMMDECEASLQVLRGVDADITVEANDIKIAVASANKSGAMSFQELNQKKYRTPLILGMGLLVLQQLSGINGIIFYAGSIFKAAGLKNSNLDTCILGVIAVLATAVTTKILDRAGRRILLIISSFGMTLSLLVVAVVFYIKGLTTHFTEYSSFLSWAIRFRTIFHMTLTWVTP

SEQ ID NO: 192066 - protein, 336 aa, Zea Mays
MASDGDHGGALQKPLLPKAPRSGGWFRKGTSTARLGAAAAGTSSKAAALRPPHHVPALLCTLVVALGTVQFGFTSGYSSPAQDGVTRDLDLSISESLMIAAVPNVMGWLAISLARDTSFLYVGRLLEGFGVGVISYVVPVYVAEISPQNMRGALGAVNPLSATFGVVFADVLGLFFPWRLLALIGTLPCLLLIPGLFFIPESPRWLARMNMMDECEASLQVLRGVDADITVEANDIKIAVASANKSGAMSFQELNQKKYRTPLILGMGLLVLQQLSGINGIIFYAGSIFKAAGLKNSNLDTCILGVIAVLATAVTTKILDRAGRRILLIVTFLLLG

SEQ ID NO: 192067 - protein, 511 aa, Zea Mays
MASDGDHGGALQKPLLPKAPRSGGWFRKGTSTARLGAAAAGTSSKAAALRPPHHVPALLCTLVVALGTVQFGFTSGYSSPAQDGVTRDLDLSISEFSVFGSLSNVGAMVGAIASGQMAKYVGRRGSLMIAAVPNVMGWLAISLARDTSFLYVGRLLEGFGVGVISYVVPVYVAEISPQNMRGALGAVNPLSATFGVVFADVLGLFFPWRLLALIGTLPCLLLIPGLFFIPESPRWLARMNMMDECEASLQVLRGVDADITVEANDIKIAVASANKSGAMSFQELNQKKYRTPLILGMGLLVLQQLSGINGIIFYAGSIFKAAGLKNSNLDTCVLGAIGVLASVVTTKILDRAGRRILLIISSSGMTLSLLTVAVVFYIKGNISHDSDLGNTLSMVSLIGVLACVTAYSFGMGAIPWIIMAEILPVSINSVAGSFATLANWLTSFGITMTANLLLSWSAAGTFALYMMVSAFTVVFVILWVPETKGKTLEEIQWFFHPGTPQSPPRCLHLLL

SEQ ID NO: 192068 - protein, 297 aa, Zea Mays
MASDGDHGGALQKPLLPKAARGGGWFRKGTSTAHPSGLSAAAAGTSSKAAALRPTHHVPALLCTLVVALGPIQFGFTTGYSSPAQDGVTRDLNLSISEFSAFGSLSNVGAMVGAIASGQMAKYVGRRGVPVYIAEISPQNMRGALGVVNPISSSGMTLSLLTVAVVFYIKGNISHDSDLGNTLSMVSLIGVLACVTAYSFGMGAIPWIIMAEILPVSINSVAGSFATLANWLTSFGITMTANLLLSWSAAGTFALYMMVSAFTVVFVILWVPETKGKTLEEIQWFFHWAVRRAEGSL

SEQ ID NO: 192069 - protein, 316 aa, Zea Mays
MASDGDHGGALQKPLLPKAARGGGWFRKGTSTAHPSGLSAAAAGTSSKAAALRPTHHVPALLCTLVVALGPIQFGFTTGYSSPAQDGVTRDLNLSISEFSAFGSLSNVGAMVGAIASGQMAKYVGRRGDTSFLYMGRLLEGFGVGVISYVVPVYIAEISPQNMRGALGVVNPISSSGMTLSLLTVAVVFYIKGNISHDSDLGNTLSMVSLIGVLACVTAYSFGMGAIPWIIMAEILPVSINSVAGSFATLANWLTSFGITMTANLLLSWSAAGTFALYMMVSAFTVVFVILWVPETKGKTLEEIQCWAVRRAEGSL

SEQ ID NO: 192070 - protein, 583 aa, Zea Mays
METYFHKDHDQEVVELIPALRKHIASRHPGIQSLRQRLYSTGKPRRTVHSSSFYQPSFLASRTYADVLKMGVISGDNTSSSSRSGIMANDGFNAAGWRVVDHRRQQVHGRPSGPSSGSFCGRGSWEIRGRDAWWGRGGCFLEPTMSLGSVDRAVMNNSRGVQSEKARKQVVMVAPGVLDMGKKRWEDLCCEICEDNHVPQVCLVFNVPKPQAALCGFAGGESGFFQILTWGSKGAIPRSDGVTTFITLKEGIVSADLIKSELSRLIPLKWNWSVQKHPDGFLVPFTCSVELQRMIAMKYVHTLGGEGTILGATQKVDMRYTRKMGVVHILVAVTNVNHISESAEIVVDEGLYEIFFKVDKVLIEGKWMDNDNMSNRDKDDFSEKHENDSFQLKELAKDTVMEDNSLHGDSKKPEDGTCAMGMVSQLENQIVNGSVARTGIEPEGLSLGMPTDLMALTSPFVDQYVVTHTHGALDQSPGCGSGDGKSNSWLEQYPSCSSLAGMSQGEVGWTLSGPATGHLFLNETASLAGAAAGMVVEDVYAQPKVVIELDDGHIKSVDTQERDSHLGHVNSFVGVPRSVLSIA

SEQ ID NO: 192071 - protein, 592 aa, Zea Mays
METYFHKDHDQEVVELIPALRKHIASRHPGIQSLRQRLYSTGKPRRTVHSSSFYQPSFLASRTYADVLKMGVISGDNTSSSSRSGIMANDGFNAAGWRVVDHRRQQVHGRPSGPSSGSFCGRGSWEIRGRDAWWGRGGCFLEPTMSLGSVDRAVMNNSRGVQSEKARKQVVMVAPGVLDMGKKRWEDLCCEICEDNHVPQVCLVFNVPKPQAALCGFAGGESGFFQILTWGSKGAIPRSDGVTTFITLKEGIVSADLIKSELSRLIPLKWNWSVQKHPDGFLVPFTCSVELQRMIAMKYVHTLGGEGTILGATQKVDMRYTRKMGVVHILVAVTNVNHISESAEIVVDEGLYEIFFKVDKVLIEGKWMDNDNMSNRDKDDFSEKHENDSFQLKELAKDTVMEDNSLHGDSKKPEDGTCAMGMVSQLENQIVNGSVARTGIEPEGLSLGMPTDLMALTSPFVDQYVVTHTHGALDQSPGCGSGDGKSNSWLEQYPSCSSLAGMSQGEVGWTLSGPATGHLFLNETASLAGAAAGMVVEDVYAQPKVVIELDDGHIKSVDTQERDSHLGHVNSFVGVPRSVLRTHWWLILLLRE

SEQ ID NO: 192072 - protein, 231 aa, Zea Mays
MREPRSATMLDDGDDDFTFAAAHPPPRLLPAGAGGGFVGPPLLYPVFGRPRSPPRVADPAEPEPEPDTATARVPLGRHLAVDRRRDPAPAPLPAPADDDDDSVPAETFCPWSPGWSAAAASPARCKKSGSTGSVLRWRPRLAVGRSQSDGKEKFVFLSAGGGSSGRRSQNGRGVAAPGGGATAGAPHAWSCYVNDNKSGGGARRRSFLPYKRDLVGLFANAAVFRRSYLPF

SEQ ID NO: 192073 - protein, 285 aa, Zea Mays
MPISVASPTAPLPETAPPPPRAFHPSRAPSTLDLSSQPRLPHIALPWQLLPRAFHSWRETIAPPPRLPQHSIHGAPSAPEIARIPSMAHTSPTSIHGRSSIRKPCLPQALHLILLLNVSAADPPKAEEAIRWFYPSASAGNARAQYNLGLCLQNGKGVKQNQKEAAKWYLRAAEGGNVRAMYNISLCYSYGEGLGQDPVRAKRWLQLAADCGHKKALYECGIKLCAAGDKVKCFMYLELATRRGEAAAAHMRDVILESLSVVNAQRAMSDADKWKPRTLHPRPRR

SEQ ID NO: 192074 - protein, 87 aa, Zea Mays
MSSSTIGVVYGGYDSPKLTYNGHVKMWQGNNKKFRTIRPPCKLIALEVQNTSLLVISPLCPRDEQERFIIFLLDFTTVLPFVSTFDV

SEQ ID NO: 192075 - protein, 474 aa, Zea Mays
MDAHTTHIVARKNTSLSFTSNELMDHFPFAWLPMDPFTAMALSGTLSPSFSTTSTNDTMYNLNPALYASLVPPIRKPATPTTLEVGRQCKEEEDASIRLVHLLITCTSAIETGDYSIAQGNLSEARKILGEIPTSTGIGRVGKHFIDALVQRLFPAYPHAAPPSPSPSTSIDLHNNFYDAGLQWPALMDVFSAREGGPPKLRITGIGPNPIGGRDELHEVGIRLAKYAHSVGIDFTFQGVCVDQLDRLCDWMLLKPIKGEAVAINSILQLHRLLVDPDANPVVPAPIDILLKLVIKINPMIFTVVEHEADHNRPPLLERFTNALFHYATMFDSLEAMHRCTSGRDITDSLTEVYLRGEIFDIVCGEGSARTERHELFGHWRERLTYAGLTQVWFDPDEVDTLKDQLIHVTSLSGSGFNILVCDGSLALAWHNRPLYVATAWCVTGGNAASSMVGNICKGTNDSRRKENRNGPME

SEQ ID NO: 192076 - protein, 294 aa, Zea Mays
MMQWPALMDVFSAREGGPPKLRITGIGPNPIGGRDELHEVGIRLAKYAHSVGIDFTFQGVCVDQLDRLCDWMLLKPIKGEAVAINSILQLHRLLVDPDANPVVPAPIDILLKLVIKINPMIFTVVEHEADHNRPPLLERFTNALFHYATMFDSLEAMHRCTSGRDITDSLTEVYLRGEIFDIVCGEGSARTERHELFGHWRERLTYAGLTQVWFDPDEVDTLKDQLIHVTSLSGSGFNILVCDGSLALAWHNRPLYVATAWCVTGGNAASSMVGNICKGTNDSRRKENRNGPME

SEQ ID NO: 192077 - protein, 121 aa, Zea Mays
MEMFGENGRDGVWTVIANVMDPESLHEAFDGCVGVFHTSSHVDPAGISGYTKHMAGLEAKAAELVVEACVRTESVRKCVLTSSLLACVWRQNYPHDRRRFPTTIDENCWSDESLCRDNKSL

SEQ ID NO: 192078 - protein, 257 aa, Zea Mays
MAAASSCPRTPTGSSAQPAAATAASTARATRGAATSSCCRRPPRRSRASRCSCLRPTPTRPALPTPTTRRRRCSRTTARPAAPRPSRPARSVARRPGSPPRRTRTRRATSGGSGSGPSSRRSRRSRCWRSRNASAGGCRSRTTRWCSTSATRSASGGRSSRSGCTTTSTSAAAAGGSRRRTCRLPRGSNSPSSPSSHGGRQGSAVSSTTTTTTICLIPRLIFLWAPRGGVGLNKGSQEGFLSFLPFRFWVHLILDFL

SEQ ID NO: 192079 - protein, 395 aa, Zea Mays
MPRRNPPPPPREQSNSFFTAWKLKGRRCTVRGLSDTEIQNSWKSRAEQPQPEPKCEKDPFNSFVADFDTHNLNIAVGKASELELEVSNLKEQLKKITLEKAEMTTKHEKLSAICRSQRQEIQELKLTLVEPTPPSNKVSSRTQDSGSQRKEKIQGTVWELEQGMLAIASNSSSASSDAKTWQAFPDTKTQARPKVDHATNGSQNITKNTTSGASPDAWGFGTDNFRTPATTLRATTQINRAAAQRSSSQRFNAGVAKSQSRSCFPRVKVVHTSLQRDNRYYERENLLMVIKNNLLWHHLSMGLGYDDSNSNDSGVSPSSDRANNIEVATVSPVPAVVKKQARFLVASPRSPDVNETMMEELHELCEAREAGTAFIMEHSACGDQARVVTAQEADM

SEQ ID NO: 192080 - protein, 154 aa, Zea Mays
MGSQSIISRTFSIINQSQSRSCFPRVKVVHTSLQRDNRYYERENLLMVIKNNLLWHHLSMGLGYDDSNSNDSGVSPSSDRANNIEVATVSPVPAVVKKQARFLVASPRSPDVNETMMEELHELCEAREAGTAFIMEHSACGDQARVVTAQEADM

SEQ ID NO: 192081 - protein, 267 aa, Zea Mays
MPRRNPPPPPREQSNSFFTAWKLKGRRCTVRGLSDTEIQNSWKSRAEQPQPEPKCEKDPFNSFVADFDTHNLNIAVGKASELELEVSNLKEQLKKITLEKAEMTTKHEKLSAICRSQRQEIQELKLTLVEPTPPSNKVSSRTQDSGSQRKEKIQGTVWELEQGMLAIASNSSSASSDAKTWQAFPDTKTQARPKVDHATNGSQNITKNTTSGASPDAWGFGTDNFRTPATTLRATTQINRAAAQRSSSQRFNAGVAKVEQPSGWAGF

SEQ ID NO: 192082 - protein, 348 aa, Zea Mays
MSLTSKAQNNSLSNNVFRGLSDTEIQNSWKSRAEQPQPEPKCEKDPFNSFVADFDTHNLNIAVGKASELELEVSNLKEQLKKITLEKAEMTTKHEKLSAICRSQRQEIQELKLTLVEPTPPSNKVSSRTQDSGSQAFPDTKTQARPKVDHATNGSQNITKNTTSGASPDAWGFGTDNFRTPATTLRATTQINRAAAQRSSSQRFNAGVAKSQSRSCFPRVKVVHTSLQRDNRYYERENLLMVIKNNLLWHHLSMGLGYDDSNSNDSGVSPSSDRANNIEVATVSPVPAVVKKQARFLVASPRSPDVNETMMEELHELCEAREAGTAFIMEHSACGDQARVVTAQEADM

SEQ ID NO: 192083 - protein, 254 aa, Zea Mays
MSLTSKAQNNSLSNNVFRGLSDTEIQNSWKSRAEQPQPEPKCEKDPFNSFVADFDTHNLNIAVGKASELELEVSNLKEQLKKITLEKAEMTTKHEKLSAICRSQRQEIQELKLTLVEPTPPSNKVSSRTQDSGSQRKEKIQGTVWELEQGMLAIASNSSSASSDAKTWQAFPDTKTQARPKVDHATNGSQNITKNTTSGASPDAWGFGTDNFRTPATTLRATTQINRAAAQRSSSQRFNAGVAKVEQPSGWAGF

SEQ ID NO: 192084 - protein, 276 aa, Zea Mays
MRSDTEHGRVLSRCCHVSVDAVVAIAHKKPRFVERLVFNIWMRKSRTPTSSALPGSPRRPSSPTSLGSASNGRKTCWWKGVFHKYEDSLLSTELDYLPNNTHELSNCAHKRTPVMPRRNPPPPPREQSNSFFTAWKLKGRRCTVRGLSDTEIQNSWKSRAEQPQPEPKCEKDPFNSFVADFDTHNLNIAVGKASELELEVSNLKEQLKKITLEKAEMTTKHEKLSAICRSQRQEIQELKLTLVEPTPPSNKVSSRTQDSGSQVIYLHMSNTAYSLS

SEQ ID NO: 192085 - protein, 808 aa, Zea Mays
MLRHLVRTGQLADARSLFDAMPRRDEVAYATLLSGYAAAADFPGAMALFSRFRASSSQPHDAADPFILSPVLKACASAAASAGLLPLPHAAAAAALHAFAVRSSSLPSVFVSTALADAYAKAGRLDLALQVLDEMPSRNVVSWTTLVASLARAGRRHDALRRFAEMRASGVACDSHACSAALTACADAGLLPRGREVHALCAKLGLDAVPFVANALAALYARCGDVDRALAAVGRMGSHDVAVCTTLIASYVQTGRTEEAIEAFVRMLRDESSNSASPNEYTFSAVIAACPNMDRAYLGEQLHAQAARRGLSHARSVANSLVKLYSRRGHLSAADAIFRESVVKDVVSWSTIISGYTQEGLAEESFALFSEMRHHSSCPRPNEFTLASLFSVCASAASLDTGRQLHALAVAAGLEHHAMVRSALVNMYGKGGSMSDANVVFSNRTKDDVISWTAMIVGHAEHGHSKEAFELFEEMCRIGLKPDHVTFIGVLTACSHAGELELGLRYLNAMNKSYGLEPEKEHYGCVVDLLARAGRIHEAEELIGRIAAEERDGVVWTSLLRACAARGAEETGKIAAERMMEAEPWGSGAHVVMANLYASKGLWCEAAQERHLMKQKGVLKGAGWSSVEVGGDDRGVGVFVSGDRTNPQDSAIYMMLELMYYGAGMILHEVRIKRDSKREGRLRAWCELSHWVTRSHVRSSLFAFVGGRLASVYPLPQTPLMWETPALGLPLFAAICIVPFLPAMGDSVISSTPNLIVKECNKTVFISEMVLKKTQNLEEGNAESLAIFEHFSDSGNDMQSEYTEVVAH

SEQ ID NO: 192086 - protein, 778 aa, Zea Mays
MLRHLVRTGQLADARSLFDAMPRRDEVAYATLLSGYAAAADFPGAMALFSRFRASSSQPHDAADPFILSPVLKACASAAASAGLLPLPHAAAAAALHAFAVRSSSLPSVFVSTALADAYAKAGRLDLALQVLDEMPSRNVVSWTTLVASLARAGRRHDALRRFAEMRASGVACDSHACSAALTACADAGLLPRGREVHALCAKLGLDAVPFVANALAALYARCGDVDRALAAVGRMGSHDVAVCTTLIASYVQTGRTEEAIEAFVRMLRDESSNSASPNEYTFSAVIAACPNMDRAYLGEQLHAQAARRGLSHARSVANSLVKLYSRRGHLSAADAIFRESVVKDVVSWSTIISGYTQEGLAEESFALFSEMRHHSSCPRPNEFTLASLFSVCASAASLDTGRQLHALAVAAGLEHHAMVRSALVNMYGKGGSMSDANVVFSNRTKDDVISWTAMIVGHAEHGHSKEAFELFEEMCRIGLKPDHVTFIGVLTACSHAGELELGLRYLNAMNKSYGLEPEKEHYGCVVDLLARAGRIHEAEELIGRIAAEERDGVVWTSLLRACAARGAEETGKIAAERMMEAEPWGSGAHVVMANLYASKGLWCEAAQERHLMKQKGVLKGAGWSSVEVGGDDRGVGVFVSGDRTNPQDSAIYMMLELMYYGAGMILHEVRIKRDSKREGRLRAWCELSHWVTRSHVRSSLFAFVGGRLASVYPLPQTPLMWETPALGLPLFAAICIVPFLPAMGDSVISSTPNLIVKECNKTVFISEVSHGAATADK

SEQ ID NO: 192087 - protein, 79 aa, Zea Mays
MRRVTMSDNFVGRGPSSVRSTRGELAGRGRRWSLRATNARLEEVNLDLQREQGWLEVVSHPILKSKLNANHVRARIRIL

SEQ ID NO: 192088 - protein, 50 aa, Zea Mays
MQPRLLALLHLPHTLEEFHACLLCSHGRNGTTTRVVGSHQDVCYLPLLKE

SEQ ID NO: 192089 - protein, 120 aa, Zea Mays
MAWQFELDKIRQELNATSKKIGKLKASKQEEEAKKLMDSTDEIKKRLAAKEVEVQEAKSTLDAKVMTICNIVHESVPFSDGEANNKIVRAFGEKRVEDNLKNHVDLCRMLDIVALEKDIL

SEQ ID NO: 192090 - protein, 798 aa, Zea Mays
MRGGGGRQPSYAASDGADADAAAVPAASRKMVQSLKGILADRSEGEIYATLCDCGMDPDIAVERLISQDTFHEVRRKRDKKKETKVNQETRPRPFQKSIYGGYKAGSDRSGRANSIGGFKGPAKKEPELHASINSSALDVNTSATSETFSATGNVAQADAKNTFQPPSQVKHGWGGVPGRPSMAEIVKMGRPQAKVGSRSVASSIVMPAIGDSAIPNTPNLAPNEYNQTVFASEVGHGAADKLPNVADEVHSVSKDASSLDMLPSAEGTDVEAPSMSANMQGSSTPDANEDDVEKDTNLEEGNTESLTTPGQVSASGKGIHSEYTELVSHLDEGSMEKTDDFQLDALSFEHNLNLNGDVSTTTTQFDHLTLLDGPKLSDENPAVIIPGHLQVSNADCAHLTFGSFVYGTLDASLTTKPLESHGDIVTIPDDDYDQSEGRIHDDESKQSEVTRSNFLDVTSNTEYNLSSPPDYATSSAALQDSTSQSYLQENRQFQSISPLPSFMQIQNGLMSPAIPPLREFDPAFSLLLTNPPIMHGTTSSSMSSATVSTQPQENANPVGLPNPQLTQSQPSTSIAPGPPLPQHLLHPYAQTTLPLGYASMIGYPSLPPSYAYLPPAAFQQPYMNSGMFLHQAAAAVPNSSVKYPLPQYKSNIALASLPQPGSLLSSYVGGFGTANNMPGNFPLNQSTTSATATLGFDGTVPSHLEDGNQFVCLQQNENPAMWMHGAGSRGMPPLAASTMYGYQGQSHQTGLRQGQLPSQYGSALGQSQPGLGPEHRNPSDSNLSGAAQANQMWPNSY

SEQ ID NO: 192091 - protein, 609 aa, Zea Mays
MAEIVKMGRPQAKVGSRSVASSIVMPAIGDSAIPNTPNLAPNEYNQTVFASEVGHGAADKLPNVADEVHSVSKDASSLDMLPSAEGTDVEAPSMSANMQGSSTPDANEDDVEKDTNLEEGNTESLTTPGQVSASGKDLNGDVSTTTTQFDHLTLLDGPKLSDENPAVIIPGHLQVSNADCAHLTFGSFVYGTLDASLTTKPLESHGDIVTIPDDDYDQSEGRIHDDESKVTLAPAANEYVTSTSNSNVENLDITSVQQSEVTRSNFLDVTSNTEYNLSSPPDYATSSAALQDSTSQSYLQENRQFQSISPLPSFMQIQNGLMSPAIPPLREFDPAFSLLLTNPPIMHGTTSSSMSSATVSTQPQENANPVGLPNPQLTQSQPSTSIAPGPPLPQHLLHPYAQTTLPLGYASMIGYPSLPPSYAYLPPAAFQQPYMNSGMFLHQAAAAVPNSSVKYPLPQYKSNIALASLPQPGSLLSSYVGGFGTANNMPGNFPLNQSTTSATATLGFDGTVPSHLEDGNQFVCLQQNENPAMWMHGAGSRGMPPLAASTMYGYQGQSHQTGLRQGQLPSQYGSALGQSQPGLGPEHRNPSDSNLSGAAQANQMWPNSY

SEQ ID NO: 192092 - protein, 613 aa, Zea Mays
MSNVAQADAKNTFQPPSQVKHGWGGVPGRPSMAEIVKMGRPQAKVGSRSVASSIVMPAIGDSAIPNTPNLAPNEYNQTVFASEVGHGAADKLPNVADEVHSVSKDASSLDMLPSAEGTDVEAPSMSANMQGSSTPDANEDDVEKDTNLEEGNTESLTTPGQVSASGKADLNGDVSTTTTQFDHLTLLDGPKLSDENPAVIIPGHLQVSNADCAHLTFGSFVYGTLDASLTTKPLESHGDIVTIPDDDYDQSEGRIHDDESKQSEVTRSNFLDVTSNTEYNLSSPPDYATSSAALQDSTSQSYLQENRQFQSISPLPSFMQIQNGLMSPAIPPLREFDPAFSLLLTNPPIMHGTTSSSMSSATVSTQPQENANPVGLPNPQLTQSQPSTSIAPGPPLPQHLLHPYAQTTLPLGYASMIGYPSLPPSYAYLPPAAFQQPYMNSGMFLHQAAAAVPNSSVKYPLPQYKSNIALASLPQPGSLLSSYVGGFGTANNMPGNFPLNQSTTSATATLGFDGTVPSHLEDGNQFVCLQQNENPAMWMHGAGSRGMPPLAASTMYGYQGQSHQTGLRQGQLPSQYGSALGQSQPGLGPEHRNPSDSNLSGAAQANQMWPNSY

SEQ ID NO: 192093 - protein, 295 aa, Zea Mays
MQIQNGLMSPAIPPLREFDPAFSLLLTNPPIMHGTTSSSMSSATVSTQPQENANPVGLPNPQLTQSQPSTSIAPGPPLPQHLLHPYAQTTLPLGYASMIGYPSLPPSYAYLPPAAFQQPYMNSGMFLHQAAAAVPNSSVKYPLPQYKSNIALASLPQPGSLLSSYVGGFGTANNMPGNFPLNQSTTSATATLGFDGTVPSHLEDGNQFVCLQQNENPAMWMHGAGSRGMPPLAASTMYGYQGQSHQTGLRQGQLPSQYGSALGQSQPGLGPEHRNPSDSNLSGAAQANQMWPNSY

SEQ ID NO: 192094 - protein, 96 aa, Zea Mays
MRCGGVRLHDGLLAAMMRSGFPLSAAGLERPFPFYFSSVPDSCGMEWNVMPSFRQTDVELTFFYLSIHAPAGLVWMDGGDVLSNGIPCYRFRLILW

SEQ ID NO: 192095 - protein, 576 aa, Zea Mays
MPICSCEETIHEFEMLTRDAGRVQKDTLKKILELNADAEYLNKFGLNGRTDVESYKSCIPLCVHSDLEPYIHKIADGDSSPLLTGKPVTSLSLSSGTTQGRPKFLPFTDELLETTLQIFQTSYAFRNREYPIGRGKALQFIYGSKQVVTKGGILATTATTNLYRRARYKEGMKDIQSQCCSPDEVVFGSDFHQSLYCHLLCGLIYSDEVHQVFSTFAHSLVHAFQTFEEVWEDLCADIRDGVLSEKVTVPSVREAVTKILKPNPELADSIYKKCTGLSNWYGVIPALWPNAKYVYGIMTGSMEPYLKKLRHYAGHLPLISADYGASEGWVGANINPTLPPEQVTYAVLPQTGYFEFIPLEVENSASSIHYLESEPVGLTEVEVGKTYEVVITTFGGLYRYRLGDIVKVTGFHNATPELRFICRRSLVLSINIDKNTEQDLQLAVEEAAKLLDAEKLEIVDFTSFVEKSSDPGRYVIFWELSSDASEDVLRGCANCLDLAFVDAGYVGSRKIRAIGPLELRILKRGTFKEILDHFLSLGGAVSQFKTPRFVNPLNVKVLQILSRNTTRSYFSTAYGL

SEQ ID NO: 192096 - protein, 604 aa, Zea Mays
MAPAETHPSQFQSMLQATGDKSKILPVKMPICSCEETIHEFEMLTRDAGRVQKDTLKKILELNADAEYLNKFGLNGRTDVESYKSCIPLCVHSDLEPYIHKIADGDSSPLLTGKPVTSLSLSSGTTQGRPKFLPFTDELLETTLQIFQTSYAFRNREYPIGRGKALQFIYGSKQVVTKGGILATTATTNLYRRARYKEGMKDIQSQCCSPDEVVFGSDFHQSLYCHLLCGLIYSDEVHQVFSTFAHSLVHAFQTFEEVWEDLCADIRDGVLSEKVTVPSVREAVTKILKPNPELADSIYKKCTGLSNWYGVIPALWPNAKYVYGIMTGSMEPYLKKLRHYAGHLPLISADYGASEGWVGANINPTLPPEQVTYAVLPQTGYFEFIPLEVENSASSIHYLESEPVGLTEVEVGKTYEVVITTFGGLYRYRLGDIVKVTGFHNATPELRFICRRSLVLSINIDKNTEQDLQLAVEEAAKLLDAEKLEIVDFTSFVEKSSDPGRYVIFWELSSDASEDVLRGCANCLDLAFVDAGYVGSRKIRAIGPLELRILKRGTFKEILDHFLSLGGAVSQFKTPRFVNPLNVKVLQILSRNTTRSYFSTAYGL

SEQ ID NO: 192097 - protein, 604 aa, Zea Mays
MPSLSAAWFLPIPLAVKKGDKSKILPVKMPICSCEETIHEFEMLTRDAGRVQKDTLKKILELNADAEYLNKFGLNGRTDVESYKSCIPLCVHSDLEPYIHKIADGDSSPLLTGKPVTSLSLSSGTTQGRPKFLPFTDELLETTLQIFQTSYAFRNREYPIGRGKALQFIYGSKQVVTKGGILATTATTNLYRRARYKEGMKDIQSQCCSPDEVVFGSDFHQSLYCHLLCGLIYSDEVHQVFSTFAHSLVHAFQTFEEVWEDLCADIRDGVLSEKVTVPSVREAVTKILKPNPELADSIYKKCTGLSNWYGVIPALWPNAKYVYGIMTGSMEPYLKKLRHYAGHLPLISADYGASEGWVGANINPTLPPEQVTYAVLPQTGYFEFIPLEVENSASSIHYLESEPVGLTEVEVGKTYEVVITTFGGLYRYRLGDIVKVTGFHNATPELRFICRRSLVLSINIDKNTEQDLQLAVEEAAKLLDAEKLEIVDFTSFVEKSSDPGRYVIFWELSSDASEDVLRGCANCLDLAFVDAGYVGSRKIRAIGPLELRILKRGTFKEILDHFLSLGGAVSQFKTPRFVNPLNVKVLQILSRNTTRSYFSTAYGL

SEQ ID NO: 192098 - protein, 247 aa, Zea Mays
MASEAKEMKYRRRGRVPGPPEHGQRSDRSGALDWAALKHDPAELLRKLDEVRDQITRSCELMGPPPPDRHRAMSRRTVSLRPSYAEPPHAAGRAPDHYRSRYADRNRTSLPPSSYDHRSQRSVPDDEAYSRQPFRQQYYHERQRESHGFGHGRRHHSSCQCAHCLQSQRAPVVAPPKDHVPMARGGWSISGKRLRSSAGRRGAPRLFSCAPPVPISCSCRRGSSQAGRRIRSSAVLVQRSLLWSLSK

SEQ ID NO: 192099 - protein, 440 aa, Zea Mays
MSPSSTASYGRTDSEHGSNRSVQLKSVPASRSRFSNDPKDILCQGDTGGQVEASGQCTVSPQGPILVDKQMDPFSSQWKEKDYSGGNQIIRKECDINTKSDYEANARGESLGRKCIQKSKEGRKGGFEDEFSNGRTHGQKGRHGNTDSPEDGIVGNKYKHKADDVVISSLEDKDMSIKYEHNGSFRFEELSKRDEKCNKKDDNNILELESIARGCEQDRIKDDCGKLLHSDSRNGNTVAKNYSSVNEHTNSSSLVSSVAEVDDIQSSVGKNGDSSFFTGFLKKGLKDLSLFNQSVDSAKVYINGHPISERALRKSEKKVGPVGPGSYWYDYRAGFWGVFGQECRGIIPPFIKEFNYPMPKNCAGGSTGVFVNGRELHQKDFDLLVGRGLPRIPGKSYSVEISGSVIDDTTGTKLRGLGKLAPTIEKMKRGFGMHVPEETK

SEQ ID NO: 192100 - protein, 411 aa, Zea Mays
MPPTLGLLLAAAAAVLLLLLPPPPSAGAQETCWSGPAPRRGAWMSVASFGARGDGQTLNTGAFARAVARIARRRGARGGTLLYVPPGVWLTGPFNLTSHMTLFLARGAIVRATQPCLATIELISEQDTSSWPLIDPLPSYGRGRELPGGRYMSLIHGHGLQDVFITGENGTIDGQGGVWWDMWKKRTLPFTRPHLLELMYSTDVVVSNLVFQDSPFWNIHPVYCSNVVIANLTVLAPHDSPNTDGIDLGKVRFKQQRVRRGLLHLRRRRPDLHQERVGRVRRGLRPPKLRHHGPEDNRVGPVRRLRGRERDLGRRGGRRGRAPELLRRGRRGSREDKLGQGRLHPERHRLPGDPGRRPLRPEDRRRRWGPPRRVLQREPAPRHRRRGGQERLGPERPAGRAHTGHQGLGLQ

SEQ ID NO: 192101 - protein, 244 aa, Zea Mays
MAIPTAPALLFPSVLPNSFPRRTPWRHLVRRQPRHLRAGRPRLQAPAPAPPPVAEVAAERDDTPPLRLLEPPQEDDPFPPEMEPADPDFYRIGYARMMRAYGIEFLEGPDGMGVYASRDVEPLRRARVIMEIPLELMLTITQKKPWMFFPDIIPLGHPIFDVIESTDPETDWDLRLACLLLYAFDIEDNFWQLYSDFLPSVDECTSLLLAPKEDLMELEDEDLASQMLKHQERAIDFWQKHWIC

SEQ ID NO: 192102 - protein, 201 aa, Zea Mays
MLNHSPNANCFLHWRFKDRMLEVMIKAGQAIKKGDEMTIDYMSGVNSKFMERYGFSSPTNPWELINFSSPATIHMDSFLSVFNIAGLHDELYHNSALTSVVETDFVDGAVVAAARALPTWSDGDVPAIPSVERKSAQALQEECRQMLDSFPTTIEQDQQILDSDAHISKTREIAIKYRLHRKMLLQKIMDALDIYQDRILF

SEQ ID NO: 192103 - protein, 93 aa, Zea Mays
MWRRLQTLAPSLRRAAASSSPASARAVPLSTVPVAAFRRTSTLLSSPGDKPAPSKVEDVMPIATGLEREELEAELQGKKRFDMDPAVGPFGTK

SEQ ID NO: 192104 - protein, 161 aa, Zea Mays
MWRRLQTLAPSLRRAAASSSPASARAVPLSTVPVAAFRRTSTLLSSPGDKPAPSKVEDVMPIATGLEREELEAELQGKKRFDMDPAVGPFGTKESAVIESYYNKRIVGCPGAEGEDEHDVVWFWLEKDKPHECLVCSRYFVLKVIGDGGDPDGHDDEDDHH

SEQ ID NO: 192105 - protein, 136 aa, Zea Mays
MDMALSKKDPPDTSLVTDINIVNYKVFDMCMLKLHYLKLVSNTPAVSQPYMKFVGYVYNCLVTWEHCVKYQCLMYLVLLFFNRRHALTSMLSTDIACIWSRYVLKFLTTHFPSVFFLSRLPMLQDLNCSGQYKVLP

SEQ ID NO: 192106 - protein, 275 aa, Zea Mays
MALRKAYFSARPSPHFWKRVSKMVPGRSAEDCFNRIYTDLSTPTPIAPRPRASKTTFSPIGNFTLSDPKPPNILEPTVGMRKSAKQKSLVAQKTVRHLLQKHCRIDQAQEADHFSVFESSPSALQLNLSFDNSPGTPDSYMNSDSLGKHSGRSSARKKPFSRLRTKPSEPSPGVLKPIKNVILHERYIDKLARREGAKRPRRRAPAGSKAADSGKSLSEQQAGSLKAAKNALISEATDFISSFKTLQANSLAHAVENSEDEIECDASDCSHDDKE

SEQ ID NO: 192107 - protein, 184 aa, Zea Mays
MALRKAYFSARPSPHFWKRVSKMVPGRSAEDCFNRIYTDLSTPTPIAPRPRANSLGKHSGRSSARKKPFSRLRTKSSDPSPGVLKPIKNVILHERYIDKLARREGAKRPRRRAPAGSKAADSGKSLSEQQAGSLKAAKNALISEATDFISSFKTLQANSLAHAVENSEDEIECDASNCSHDDKE

SEQ ID NO: 192108 - protein, 78 aa, Zea Mays
MASSPWRPCARAPVAAALPLVAGTRKPHPQWCSAAQLPAPSTRPASSSLRALLCSPVLLAPEPSVLYPASTPPSVSRL

SEQ ID NO: 192109 - protein, 313 aa, Zea Mays
MREERNYGAPPRDGPGRGRGGRGGRTGPRRDFGDADAHGFEGGYGGGGGGFGDGGVARGENGEGRQAERGRGPRQPYRGGGRRGGYSDGQAGNEFGRPRRAYERHSGTGRGYGMKREGAGRGNWGTATDEGLEQDTVDAVNPEETTAVVEDEKKPEDAPQSEVEKDKEGAENEEEEKEPEDKEMTLEEYEKVLEEKRKALLSLKAEERKVEIDKELQAMQQLSVKKDGDEVFIKLGSDKDLKKKESAEREERGKKSLSINEFLKPAEGERYYNPSGRGRGRGRGGFRGGYNGGYRGPAAAPAIEDQAQFPALA

SEQ ID NO: 192110 - protein, 637 aa, Zea Mays
MYLVVSFISETRFLAMNMEDELEETEIEGFDAQTQTLFCQNAINDLLIQVLLATGGGHLVYLEIRDAKLVEVKHAQLEHEISCLDLNPIGEHLEYSSLAAVGMWTDISVRIFSLPDLVLIRKENLGGEIVPRSVLLCTLEGVSYLLCALGDGNLFSFLLNASTGELTDRKKVTLGTQPISLRTFSSKGTTHVFASSDRPTVIYSSNKKLLYSNVNLKEVNHMCPFNTAAFPDSLAIAKEGELSIGTIDDIQKLHIRTIPLNEQARRICHQEQSKTLAFCSFKYNQSVEESETHLIRLLDHQTFESLCVYPLDQYECGCSIISCSFVDDNNVYYCVGTAYVIPEENEPTKGRILVFAVEDGSLQLIVEKETKGAVYSLNAFNGKLLAAINQKIQLYKWMSREDGSHELQSECGHHGHILALYTQTRGDFIVVGDLMKSISLLVYKHEESAIEERARDYNANWMTAVEMLDDEVYVGAENGYNLFTVRKNSDAATDDERAKLEVVGEYHLGEFVNRFRHGSLVMRLPDSEIGKIPTVIFGTINGVIGIIASLPHDHYTFLEKFQSTLVKYIKGVGNMSHEQWRSFHNDKKTAEARNFLDGDLIESFLDLSRSKMEVVSKAMGVSVEDLSKIVEELTRLH

SEQ ID NO: 192111 - protein, 535 aa, Zea Mays
MWTDISVRIFSLPDLVLIRKENLGGEIVPRSVLLCTLEGVSYLLCALGDGNLFSFLLNASTGELTDRKKVTLGTQPISLRTFSSKGTTHVFASSDRPTVIYSSNKKLLYSNVNLKEVNHMCPFNTAAFPDSLAIAKEGELSIGTIDDIQKLHIRTIPLNEQARRICHQEQSKTLAFCSFKYNQSVEESETHLIRLLDHQTFESLCVYPLDQYECGCSIISCSFVDDNNVYYCVGTAYVIPEENEPTKGRILVFAVEDGSLQLIVEKETKGAVYSLNAFNGKLLAAINQKIQLYKWMSREDGSHELQSECGHHGHILALYTQTRGDFIVVGDLMKSISLLVYKHEESAIEERARDYNANWMTAVEMLDDEVYVGAENGYNLFTVRKNSDAATDDERAKLEVVGEYHLGEFVNRFRHGSLVMRLPDSEIGKIPTVIFGTINGVIGIIASLPHDHYTFLEKFQSTLVKYIKGVGNMSHEQWRSFHNDKKTAEARNFLDGDLIESFLDLSRSKMEVVSKAMGVSVEDLSKIVEELTRLH

SEQ ID NO: 192112 - protein, 417 aa, Zea Mays
MTSLCGGWLQSGSLAIAKEGELSIGTIDDIQKLHIRTIPLNEQARRICHQEQSKTLAFCSFKYNQSVEESETHLIRLLDHQTFESLCVYPLDQYECGCSIISCSFVDDNNVYYCVGTAYVIPEENEPTKGRILVFAVEDGSLQLIVEKETKGAVYSLNAFNGKLLAAINQKIQLYKWMSREDGSHELQSECGHHGHILALYTQTRGDFIVVGDLMKSISLLVYKHEESAIEERARDYNANWMTAVEMLDDEVYVGAENGYNLFTVRKNSDAATDDERAKLEVVGEYHLGEFVNRFRHGSLVMRLPDSEIGKIPTVIFGTINGVIGIIASLPHDHYTFLEKFQSTLVKYIKGVGNMSHEQWRSFHNDKKTAEARNFLDGDLIESFLDLSRSKMEVVSKAMGVSVEDLSKIVEELTRLH

SEQ ID NO: 192113 - protein, 504 aa, Zea Mays
MPGSIHISATQPPVITPLFLQVTVGNREYSGNIEQDALSFPVTSLRESMVIMLYSADGALISKSELKTKEIVESGTMDTVFALDSGGEIVLQIQFLLNDDDRKRIQEMLQVLFLLELGCLFSLLIMEERRVHSSMLVLIGDLLDSALSKRLTEKISNIRSKAAERSELQKSMSLDDLQERAVFPGIDADPRVKASRDSLLQGGVRLEDPGGSKQRLSQAEVEALASPVEGERRRLGLDVASGGGRGVVGEAEQEVSDGAGAVDAISTWPPDRPGPGSKKGDSIPESSKSSSAVKTMISSFEGTTTPQGIVSETDSGSRSTQAGKTAIIPVDDHHKASNHRSQHILVETIAPAQLQTIRTPKAAESRSRRRASKQHNELHPRTRRRSQAKQMQMQMQPRDYVERPLNYLVATSSTWIHPHICVTGATKQLKDLLELEHLNFQRTATKGQQGTRERKSDESIAAAAARARSGGFLMINGWLIVQGVRAAVVLTVCCGAMFFSSSSR

SEQ ID NO: 192114 - protein, 611 aa, Zea Mays
MPGSIHISATQPPVITPLFLQVTVGNREYSGNIEQDALSFPVTSLRESMVIMLYSADGALISKSELKTKEIVESGTMDTVFALDSGGEIVLQIQFLLNDDDRKRIQEMRNSAMKMKQQGLLGDGNELNFSDSALSKRLTEKISNIRSKAAERSELQKSMSLDDLQERAVFPGIDADPRVKASRDSLLQGGVRLEDPGGSKQRLSQAEVEALASPVEGERRRLGLDVASGGGRGVVGEAEQEVSDGAGAVDAISTWPPDRPGPGSKKGDSIPESSKSSSAVKTMISSFEGTTTPQGIVSETDSGSRSTQAGKTAIIPVDDHHKASNHRSQHILVETIAPAQLQTIRTPKAAESRSRRRASKQHNELHPRTRRRSQAKQMQMQMQPRDYAESGIPSVVGAIYTTHIPIIAPKVSVTAYFNRRHTERNHKTSYSITLQGVVDPDGAFTDVCIGWPGSMPDDQVLERSALQQRAAAGMMAGSWVVGGVSFPLTEWVLAPYAQANLTWAQHAFNEKVAEVRRVAVDAFARLKGRWACLQKRTEVKLQDLPVVLGACCVLHNICESRGEGMDPALRCDIDDDETVPENPVRSDGATKARDDIAHNLLHSGRAGTKFF

SEQ ID NO: 192115 - protein, 1289 aa, Zea Mays
MGRKKNVAIDDDEYFFPQDDAADPAPPPPAPAAADKEKSKKGGKKGKKGGKAAAPDDDDYEPPPPPPPAADEDDDGEPINLVFTGKKKKKKGATPAAPFSAFSALGEEGEDQDEEDPAPSAAAEPEAINDPAEDDDDVVDFDFSKAKKKKKKDKGPRSAPAKDEDVEPAPPPPPVAEEEDEEPPVIAAAAAKKPQKKKKKKGAFMMDGENVDQILAGMEDPQLMDEPEPEEVKAQDSVAAPDADDATGKKSKKKKKKGGFTMDVDGEEFDQILAVIDDLPPPEEEPEPKDPKDEGTAATAALVDDAEGKKSKKKKKKSGRTAKEEEELDKILAELDGVPPVEEDKPTQAPQSAALAKEDVGAAEDGNVEDKAEEGGEVESAAAKKKKKKKEKEKEKKAAAKGAESKKGEEQEAPKGKVDMKKLPKHVREMQEALARRKEAEERQKREEEERLRKEEEERLRREEEERKAEEAKRRRKEREKEKLLKKKQEGKLLTGKQKEEAKRLEAMRRQFLEQSELQKAEDAAPETKKRPIYDSKKKKAQSKATETAKVVEEQQEELNEVNNDEEEYVLVDQESQSQVEESDEKTEPDQETEEPKPEEDEEDEDEWDAKSWDDIDVNLPKISAFDEEEAKPIVKKAEPVQKQENNKAQPAIPAAKKLVPSVADSKKSETDDVGASNGNVKRHKKKGPVKEDNSKSGSDLRSPICCILGHVDTGKTKLLDCIRRTNVQEGEAGGITQQIGATYFPTENIRERTRELKADATLKVPGLLVIDTPGHESFSNLRSRGSSLCDIAILVVDIMHGLEPQTIESLNLLKSRDAVFIVALNKVDRLYGWKKCPNAPIVKALKQQNEDVKREFNMRLTDIVTQFKMQGVNTALYYKNKEMEDTFNIVPTSAVSGEGIPDLLLLLVQWTQKTMEEKLTFVDEVQCTVLEVKVVEGHGTTIDVVLVNGILHEGDQIVVCGMQGPIVTTVRALLTPHPMRELRVKGTYIHHKEIRAAQGVKISAQGLEHAIAGTALYVLGPDDDLDKLNEAVMEEMTRVRSRIDRSGEGVYVQASTLGSLEALTEFLKSPAVNIPFCDFSIGPVHKKDVMKASVMLERKKEYATILAFDVKVMPDARDLAEESGVRIFVADIIYHLFDQFTAYIKNLKEEKKKESAEEAVFPCVLKIMPNCVFNKKDPIVLGVDVLEGIAKVGTPLCIPSKEFIDIGKIASVEINHKQVDMATKGQKIIANNSDEQQRSFGRHFDMEDELVSRISRRSIDILKQNYREDLTTEDWKLVVKLKSILKIQ

SEQ ID NO: 192116 - protein, 116 aa, Zea Mays
MGRGPGPAFLPPSQQWVCKSEHCLKGVQTAVQHVSPYQQELEWELLSAYPVKNLLILGRLPQLKSTTSKLIWLQKAKRLLLRLLRTILMSSRGASADTLIWKMSLSAGYQEDLLIF

SEQ ID NO: 192117 - protein, 86 aa, Zea Mays
MTRTSPARGPRVRVWVEEGEQPRRCADGSQGHWGSLPEDCAAENREVDAGGGRGNGGVGLGAEAGRCAWRGKQFTGLRAVVRGGCG

SEQ ID NO: 192118 - protein, 418 aa, Zea Mays
MMGEAKENDVYEEELLDYEEDDDKTVDGSAAKPTGEVAKKGYVGIHSSGFRDFLLKPELLRAIQDCGFEHPSEVQHECIPQAILGMDVICQAKSGMGKTAVFVLSSLQQIDPVAGQVAALVLCHTRELAYQICHEFERFSKYLTEVKVAVFYGGVHIRKHKDLLKNECPHIVVGTPGRILALARDKDLSLKNVRHFILDECDKMLESLDMRRDVQEIFKMTPHDKQVMMFSATLSKEIRPVCKKFMQDPMEIYVDDEAKLTLHGLVQRKLNDLLDALDFNQVVIFVKSVSRAAELNKLLCECNFPSICIHSGMTQEERLTRYKNFKEGHKRILVATDLVGRGIDIERVNIVINYDMPDSADTYLHRVGRAGRFGTKGLAITFVSSASDSDVLNQVQERFEVDIKELPEQIDTSTYMPS

SEQ ID NO: 192119 - protein, 995 aa, Zea Mays
MIHRDLGLSSAHRLGGPAHATSSSSSSLQSLCSTSAPRQCSFHEASKSIYTLQIQAVGQLVSVQVAENAAMDVAGNPNLASDRLQVRHYSVPASSSWIAAITTVVFLTTAAVAALLTVSTSSLVAAGAVSRPSSYMISEPSRNVLRMACHIQIFALSRWLSANLPIEYYEFAKGVEWSIPYMRLPWEGPAADPYLGYSTMPAIAYSESELLDRSAVGGAANISSYRPRAQQGQPVTPAQIIPSDPVFPTEIPEDGKPTPPVQTPGGDATPPVMPVQTPLPLDGMPLTAMEYRSFFENPDMKPEAQIIMKLQDLDGWKYFGRNMFWLGVIGGGLILLHLLTLLYFKLRYRDRERRRHGYAALLLPRLEIMVVVLAMPCVAQAAAALIRGGTTCGLVVGIVLTAVLTSVLVALLLFLSLGITMGKLLQYREVHHEEGQEEYHWYQDLARRTLGAGKRGQWTWKDPRRAACLPRLGPLFEDLRGPPKYTRGGGGGKRRAEGGGPERRVIASEDENEGSRAPLVQQLLGVLRIYLTLLESVKRVAVGIVAGAHASSGRSSRAHAVAVLSVASFQLLFMLLGKPFVKKRVQLVETLSVASEVAVFAACLALIDRTASSGGWLPDGEARGVGLAMLGAFVLGFAAQVCNEWNALYRQARLLSADRSSFLDGAKTAGLGLLVLVLPSSALGDHRDPPPPDGGGGAGESVSASTAADGGRGGSSNNERWWLGQLWEMAKASFSKESNAMTSRIGSGSQISNRASATTPTSAGVATDTPTPSSSAAAAGTPTPIDGGTDNVVVAGEDGNVTVGSKRKLKSDVWLEFEQVTVGGKLKAECNWCKKHFVGDSKSDTTHLRSHLKTCQSKQCQKGLKQSILKLGKNEKGGAVVEKYVFDQVVARKELALMICVHEYPLSMVDHVGFRRFCAALQPLFKVVSRNTIKKDILDMYEVQRLSLVNSFQQCQSRIAVTTDMWTANHQKKGYMSVTVHFINDDWKLKSFLLR

SEQ ID NO: 192120 - protein, 1149 aa, Zea Mays
MGRGFCTDAAGHPFTRTPNSTFTLRFDRRSDSMNITATVAEKMVQIQGVTRLVQASNEEEGLRIYLAFAQPVLNSSEQILRALTATDAVAVHLTPTNRSTLGNRRFGYVVKKMSDAAAIVSVACDTSSIISRQGTPVVPAEPFTFLYDTQRPWVKLGTSTRRTSSRDILVLIKFAKPVFNFSSSAVQVSGGNVLSFHEASKSIYTLQIQAVGQLVSVQVAENAAMDVAGNPNLASDRLQVRHYSVPASSSWIAAITTVVFLTTAAVAALLTVSTSSLVAAGAVSRPSSYMISEPSRNVLRMACHIQIFALSRWLSANLPIEYYEFAKGVEWSIPYMRLPWEGPAADPYLGYSTMPAIAYSESELLDRSAVGGAANISSYRPRAQQGQPVTPAQIIPSDPVFPTEIPEDGKPTPPVQTPGGDATPPVMPVQTPLPLDGMPLTAMEYRSFFENPDMKPEAQIIMKLQDLDGWKYFGRNMFWLGVIGGGLILLHLLTLLYFKLRYRDRERRRHGYAALLLPRLEIMVVVLAMPCVAQAAAALIRGGTTCGLVVGIVLTAVLTSVLVALLLFLSLGITMGKLLQYREVHHEEGQEEYHWYQDLARRTLGAGKRGQWTWKDPRRAACLPRLGPLFEDLRGPPKYTRGGGGGKRRAEGGGPERRVIASEDENEGSRAPLVQQLLGVLRIYLTLLESVKRVAVGIVAGAHASSGRSSRAHAVAVLSVASFQLLFMLLGKPFVKKRVQLVETLSVASEVAVFAACLALIDRTASSGGWLPDGEARGVGLAMLGAFVLGFAAQVCNEWNALYRQARLLSADRSSFLDGAKTAGLGLLVLVLPSSALGDHRDPPPPDGGGGAGESVSASTAADGGRGGSSNNERWWLGQLWEMAKASFSKESNAMTSRIGSGSQISNRASATTPTSAGVATDTPTPSSSAAAAGTPTPIDGGTDNVVVAGEDGNVTVGSKRKLKSDVWLEFEQVTVGGKLKAECNWCKKHFVGDSKSDTTHLRSHLKTCQSKQCQKGLKQSILKLGKNEKGGAVVEKYVFDQVVARKELALMICVHEYPLSMVDHVGFRRFCAALQPLFKVVSRNTIKKDILDMYEVQRLSLVNSFQQCQSRIAVTTDMWTANHQKKGYMSVTVHFINDDWKLKSFLLR

SEQ ID NO: 192121 - protein, 1151 aa, Zea Mays
MGRGFCTDAAGHPFTRTPNSTFTLRFDRRSDSMNITATVAEKMVQIQGVTRLVQASNEEEGLRIYLAFAQPVLNSSEQILRALTATDAVAVHLTPTNRSTLGNRRFGYVVKKMSDAAAIVSVACDTSSIISRQGTPVVPAEPFTFLYDTQRPWVKLGTSTRRTSSRDILVLIKFAKPVFNFSSSAVQLITNTLGCFSFHEASKSIYTLQIQAVGQLVSVQVAENAAMDVAGNPNLASDRLQVRHYSVPASSSWIAAITTVVFLTTAAVAALLTVSTSSLVAAGAVSRPSSYMISEPSRNVLRMACHIQIFALSRWLSANLPIEYYEFAKGVEWSIPYMRLPWEGPAADPYLGYSTMPAIAYSESELLDRSAVGGAANISSYRPRAQQGQPVTPAQIIPSDPVFPTEIPEDGKPTPPVQTPGGDATPPVMPVQTPLPLDGMPLTAMEYRSFFENPDMKPEAQIIMKLQDLDGWKYFGRNMFWLGVIGGGLILLHLLTLLYFKLRYRDRERRRHGYAALLLPRLEIMVVVLAMPCVAQAAAALIRGGTTCGLVVGIVLTAVLTSVLVALLLFLSLGITMGKLLQYREVHHEEGQEEYHWYQDLARRTLGAGKRGQWTWKDPRRAACLPRLGPLFEDLRGPPKYTRGGGGGKRRAEGGGPERRVIASEDENEGSRAPLVQQLLGVLRIYLTLLESVKRVAVGIVAGAHASSGRSSRAHAVAVLSVASFQLLFMLLGKPFVKKRVQLVETLSVASEVAVFAACLALIDRTASSGGWLPDGEARGVGLAMLGAFVLGFAAQVCNEWNALYRQARLLSADRSSFLDGAKTAGLGLLVLVLPSSALGDHRDPPPPDGGGGAGESVSASTAADGGRGGSSNNERWWLGQLWEMAKASFSKESNAMTSRIGSGSQISNRASATTPTSAGVATDTPTPSSSAAAAGTPTPIDGGTDNVVVAGEDGNVTVGSKRKLKSDVWLEFEQVTVGGKLKAECNWCKKHFVGDSKSDTTHLRSHLKTCQSKQCQKGLKQSILKLGKNEKGGAVVEKYVFDQVVARKELALMICVHEYPLSMVDHVGFRRFCAALQPLFKVVSRNTIKKDILDMYEVQRLSLVNSFQQCQSRIAVTTDMWTANHQKKGYMSVTVHFINDDWKLKSFLLR

SEQ ID NO: 192122 - protein, 129 aa, Zea Mays
MKHTSLYRSSDVLSNFDKADSKPRGNSPPPPPQLRQLPSVEPPPAAAEVEVEGRPTRRSTPCPARSSILRRRGSLSGFSTSHCPSRSPPVRWLNSGMHYAFSPHPMDDQYLVVNSYAAKKYLSWIGLTC

SEQ ID NO: 192123 - protein, 152 aa, Zea Mays
MLLLLGIGCSAAVARAWDLAQEPTPDIPSSSPAGDVVFVFRAGQRPRGNSPPPPPQLRQLPSVEPPPAAAEVEVEGRPTRRSTPCPARSSILRRRGSLSGFSTSHCPSRSPPVRWLNSGMHYAFSPHPMDDQYLVVNSYAAKKYLSWIGLTC

SEQ ID NO: 192124 - protein, 186 aa, Zea Mays
MIRKTTVLDVMRRLLQTKNIMVSSYARTKEASQAKYISILNIIQGEVDPTQVHESLQRIRERKLVNFIDWAPASIQVALSRKSPYVQTTHRVSGLMLANHTSIRHLFSKCLGQYEKLRKKQAFLDNYRKFPMFADNDLSEFDESREIIESLVDEYKACESPDYIKWGMEDPGEANVVAALDSKLVV

SEQ ID NO: 192125 - protein, 248 aa, Zea Mays
MASSLNGLSVGDSLPDNIMESPARSETASCYRDEILSQYSPMSEDSDDYRCYDTQLNPSGNHPDAMISPSTSPMSSPHRHQRPQSSLLPSNPYPLPSCSLSSVVCSHARRGSDNEGRFPSSPNDMCHVADLRRTALLRSVQMRVQGPHSYDLSFGIRQGQDHAHEHEGEHDHEHEHLEDLEGTEGSSCNKSIVNEVTYNQRRDHDFGRSEHEIDYINNSTSDDCVSDLKFKQEDKSHSKFDIPMHKNS

SEQ ID NO: 192126 - protein, 348 aa, Zea Mays
MTQGGIPPSTNPASLLKEAIHVISCGYEDKTEWGKEIGWIYGSVTEDILTGFKMHARGWQSIYCMPPRPCFKGSAPINLSDRLNQVLRWALGSVEILLSRHCPIWYGYNGRLKLLERLAYINTIVYPITSIPLIAYCVLPAICLLTNKFIIPEISNYAGMFFILLFASIFATGILELRWSGVGIEDWWRNEQFWVIGGTSAHLFAVFQGLLKVLAGIDTNFTVTSKASDEDGDFAELYVFKWTSLLIPPTTVLVINLVGMVAGISYAINSGYQSWGPLFGKLFFSIWVILHLYPFLKGLMGRQNRTPTIVIVWSILLASIFSLLWVKIDPFISPTQKAAALGQCGVNC

SEQ ID NO: 192127 - protein, 234 aa, Zea Mays
MQWAGLRSQAPVPTAAWTGPRPRTARCPQGRFPTARRALVASAAASDANSSSNSPGKDEEGEEVVRREKEEKAVASLLMRSQKYAMLKQQLAVAAQFEDYKEAARLRDSLRSFEEKEPVLCLRRLMKKAIEEERFEDAAKYRDELKILAPHSLLKCSSDATTLGIRVQVRSVYIESRSQPLKGQFFFAYRIRITNSSQRPVQLLKRHWIVTDGNGRTENICSGRTTCHIPEDWF

SEQ ID NO: 192128 - protein, 82 aa, Zea Mays
MYSMELRACYMYYTVPFYFSHHGITLVIAAFDYIVYQLSKIWCFLLELQCKMFDMTVGASNGHSDGALHCILHSAWSPSATF

SEQ ID NO: 192129 - protein, 631 aa, Zea Mays
MGGRGAPDATRMLVVAVVGVMVAAAAVLCPAPAAAGKLGKQAKALVAVKAALHDPGNALWDWDLKFGNDPCHWNMVTCHEGQIQELSMTNKNLSGTLSPAIGKIRSLRYLLLHQNAISGPIPDTIGRMKLLEVLDLSNNHFSGSIPSTLGNLANLQYLRLNNNSLSGPIPESLATDALMIFNLDVSFNNLSGHRPAFRTWNVFFEGNPFLSDIGSESIAAPVAPKDVKEEDLQFMSKSIFMLLVCIAIGCSLVAVVTGAVLFWKRRQRERVFAVADVSVHHDPEGCLGHLKQYSFQEMRMATNNFSQRNILGEGGYGIVYKGDLPDGTTVAVKRLKDHDSVVGDDQFHTEVEVISLAVHRNLLHLNGFCVANNERLLVYPYMPNGTVASKLKECVDGEPALDWAKRKRIALGASQGLLYLHEQCDPKIIHRDIKASNVLLDEYLEAVVADFGLAKLVDHWMSHVVTSVRGTIGRIPPEYYLSGHASEKTDVFCFGLLLIELVTGRSTLELHENEFDKGGIIELAKELLEQNKLSMFVDRKLGSNYDSAELEEMVQIALLCTMYRSCHRPRMSEIVKMLEGGDGVAEKWQAMKDIEEPNPDSSSEFVCIGINYDVDECNSIELQAVELSGPR

SEQ ID NO: 192130 - protein, 629 aa, Zea Mays
MGGRGAPDATRMLVVAVVGVMVAAAAVLCPAPAAAGKLGKQAKALVAVKAALHDPGNALWDWDLKFGNDPCHWNMVTCHEGQIQELSMTNKNLSGTLSPAIGKIRSLRYLLLHQNAISGPIPDTIGRMKLLEVLDLSNNHFSGSIPSTLGNLANLQYLRLNNNSLSGPIPESLATDALMIFNLDVSFNNLSGHRPAFRTWNVFFEGNPFLSDIGSESIAAPVAPKDVKEEDLQFMSKSIFMLLVCIAIGCSLVAVVTGAVLFWKRRQRERVFAVADVHHDPEGCLGHLKQYSFQEMRMATNNFSQRNILGEGGYGIVYKGDLPDGTTVAVKRLKDHDSVVGDDQFHTEVEVISLAVHRNLLHLNGFCVANNERLLVYPYMPNGTVASKLKECVDGEPALDWAKRKRIALGASQGLLYLHEQCDPKIIHRDIKASNVLLDEYLEAVVADFGLAKLVDHWMSHVVTSVRGTIGRIPPEYYLSGHASEKTDVFCFGLLLIELVTGRSTLELHENEFDKGGIIELAKELLEQNKLSMFVDRKLGSNYDSAELEEMVQIALLCTMYRSCHRPRMSEIVKMLEGGDGVAEKWQAMKDIEEPNPDSSSEFVCIGINYDVDECNSIELQAVELSGPR

SEQ ID NO: 192131 - protein, 324 aa, Zea Mays
MKPRRFGYGYGYGYGRVRRAAALLLLLLLCLCLSSLFLLLLHGSSTPLEPAAAAAAAEARVAEAQAEVEEAPLPPGNSKGDKEGRFSILVHSRPGFVLTRATTRSRFFYNRQVNDSIQVDWGEASMITAERILLSHALKDPLNDRFVFVSDSCVPLYNFSYTYDYIMSSSTSFVDSFADTKAGRYNPRMDPVIPVENWRKGSQWAVLIKKHAEVVVDDEVVLPEFQKHCRRRPLPEFWRDWDRPIPAEAWKAHNCIPDEHYVQTLLAQSGLEEELTRRSVTHSAWDLSASKDRERRGWHPVTYKVSDATTRLIKSIKGYQHRFL

SEQ ID NO: 192132 - protein, 237 aa, Zea Mays
MLSRIHSMTALFLYLTGSSLCGSCVPLYNFSYTYDYIMSSSTSFVDSFADTKAGRYNPRMDPVIPVENWRKGSQWAVLIKKHAEVVVDDEVVLPEFQKHCRRRPLPEFWRDWDRPIPAEAWKAHNCIPDEHYVQTLLAQSGLEEELTRRSVTHSAWDLSASKDRERRGWHPVTYKVSDATTRLIKSIKDIDNIYYETENRREWCTSNGKPAPCFLFARKFTRGAGLKLLDSSLIASK

SEQ ID NO: 192133 - protein, 178 aa, Zea Mays
MDPVIPVENWRKGSQWAVLIKKHAEVVVDDEVVLPEFQKHCRRRPLPEFWRDWDRPIPAEAWKAHNCIPDEHYVQTLLAQSGLEEELTRRSVTHSAWDLSASKDRERRGWHPVTYKVSDATTRLIKSIKDIDNIYYETENRREWCTSNGKPAPCFLFARKFTRGAGLKLLDSSLIASK

SEQ ID NO: 192134 - protein, 78 aa, Zea Mays
MQVPFDCFTFREYFSSHKCKGTGPRKRHKITGLSFYSVCDYHILFCCFIERHDTCCKELSSFLLFPRIARPLTHDSAL

SEQ ID NO: 192135 - protein, 128 aa, Zea Mays
MASSPQTNHAFIYDNKIASRSHYNKSYVHVAFNDSHAMFASSSTFVHGRSRPKRNHVVSHARRRMCHEPSTIYHACNTSFVLSCKNTKVVAKKLGSKCKGDKTCIWVPKVIVTNLVGPNKSWVPKTQA

SEQ ID NO: 192136 - protein, 109 aa, Zea Mays
MQCPNCRKIEKGNWLYANGFRPAHDVSMDEWAHDEDLYDVSYSEMPFRFHWCPFGRLAQLPSLFEYVLLQMIIFYYCLAFCSNILNTQFYLIDYFWPVGLTYKPHYLHM

SEQ ID NO: 192137 - protein, 130 aa, Zea Mays
MVKKICRFVYKHGRDHDLMRCLDFLFADIGKIKKFNTCINMAKKICRFVYKHGRVHDLMRDKIGQDLVRPAVTRFATSFLTLTSMYKHRNGLKKFIVMNGMLLASLPLKKVGKLRTLSFQCHFGINWNGA

SEQ ID NO: 192138 - protein, 765 aa, Zea Mays
MARWLQSAGLQHLATSSAAGAGGADYRGGMPGFGGAGAGSMLSSLLMQGYGPESIEEKQRLYTLLRGLNFSGESVPTSISEPYTPTAQSFGGGNPVEGFYSPELRGDLGAGLLDLHAMDDTGLLSEDVASEPFEPSPFMPKDIDDDDEDVIAGSQQASVDNYGVVTSEKETTARENNVAKIKVVVRKRPLNRKELSRKEEDIITVEDSSFLTVYEPKLKVDLTAYVEKHEFCFDAVLDEHVSNDEVYRETVEPIIPIIFQRTKATCFAYGQTGSGKTYTMQPLPLRAAQDMVRLLHQPVYRNQNFKLWLSYFEIYGGKLFDLLSDRRQLLMREDGKKQVCIVGLQEFEVSDVQIVKEYIERGNAARSTGSTGANEESSRSHAILQLAVKKHIIVKDTRRQRDRDANEAKNTKAVGKISFIDLAGSERGADTTDNDRQTRIEGAEINKSLLALKECIRALDNDQIHIPFRGSKLTEVLRDSFVGNSRTVMISCISPNAGSCEHTLNTLRYADRVKSLSKGGNTRKEQSTGPTTTSSRDSLSALSYSLPAEAEEIPNQVQEKRPVDTYRKGTENFISNPSVESDRNSFSTIPNYSNRGREENGAASGNDRESYDLKSSQPAYTSKPQLVQNSANTQEEEKVTKVSPPRRKAYREDKSDRQSNYMKKDNGPETSRVGYKMQQAKQLQQQQRPASASASSRQSEKESSCDDVEIDAILEEEEALIAVHRKEIENTMEIVREMQLSSPLCKQGLPPSQDQGDFDMDRQHD

SEQ ID NO: 192139 - protein, 715 aa, Zea Mays
MPGFGGAGAGSMLSSLLMQGYGPESIEEKQRLYTLLRGLNFSGESVPTSISEPYTPTAQSFGGGNPVEGFYSPELRGDLGAGLLDLHAMDDTGLLSEDVASEPFEPSPFMPKDIDDDDEDVIAGSQQASVDNYGVVTSEKETTARENNVAKIKVVVRKRPLNRKELSRKEEDIITVEDSSFLTVYEPKLKVDLTAYVEKHEFCFDAVLDEHVSNDEVYRETVEPIIPIIFQRTKATCFAYGQTGSGKTYTMQPLPLRAAQDMVRLLHQPVYRNQNFKLWLSYFEIYGGKLFDLLSDRRQLLMREDGKKQVCIVGLQEFEVSDVQIVKEYIERGNAARSTGSTGANEESSRSHAILQLAVKKHIIVKDTRRQRDRDANEAKNTKAVGKISFIDLAGSERGADTTDNDRQTRIEGAEINKSLLALKECIRALDNDQIHIPFRGSKLTEVLRDSFVGNSRTVMISCISPNAGSCEHTLNTLRYADRVKSLSKGGNTRKEQSTGPTTTSSRDSLSALSYSLPAEAEEIPNQVQEKRPVDTYRKGTENFISNPSVESDRNSFSTIPNYSNRGREENGAASGNDRESYDLKSSQPAYTSKPQLVQNSANTQEEEKVTKVSPPRRKAYREDKSDRQSNYMKKDNGPETSRVGYKMQQAKQLQQQQRPASASASSRQSEKESSCDDVEIDAILEEEEALIAVHRKEIENTMEIVRERLINQAA

SEQ ID NO: 192140 - protein, 554 aa, Zea Mays
MPGFGGAGAGSMLSSLLMQGYGPESIEEKQRLYTLLRGLNFSGESVPTSISEPYTPTAQSFGGGNPVEGFYSPELRGDLGAGLLDLHAMDDTGLLSEDVASEPFEPSPFMPKDIDDDDEDVIAGSQQASVDNYGVVTSEKETTARENNVAKIKVVVRKRPLNRKELSRKEEDIITVEDSSFLTVYEPKLKVDLTAYVEKHEFCFDAVLDEHVSNDEVYRETVEPIIPIIFQRTKATCFAYGQTGSGKTYTMQPLPLRAAQDMVRLLHQPVYRNQNFKLWLSYFEIYGGKLFDLLSDRRQLLMREDGKKQVCIVGLQEFEVSDVQIVKEYIERGNAARSTGSTGANEESSRSHAILQLAVKKHIIVKDTRRQRDRDANEAKNTKAVGKISFIDLAGSERGADTTDNDRQTRIEGAEINKSLLALKECIRALDNDQIHIPFRGSKLTEVLRDSFVGSKVFPRAEIQEKSSPQDQLPLLAGILCQLYHIHCLLKLKKFLIKFKRRDQSILIGRALKILSPTLLWSLTEIPLVRFQIIPIEGEKKMVQHLVMTGRAMI

SEQ ID NO: 192141 - protein, 237 aa, Zea Mays
MLEKFRRDIEDHALSIRESKLSEMTRHAKDKLRKALAEPVESLFDAADQTTWQSIRNIYKRETEAILPEFLNNLCQFEMEYAPAEEMVSKLKDYARSVVESKAKEESSKVSIHMKERFTTVFSHDKDSIPRVWTGKEDVRAIVKEARSAALKLLSVMAAIRWDDEPDRIESILTSTLLEGSVVSKIASAASADPLASTTWEEVTLCWSVLAQANNGSTGVHVTPLYETRNRFLQSIQ

SEQ ID NO: 192142 - protein, 266 aa, Zea Mays
MMMTRAPMGPMEGAAVDEVVRRLVEGGRGGRQVQLSEAEIRQLCVDGKRVLLSQPNLLRIHAPVKICGDIHGQFVDLLRLFDLGGYPPASTYVFLGDYVDRGKQSLETICLLLAYKIRYPEKIFLLRGNHEDAKINRVYGFYDECKRRFNVRLWKIFSDCFNCLPIAALIDDKILCMHGGLSPEWTSLDQIKDIERPAEIPDYGLLCDLLWSDPSPDGEGWGESDRGVSCTFGADKLVEFLEKNDLDLICRAHQLKMVMSFLHNED

SEQ ID NO: 192143 - protein, 277 aa, Zea Mays
MMMTRAPMGPMEGAAVDEVVRRLVEGGRGGRQVQLSEAEIRQLCVDGKRVLLSQPNLLRIHAPVKICGDIHGQFVDLLRLFDLGGYPPASTYVFLGDYVDRGKQSLETICLLLAYKIRYPEKIFLLRGNHEDAKINRVYGFYDECKRRFNVRLWKIFSDCFNCLPIAALIDDKILCMHGGLSPEWTSLDQIKDIERPAEIPDYGLLCDLLWSDPSPDGEGWGESDRGVSCTFGADKLVEFLEKNDLDLICRAHQILKPTDMGPPHARKQIPNKPARG

SEQ ID NO: 192144 - protein, 146 aa, Zea Mays
MHGGLSPEWTSLDQIKDIERPAEIPDYGLLCDLLWSDPSPDGEGWGESDRGVSCTFGADKLVEFLEKNDLDLICRAHQVVEDGYEFFAQRRLVTIFSAPNYCGEFDNAGALLSIDESLMCSFQILKPTDMGPPHARKQIPNKPARG

SEQ ID NO: 192145 - protein, 102 aa, Zea Mays
MGIDLVAGGRNKKTKRPFLGQEDQEQLQCCHSQEALHEQNQSPTNLHAPPCQVHGRKGDDKRIQEVPAMKVTALRFTKPYVRSKGRKFEKARGRRNSRGFKV

SEQ ID NO: 192146 - protein, 203 aa, Zea Mays
MDATVVAIADDHDDSDCRRPLLAQNEEIHLYTEPPNRQHPPLDAAATQLEEQRKPERVASLDVFRGFTVAMMILVDDAGGAWPGINHAPWFGVTVADFVMPAFLFIIGVSAALVFKKMANKTAATKKAAIRASKLFILGVILQGGYIHGRHKLTYGVDLDHIRWLGVLQRIAIGYFVAAMSEIWLVNNNLRIAIGYFVAAMSE

SEQ ID NO: 192147 - protein, 325 aa, Zea Mays
MDATVVAIADDHDDSDCRRPLLAQNEEIHLYTEPPNRQHPPLDAAATQLEEQRKPERVASLDVFRGFTVAMMILVDDAGGAWPGINHAPWFGVTVADFVMPAFLFIIGVSAALVFKKMANKTAATKKAAIRASKLFILGVILQGGYIHGRHKLTYGVDLDHIRWLGVLQRIAIGYFVAAMSEIWLVNNNLVDSPVPFVKKYFIEWFMAIAITVLYVALVFGLYVANWEFEIQTSNSTLSIPSNSIETKMIQCGVRGSLGPPCNAVGLVDRVLLGENHLYKNPVYKRTKECSINSPDYGPLPPNAPDWCLAPFDPEGLLRIIHSEC

SEQ ID NO: 192148 - protein, 354 aa, Zea Mays
MGKEKSHINIVVIGHVDSGKSTTTGHLIYKLGGIDKRVIERFEKEAAEMNKRSFKYAWVLDKLKAERERGITIDIALWKFETTKYYCTVIDAPGHRDFIKNMITGTSQADCAVLIIDSTTGGFEAGISKDGQTREHALLAFTLGVKQMICCCNKMDATTPKYSKARYDEIVKEVSSYLKKVGYNPDKIAFVPISGFEGDNMIERSTNLDWYKGPTLLEALDQITEPKRPSDKPLRLPLQDVYKIGGIGTVPVGRVETGVIKPGMVVTFGPTGLTTEVKSVEMHHEALQEALPGDNVGFNVKNVAVKDLKRGFVASNSKDDPAKEAASFTSQVIIMNHPGQIGVLARSLRKSPSS

SEQ ID NO: 192149 - protein, 282 aa, Zea Mays
MLTVIAICKHHLSATHWMGSSVPLVVKWADTEKERQARKAQKSPFQSSNMLNANAMRQNSVFGALQMGYVPQYNGFGYQPQGTYGLMQYPPLSPVQNQAAFQNMVQPINQASSTRGANSELPPDLVPRSFNSTQLGSPYSPLPGLQYPGVYPGGPINHRPFSNSHSSTKVQNLNANLPSSSPSSNPAPQIEGPPGANLFIYHIPQEFGDHDLANAFHSFGRVLSAKVFVDKATGVSKCFGFVSYDSPASAQAAISVMNGYQLGGKKLKVQLKRDNSKHSKPF

SEQ ID NO: 192150 - protein, 359 aa, Zea Mays
MLPKNVTDAEMIDLFSKYGNIKDLQILRGSQQTSKAGCAFLKYETKEQAVAAIEALNGTHKIEFRMKDAYRDCNLQTSPISHTLDGTSSLHIIVLGSSVPLVVKWADTEKERQARKAQKSPFQSSNMLNANAMRQNSVFGALQMGYVPQYNGFGYQPQGTYGLMQYPPLSPVQNQAAFQNMVQPINQASSTRGANSELPPDLVPRSFNSTQLGSPYSPLPGLQYPGVYPGGPINHRPFSNSHSSTKVQNLNANLPSSSPSSNPAPQIEGPPGANLFIYHIPQEFGDHDLANAFHSFGRVLSAKVFVDKATGVSKCFGFVSYDSPASAQAAISVMNGYQLGGKKLKVQLKRDNSKHSKPF

SEQ ID NO: 192151 - protein, 304 aa, Zea Mays
MLPKNVTDAEMIDLFSKYGNIKDLQILRGSQQTSKAGCAFLKYETKEQAVAAIEALNGTHKIEFRMKDAYRDCNLQTSPISHTLDGTSSLHIIVLGSSVPLVVKWADTEKERQARKAQKSPFQSSNMLNANAMRQNSVFGALQMGYVPQYNGFGYQPQGTYGLMQYPPLSPVQNQAAFQNMVQPINQASSTRGANSELPPDLVPRSFNSTQLGSPYSPLPGLQYPGVYPGGPINHRPFSNSHSSTKVQNLNANLPSSSPSSNPAPQIEGLFSSALLEPICSYITFHKNLVTMILQMHFIVLVEY

SEQ ID NO: 192152 - protein, 80 aa, Zea Mays
MSSVRESQFKMIIVWSISLKLAAPLFFSNKQESCVSFLSKGEIGKRNPKTKTSTPHSPIINKIKGKNRGEVTPPHNPDYH

SEQ ID NO: 192153 - protein, 360 aa, Zea Mays
MTPSKPPGKRRRSAPPPRLPSPAPPVALSPPGFVADRAEAAARVERLLRYQFCDRALLEEALTHQSFSDGALSYQRLEFVGDAALGLAFSNFLYLTNPTLGPGALSTLRAANISTEKLARVAVRHDLYPLLRRKCPRLDLLVGQFIESVKQELMHDLATAPYGGSVVKAPKVLADIVEAIAAAVYVDCKFDLEKLWKVTRWLFEPIITAETIDEQPVTTLHELCQKHGKVAQFKTWQKDGMIVVNVFVGGEMVGLGSSEQKVIAKLNAARDALGKLIGGAKQQVLINCAANGLVDDIAELRECKQKLIEQCIRKHWPKPIFKGGSQPARDSYRFFQTRCQPARVWPALGLTGPSFFSHGS

SEQ ID NO: 192154 - protein, 290 aa, Zea Mays
MTPSKPPGKRRRSAPPPRLPSPAPPVALSPPGFVADRAEAAARVERLLRYQFCDRALLEEALTHQSFSDGALSYQRLEFVGDAALGLAFSNFLYLTNPTLGPGALSTLRAANISTEKLARVAVRHDLYPLLRRKCPRLDLLVGQFIESVKQELMHDLATAPYGGSVVKAPKVLADIVEAIAAAVYVDCKFDLEKLWKVTRWLFEPIITAETIDEQPVTTLHELCQKHGKVAQFKTWQKDGMIVVNVFVGGEMVGLGSSEQKSLGSVNRNLLSSASENIGQNLSLITTSTL

SEQ ID NO: 192155 - protein, 270 aa, Zea Mays
MTPSKPPGKRRRSAPPPRLPSPAPPVALSPPGFVADRAEAAARVERLLRYQFCDRALLEEALTHQSFSDGALSYQRLEFVGDAALGLAFSNFLYLTNPTLGPGALSTLRAANISTEKLARVAVRHDLYPLLRRKCPRLDLLVGQFIESVKQELMHDLATAPYGGSVVKAPKVLADIVEAIAAAVYVDCKFDLEKLWKVTRWLFEPIITAETIDEQPVTTLHELCQKHGKVAQFKTWQKDGMIVVNVFVGGEMVGLGSSEQKIRKRRWPCT

SEQ ID NO: 192156 - protein, 146 aa, Zea Mays
MQVGQFIESVKQELMHDLATAPYGGSVVKAPKVLADIVEAIAAAVYVDCKFDLEKLWKVTRWLFEPIITAETIDEQPVTTLHELCQKHGKVAQFKTWQKDGMIVVNVFVGGEMVGLGSSEQKSLGSVNRNLLSSASENIGQNLSLN

SEQ ID NO: 192157 - protein, 300 aa, Zea Mays
MECSDFMRACGMKLATAGYGVFGIDYEGHGKSMGARCYIHKFESLVADCDMFFKSICDMEGYRNKSRFLYGESMGGAVALLLHRKDPTFWDGAVLVAPMCKISEKVKPHPVVVTLLTQVEEIIPKWKIVPTKDVIDSAFKDPVKREKIRKNTLIYQDKPRLKTALELLRTSMDVEDSLSEVRMPFLVLHGEADAVTDPEVSRALYERAASADKTMKLYPGMWHGLTAGEPDDNVELVFSDIVSWLDKRSRHWEPDERVRRAPPEPENKRRVTSSSSQRPGSFLCGLGCRCRQHQQQCSRM

SEQ ID NO: 192158 - protein, 170 aa, Zea Mays
MEGYRNKSRFLYGESMGGAVALLLHRKDPTFWDGAVLVAPMCKISEKVKPHPVVVTLLTQVEEIIPKWKIVPTKDVIDSAFKDPVKREKEEHAHLPGQAPAEDGAGASQDQHGCGRQSVRGEDAVPRPARRGRRGDRPRGQPRPLRARGQRRQDHEALPGDVARPHRRRA

SEQ ID NO: 192159 - protein, 272 aa, Zea Mays
MMDVEYHEEYVRNARGVQLFTCVWLPAPSSAPTKALVFLCHGYGMECSDFMRACGMKLATAGYGVFGIDYEGHGKSMGARCYIHKFESLVADCDMFFKSICDMEGYRNKSRFLYGESMGGAVALLLHRKDPTFWDGAVLVAPMCKISEKVKPHPVVVTLLTQVEEIIPKWKIVPTKDVIDSAFKDPVKREKEEHAHLPGQAPAEDGAGASQDQHGCGRQSVRGEDAVPRPARRGRRGDRPRGQPRPLRARGQRRQDHEALPGDVARPHRRRA

SEQ ID NO: 192160 - protein, 59 aa, Zea Mays
MLQCLAVESPSPPCSGINTARDTTSGSLAVHVWHQGRRRPLWVYDVWAQGRDREMMIEQ

SEQ ID NO: 192161 - protein, 456 aa, Zea Mays
MAAAAGKARAVSLAAAVRVVAATARPASSAAAAAGVGAMALIVQGEDTAFGSLEWWAYAGISCFLVLFAGIMSGLTLGLMSLGLVELEILQRSGTDVEKAQAAAILPVVQRQHQLLVTLLLCNAVAMEILDCALGHNESALFRRAQLKALVSIHSKEAGKGGELTHDETTIISGALDLTEKTAAEAMTPIESTFSLDVDSKLDWEAIGKILARGHSRVPVYSGNPRNIIGLLLVKSLLTVRAETETPVSAVSIRRIPRVPSDMPLYDILNEFQKGSSHMAAVVKAKPKTEPPLDKTEPNREAVGPTQLTVPLLSNAEESADNVVVDIERPHNRQINGNTASNAVPRSSEDIEDGEVVGIITLEDVFEELLQEEIVDETDEYVDVHKRIRVAAAAAASSVARAPSVRRLTGQKAANLQGAQNRQGQQPPGILKKPTEGDSNPSKQVNLMEPLLEKGR

SEQ ID NO: 192162 - protein, 342 aa, Zea Mays
MTPCFAAVNTRQKQILDCALGHNESALFRRAQLKALVSIHSKEAGKGGELTHDETTIISGALDLTEKTAAEAMTPIESTFSLDVDSKLDWEAIGKILARGHSRVPVYSGNPRNIIGLLLVKSLLTVRAETETPVSAVSIRRIPRVPSDMPLYDILNEFQKGSSHMAAVVKAKPKTEPPLDKTEPNREAVGPTQLTVPLLSNAEESADNVVVDIERPHNRQINGNTASNAVPRSSEDIEDGEVVGIITLEDVFEELLQEEIVDETDEYVDVHKRIRVAAAAAASSVARAPSVRRLTGQKAANLQGAQNRQGQQPPGILKKPTEGDSNPSKQVNLMEPLLEKGR

SEQ ID NO: 192163 - protein, 283 aa, Zea Mays
MGTELMKSRVPCHTPKVAFICNNLQCRRNTREAIGKILARGHSRVPVYSGNPRNIIGLLLVKSLLTVRAETETPVSAVSIRRIPRVPSDMPLYDILNEFQKGSSHMAAVVKAKPKTEPPLDKTEPNREAVGPTQLTVPLLSNAEESADNVVVDIERPHNRQINGNTASNAVPRSSEDIEDGEVVGIITLEDVFEELLQEEIVDETDEYVDVHKRIRVAAAAAASSVARAPSVRRLTGQKAANLQGAQNRQGQQPPGILKKPTEGDSNPSKQVNLMEPLLEKGR

SEQ ID NO: 192164 - protein, 797 aa, Zea Mays
MEPDPVAAGASSSPPPSPAPATSPPWQTRDDDEPGAVDCADPGGDLNPAPPPSLQQGTVENAAVGSEVEQEEPKKEAMAGVGETLRSFMEEFGDQGEDSIILSPRLKDISTPDRPAALGFLGEKYNNLMERYKKYKKQVVKCSEECEPRYNGLKKKYTDECAERRRLYNELIELRGNIRVFCRCRPLSSDEVNRGCLSVVEIDPSQESELQFVPSEKERKPFKFDHVFGPEDDQGTGKTFTMEGVPENRGVNYRALEELFRTSEKRSASVAYTFSVSILEVYNEKIRDLLDESNDQSKRLDIKQNADGTQEVHGLVEAPVYNIDDVWEKLKFGAQNRSVGSTNSNELSSRSHSLVRVTVRSEHLVTYQRSRSHMWLVDLAGSERIAKTGVEGDRLKESQFINKSLSALGDVISALASKNSHIPYRNSKLTHLLQSSLGGDCKTLMFVQISPSSMDSGETLSSLNFASRVRTVEHGPARKQVDPAESLKFKQMTEKLRHEEKENAQLNQSLQLMQLKYASRENVFRTLNEKVKDAEQACRNYQQRIRELESELGNEKRVSRDSARSSRPPLVPTRQKQPHGRNAPPSGPSRWRLKAPTIHNKENIPVMMNKSNPGDDPNKAVGRARRVSLTPVIRQIPIQPKRRSSIAILPSVREHLSVLNEKRAASRLSQVNMPRRSVATFGLNLGPGTPLAGHGGPVDATPDGAKFRRFDLGSSSSKFTSPPPNVTPQRKMGMAPAGGPPNAAKLCFSIQKRVTPAHVRAKPGMGIFDPALRENMVVGRTGNALRVLNGKRRQSVV

SEQ ID NO: 192165 - protein, 263 aa, Zea Mays
MTTAAGMPGSPVGSAAAAGGPAAPEVAAMDAVIGWFRGEFAAANAMIDALCGHLAQIGGGGGAEYDPVFAALHRRRANWFPVLHMQKFYPVTDVNAELRRVAAARAAAGPCCYSEEEVASTVIHDPMEDLPSEAEPEPRPEHQQDPIHQDPAPEAEEADGTVINPALECHEEADAGADSSGDSSERKAPSTEDDTVPDGHHTDQGSQGEHILPESYPICSDHEECIARPERIKIQKGFVAKESVKGHMASSNFTPLGNLSVQD

SEQ ID NO: 192166 - protein, 293 aa, Zea Mays
MTTAAGMPGSPVGSAAAAGGPAAPEVAAMDAVIGWFRGEFAAANAMIDALCGHLAQIGGGGGAEYDPVFAALHRRRANWFPVLHMQKFYPVTDVNAELRRVAAARAAAGPCCYSEEEVASTVIHDPMEDLPSEAEPEPRPEHQQDPIHQDPAPEAEEADGTVINPALECHEEADAGADSSGDSSERKAPSTEDDTVPDGHHTDQGSQGEHILPESYPICSDHEECIARPERIKIQKGFVAKESVKGHMVNVVKGLKIYEDVFTTSEIMKVADFINEIRQAGRNGELSGRAKPW

SEQ ID NO: 192167 - protein, 469 aa, Zea Mays
MTTAAGMPGSPVGSAAAAGGPAAPEVAAMDAVIGWFRGEFAAANAMIDALCGHLAQIGGGGGAEYDPVFAALHRRRANWFPVLHMQKFYPVTDVNAELRRVAAARAAAGPCCYSEEEVASTVIHDPMEDLPSEAEPEPRPEHQQDPIHQDPAPEAEEADGTVINPALECHEEADAGADSSGDSSERKAPSTEDDTVPDGHHTDQGSQGEHILPESYPICSDHEECIARPERIKIQKGFVAKESVKGHMVNVVKGLKIYEDVFTTSEIMKVADFINEIRQAGRNGELSGETFIFFNKQMKGNKREIIQLGVPLFQPTTEEANCHTEPIPLVLQAVIDHLVLWQAPGQRRHHRLCPDPADRAGARGLGHGHASARHDGGRSACEAHGDGLVGHRRRQHQQVDEPQRHRCVPAVDGRAEAVQQAPSAAHPEAPVLCDDVAHRGAGLRTCPTSRRRRTCVFFFSLRAFGPPVI

SEQ ID NO: 192168 - protein, 378 aa, Zea Mays
MTTAAGMPGSPVGSAAAAGGPAAPEVAAMDAVIGWFRGEFAAANAMIDALCGHLAQIGGGGGAEYDPVFAALHRRRANWFPVLHMQKFYPVTDVNAELRRVAAARAAAGPCCYSEEEVASTVIHDPMEDLPSEAEPEPRPEHQQDPIHQDPAPEAEEADGTVINPALECHEEADAGADSSGDSSERKAPSTEDDTVPDGHHTDQGSQGEHILPESYPICSDHEECIARPERIKIQKGFVAKESVKGHMVNVVKGLKIYEDVFTTSEIMKVADFINEIRQAGRNGELSGETFIFFNKQMKGNKREIIQLGVPLFQPTTEEANCHTEPIPLVLQAVIDHLVLWRLIPESRKPNSVIINFFDEGHLSLTATATTRDLSHSH

SEQ ID NO: 192169 - protein, 262 aa, Zea Mays
MAPAALLPLAPLPHHPNPPRRPLCRCGASRRGFTVHTVIAIASVSDSASDPTAAAEATSPSPPPSLPTQTPSSKPGPPALGGIANTRSWSQYYGSGFSIRVPPSFDDILEPDDYNAGMTYYGDKAKPRAYAARFASPDRDELISVVIKPSNQLKITFLEAKDITDLGTLKEASKIFVPGDFCYLRIGCSGAKIFSARTIKVKEEEDIRTYYFYEFSLDKQHVALMATVNSGKTYIAGATAPEMKWGDDGVKLRSAAVSLSVS

SEQ ID NO: 192170 - protein, 149 aa, Zea Mays
MAPAALLPLAPLPHHPNPPRRPLCRCGASRRGFTVHTVIAIASVSDSASDPTAAAEATSPSPPPSLPTQTPSSKPGPPALGGIANTRSWSQYYGSGFSIRVPPSFDDILEPDDYNAGMTYYGDKAKPRAYAARFASPDSWCKNILGSNN

SEQ ID NO: 192171 - protein, 63 aa, Zea Mays
MQYNGSSSLISCEKQTIRIEFLSLQGKPKHTICRGTPSPHTSTVPIDSLATDQGSPPWRTMPH

SEQ ID NO: 192172 - protein, 105 aa, Zea Mays
MTDGELLWRASFTPAVPILTRMEGCLHVPHARAGAAQGVPHYYIYVHALSANFTFESIFSQRQIPNSDSSLIDCYLLPTKNRSRQESFIVLQICIYDQHLCVQYA

SEQ ID NO: 192173 - protein, 115 aa, Zea Mays
MTDGELLWRASFTPAVPILTRMEGCLHVPHARAGAAQGVPHYYIYVHALSANFTFESIFSQRQIPTFKKALHGPDKSRIDFMREIGATNFYQNFYIFMNDFIVANEYCNRLSILQ

SEQ ID NO: 192174 - protein, 51 aa, Zea Mays
MTNIEVILTMTDCHHHLKSMWHKAHIGSRLANFTNFNQILLTLKTITIRSL

SEQ ID NO: 192175 - protein, 84 aa, Zea Mays
MLPRHRTYHETFFSASVGYKHNLCHDQKSDDTKFLNCSRLTISLHHQFQHSCTHTISTTFPASYKHNMSLIISFLMYSSYICWT

SEQ ID NO: 192176 - protein, 69 aa, Zea Mays
MERTTLGGARSTVDAGGQRRRRGEHDVGVAEINPQPPLVHRRPRSRERRIGPWPLSTQPPSQRPRGDRG

SEQ ID NO: 192177 - protein, 97 aa, Zea Mays
MMVGNKSDLIHLRAISEDEGKALAEKEGLFFLETSAMEAINVEEAFQTIITEVYGIVNRKALAAKEAAATAAPLPSQGKTISIDSNAGNTKKACCST

SEQ ID NO: 192178 - protein, 1345 aa, Zea Mays
MATNVIVVNITLDGQNYPEWAFCVETALRGHGLLFHLTDAAPVLADDRRNAADIKTWQLNDGKVMAAMVNSVKPSMIMSLSKFKTAKSIWSHLKERFVQDSGALLHTLMQQTHVIEQNDMSIDEYYSAFDRLMSALTSMVPACTADPCPAHKFIEKFFTYRFVMGVRAEFDSLRARLLQGSDTLTMAKALSDLLAEETRLHSLSSTGGNPHSVLAAAQKPKNVFKPCDHCGKTNHRSELCFVKFPEKLTDFRARRAARGRGPGPSTRGSVAVAATSSASTSESAWVLDSGASFHVTSDQSKLASTTPVTDGASVQTADGTVCHITHKGSLSDPHFTVPNIFFVPDLSMDLLSVGQITDHNCFVGFDDSSCFVQDLRTGEVIGTGRRRRAAPRLYILDSLRLPSLATSPAHVLSATLASVASFAQWHHRLGHLCGSRLSTLIKSGCLGHTSVESNFHCKGCHLGKQIQLPYFTSNSHSVEPFDLVHSDIWGPAPFVSKGGYKYYVIFIDDHSRYTWIYFMKRRSELISIYKTFARMIHTQFSTHIKTFRSDSGGEYLSDNFRQFLTSEGTLAQLSCPGAHAQNGVAERKHRHIIETARTLLISSFVPSHFWGEAVSTAVYLINRQPSSKLSGKTPGEVLFGTPPRYDHLRVFGCTCYVLLSPRERTKLTAQSVECVFLGYSPEHKGYRCYDSSSRRMRISRDVSFNENRPFFYNSSTHSSFHSTESTAFMSLPPISETSSALPPTVSTPDVLIPITPPSTSTSSQSYSSKPPVTQTYIRRPRSNPTASPADDPVADTCTNNDDSHVVFNQGYHLRDRGTIAAPERYGFSRAGAVIAEPSSYKEASVIPEWQRAMTDELNALHRTCTWDVVPLPAGVVPITCKWVFKVKTKSDGSIERYKARLVARGFQQTQGIDYDETFAPVAHLTTVRALLAVAASSSWSISQMDVKNAFLHGDLHEEVYMHPPPGIEVPSGHVCRLRRALYGLKQAPRAWFERFVSVIKACGFYSSDHDPALFIHVSSRGRTLLLLYVDDMLITGDDPDHIAHVKTYLSKEFQMSDLGALSYFLGIEVLQTQNGIYLSQAKYIQDLLDRSGLSDTRTVATPMDLHLSLCPTDGTPLEDPSRYRHLVGSLVYLTVTRPDIAHAVQILSQFVSAPTSVHYGHLLRVLRYLRGTKTQCLFYDSNSPLQLHAYSDATWASDPTDRRSITGYCILLGSSPVAWKSKKQAAVSRSSTEAELRALATTTAEIIWIRWLLADLGVSCDSPTLLRCDNTGAIQICHDPVKRELTKHIGVDVSFTRSHCHQKTIDLQYVPSELQLADFFTKAQTRAQHQFHLLKLNASNPPLPP

SEQ ID NO: 192179 - protein, 411 aa, Zea Mays
MQEGQNARRFKKLYADKQDVLVPDIFWDYTSAKVLTMEWIEGVKLNQQAAIESQGLKVLDLVNIGIQCSLRQLLEYGYFHADPHPGNILATPEGKLAFLDFGMMSETPEDARVAIIGHVVHLVNRDYEAMARDYYALDFLEPDVDVSPIVPALKNFFDDALNATVSELNFKTIVDGLGAVLYQYPFNVPAYYALILRSLTVLEGLALYADPDFKVLAASYPYFAKRLLTDPNPYLRDALVELLFKDGRFRWNRLENLLVQGRQDREFAAKDALQPVLKLLLGPDGEELRVLVVKEAVRVTEAITIGTLIDSYNAAPAFLKPLISSGNPAGPFKFSEAEQEQMLELRDQVFRVWGLLRSSNNFDPSLLQPIVQVLQEPEARVLGSRVAGGVTQRLAARLLQQLLRIPSPGSS

SEQ ID NO: 192180 - protein, 710 aa, Zea Mays
MAATTSTTPAVSFSLPSPPHRQGAPRRRAPFLLRAASTAAPPSPDLSIQLSPRASPPASTNGAATALGRPVAASFARDRAEDLQAEARAMARAAGATVYSPELLASRYGSRPFKVALRAAEVLSKLASFGVKVLLDERRGESSSERRRARAVELRSILTRLGPTFVKIGQGLSTRPDLCPVEYLEELAELQDSLPTFPDEDAFACIERELGFTLDSIYSAISPSPIAAASLGQVYKAKLKYSGKLVAVKVQRPGIEDAIGLDFYLLRGLGFLINKYVDIVTSDVVALMDEFARRVFQELNYVQEGQNARRFKKLYADKQDVLVPDIFWDYTSAKVLTMEWIEGVKLNQQAAIESQGLKVLDLVNIGIQCSLRQLLEYGYFHADPHPGNILATPEGKLAFLDFGMMSETPEDARVAIIGHVVHLVNRDYEAMARDYYALDFLEPDVDVSPIVPALKNFFDDALNATVSELNFKTIVDGLGAVLYQYPFNAYYALILRSLTVLEGLALYADPDFKVLAASYPYFAKRLLTDPNPYLRDALVELLFKDGRFRWNRLENLLVQGRQDREFAAKDALQPVLKLLLGPDGEELRVLVVKEAVRVTEAITIGTLIDSYNAAPAFLKPLISSGNPAGPFKFSEAEQEQMLELRDQVFRVWGLLRSSNNFDPSLLQPIVQVLQEPEARVLGSRVAGGVTQRLAARLLQQLLRIPSPGSS

SEQ ID NO: 192181 - protein, 197 aa, Zea Mays
MALRTLASKNALSFALGGAARPSAASARGVTTVALPDLSYDFGALEPAISGEIMRLHHQKHHATYVANYNKALEQLDAAVAKGDASAVVQLQGAIKFNGGGHVNHSIFWKNLKPISEGGGEPPHGKLGWAIDEDFGSFEALVKRMNAEGAALQGSGWVWLALDKEAKKLSVETTANQGSNALWGYSKIQTRSGSSGD

SEQ ID NO: 192182 - protein, 161 aa, Zea Mays
MVERPAPSASPGSVPPMVLGFASTGPCPAPSPFPSSGIRRTLLQFFSSYGARVGVLDSSVWRAAPFSLSLCVSCSSLPVIYCSLALLARPPTTVVPRHAVAASLAPSVLAIACRGILLVLGHGICAPSSISRADLRACCSLARSGRGRRRVVEPRPPLLDS

SEQ ID NO: 192183 - protein, 360 aa, Zea Mays
MDGGSSWLPFLGRGIGDGVSGSRSSGSEVQRKEDDDLPISSQVEEELRQAMIMHARTLVICNCFTFFFYLLMGMERTGHPAERETTTALPPSSESSMFRSFPGSPADEASSLRPRSSNNNSTTANSYHHHPAEVSSQSHLTELSPVTYGGGHRHCDDHQCYVNLDTILKLDDEFKRCHDEQPHNERAQHKNGFRGGAFVPYTRHLGPKKKPKPPAGSGGQRAIKAAMAALARMHMVRLAQWQCYQMELVVAPAPPTGGINGNNQQQHVLSERKRREKLNDSFKALRTVLPPSSKKDKASTLMRARDYVSTLQSRVSELEEKNRMMLVQLQHRRNDVSPNKIEVDIRSNREEIRKHDRNFT

SEQ ID NO: 192184 - protein, 340 aa, Zea Mays
MDGGSSWLPFLGRGIGDGVSGSSGSEVQRKEDDDLPISSQVEEELRQFYLLMGMERTGHPAERETTTALPPSSESSMFRSFPGSPADEASSLRPRSSNNNSTTANSYHHHPAEVSSQSHLTELSPVTYGGGHRHCDDHQCYVNLDTILKLDDEFKRCHDEQPHNERAQHKNGFRGGAFVPYTRHLGPKKKPKPPAGSGGQRAIKAAMAALARMHMVRLAQWQCYQMELVVAPAPPTGGINGNNQQQHVLSERKRREKLNDSFKALRTVLPPSSKKDKASTLMRARDYVSTLQSRVSELEEKNRMMLVQLQHRRNDVSPNKIEVDIRSNREEIRKHDRNFT

SEQ ID NO: 192185 - protein, 65 aa, Zea Mays
MDNILSKAWILIKLQSRQLHYFSLTGPSIKIKQKKHPNFYEHILDHYAFTTSMIFELMRPNSNIY

SEQ ID NO: 192186 - protein, 398 aa, Zea Mays
MGRFEQVTPEGPETNQHDEQRSIRLHAFSDLSHVPAATFIYLLKDCYGYGTNKATSKFKILMQLVKVALHNGPQPGPFTYVVQCMYIVPLLGKTYSEGFSHMLTSSLKHLKSVESAQKDFLEAKHLAAQLVLDILDSIVPHENRILVKLLETFEIELRDMARALYDSELDDGDLMKAREHLRQQVKRCMESESNALAVTLITHFSIQCCDESFIIKLIKNNQLEIAEQCAIFMGKEMISLVVQKYLDMKMLKSANKLVKEHELTEEFPDVSYLYKESSVKKLAEKGCWDIAETRAKKDTKLLEYLVYLAMEAGYMEKVDELCKRYSIEVPEKVFCVSDYLDLKKLDVEEIVWVDEINGLLNATSDIEACKIIGMDCEWRPNFEKNTKSSKVTPWFVLV

SEQ ID NO: 192187 - protein, 283 aa, Zea Mays
MGRFEQVTPEGPETNQHDEQRSIRLHAFSDLSHVPAATFIYLLKDCYGYGTNKATSKFKILMQLVKVALHNGPQPGPFTYVVQCMYIVPLLGKTYSEGFSHMLTSSLKHLKSVESAQKDFLEAKHLAAQLVLDILDSIVPHENRILVKLLETFEIELRDMARALYDSELDDGDLMKAREHLRQQVYLAMEAGYMEKVDELCKRYSIEGYVDSLVPEKVFCVSDYLDLKKLDVEEIVWVDEINGLLNATSDIEACKIIGMDCEWRPNFEKNTKSSKVTPWFVLV

SEQ ID NO: 192188 - protein, 157 aa, Zea Mays
MAQAYHRHNWSVIIGSLQQIAQREGFRGMYRGLSPTVLALLPNWAVYFTVYEQLKSLLSSNDGSHQLSLGANVVAASCAGAATTTVTNPLWVVKTRFQTQGIRAGPMPYKGTLAALRRIAHEEGIRGLYSGLVPALAGISHVAIQFPCIREDKSLSG

SEQ ID NO: 192189 - protein, 76 aa, Zea Mays
MSLLPLTVAHLPQPPPLSPLASPPPPPLKPLSPPTTSSSVPEGWRTVESRRPTTHRQCPRRPMGGGTGRSGRATAL

SEQ ID NO: 192190 - protein, 483 aa, Zea Mays
MTGEQIQAPSSPRDGEDVAITIGRPKESGPKFGTMMGVFVPCLQNILGIIYYIRFTWIVGMSGVWQSLVLVSFCGACTFLTSISLSAIATNGAMKGGGPYYLIGRALGPEVGVSIGLCFFLGNAVAGSMYVLGAVETFLDAVPSAGLFQKSVTVVNNTLVNGTETAGTSTISTPSLHDLQVYGVIVTILLCFIVFGGVKIINKVAPAFLIPVLFSLLCIYLGVFIAPRHNAPKGITGLSITTLKDNWGENYQRTNNAGVPDPSGSIYWDFNALVGLFFPAVTGIMAGSNRSASLKDTQRSIPIGTLSATLSTTAMYLFSVLLFGALATREELLTDRLLTATVAWPAPAVIYIGIILSTLGAALQSLTGAPRLLAAIANDDILPVLNYFKVSEGSEPHAATLFTAFICICCVVIGNLDLITPTITMFFLLCYAGVNLSCFLLDLLDAPSWRPRWKFHHWSLSLVGALLCVGMVLNTLTILFCLS

SEQ ID NO: 192191 - protein, 604 aa, Zea Mays
MAGSNRSASLKDTQRSIPIGTLSATLSTTAMYLFSVLLFGALATREELLTDRLLTATVAWPAPAVIYIGIILSTLGAALQSLTGAPRLLAAIANDDILPVLNYFKVSEGSEPHAATLFTAFICICCVVIGNLDLITPTITMFFLLCYAGVNLSCFLLDLLDAPSWRPRWKFHHWSLSLVGALLCVVIMFLISWSFTVVSLALASLIYYYVSIKGKAGDWGDGFKSAYFQLALRSLRSLGANQVHPKNWYPIPLVFCRPWGKLPENVPCHPKLADFANCMKKKGRGMSIFVSIIDGDYHELAEDAKTACRQLDAYIDYKRCEGVAEIIVAPNMSDGFRSIVQTMGLGNLKPNIVVMRYPEIWRRENLTQIPSTFVSIINDCIIANKAVVIVKGLDEWPNEYQRQYGTIDLYWIVRDGGLMLLLSQLLLTKESFESCKIQVFCISEEDTDAEELKADVKKFLYDLRMQAEVIVVTMKSWESHMESSSNGAQQDNSHEAYTSAQQRIRTYLDEMKETAQTERQLLMENGRQVVNEQKVDKFLYTMFKLNSTILRYSRMAAVVLVSLPPPPLYHPSYFYMEYMDLLVENVPRMLIVRGYTRDVVTFFT

SEQ ID NO: 192192 - protein, 908 aa, Zea Mays
MARMLQLPLGAPRFSFISTFSAVCLKIPVPLKKDKKLRIIDNSNLKESGPKFGTMMGVFVPCLQNILGIIYYIRFTWIVGMSGVWQSLVLVSFCGACTFLTSISLSAIATNGAMKGGGPYYLIGRALGPEVGVSIGLCFFLGNAVAGSMYVLGAVETFLDAVPSAGLFQKSVTVVNNTLVNGTETAGTSTISTPSLHDLQVYGVIVTILLCFIVFGGVKIINKVAPAFLIPVLFSLLCIYLGVFIAPRHNAPKGITGLSITTLKDNWGENYQRTNNAGVPDPSGSIYWDFNALVGLFFPAVTGIMAGSNRSASLKDTQRSIPIGTLSATLSTTAMYLFSVLLFGALATREELLTDRLLTATVAWPAPAVIYIGIILSTLGAALQSLTGAPRLLAAIANDDILPVLNYFKVSEGSEPHAATLFTAFICICCVVIGNLDLITPTITMFFLLCYAGVNLSCFLLDLLDAPSWRPRWKFHHWSLSLVGALLCVVIMFLISWSFTVVSLALASLIYYYVSIKGKAGDWGDGFKSAYFQLALRSLRSLGANQVHPKNWYPIPLVFCRPWGKLPENVPCHPKLADFANCMKKKGRGMSIFVSIIDGDYHELAEDAKTACRQLDAYIDYKRCEGVAEIIVAPNMSDGFRSIVQTMGLGNLKPNIVVMRYPEIWRRENLTQIPSTFVSIINDCIIANKAVVIVKGLDEWPNEYQRQYGTIDLYWIVRDGGLMLLLSQLLLTKESFESCKIQVFCISEEDTDAEELKADVKKFLYDLRMQAEVIVVTMKSWESHMESSSNGAQQDNSHEAYTSAQQRIRTYLDEMKETAQTERQLLMENGRQVVNEQKVDKFLYTMFKLNSTILRYSRMAAVVLVSLPPPPLYHPSYFYMEYMDLLVENVPRMLIVRGYTRDVVTFFT

SEQ ID NO: 192193 - protein, 641 aa, Zea Mays
MLAFLIQVDQYIGISSKLNRMAGCALVGLFFPAVTGIMAGSNRSASLKDTQRSIPIGTLSATLSTTAMYLFSVLLFGALATREELLTDRLLTATVAWPAPAVIYIGIILSTLGAALQSLTGAPRLLAAIANDDILPVLNYFKVSEGSEPHAATLFTAFICICCVVIGNLDLITPTITMFFLLCYAGVNLSCFLLDLLDAPSWRPRWKFHHWSLSLVGALLCVVIMFLISWSFTVVSLALASLIYYYVSIKGKAGDWGDGFKSAYFQLALRSLRSLGANQVHPKNWYPIPLVFCRPWGKLPENVPCHPKLADFANCMKKKGRGMSIFVSIIDGDYHELAEDAKTACRQLDAYIDYKRCEGVAEIIVAPNMSDGFRSIVQTMGLGNLKPNIVVMRYPEIWRRENLTQIPSTFVSIINDCIIANKAVVIVKGLDEWPNEYQRQYGTIDLYWIVRDGGLMLLLSQLLLTKESFESCKIQVFCISEEDTDAEELKADVKKFLYDLRMQAEVIVVTMKSWESHMESSSNGAQQDNSHEAYTSAQQRIRTYLDEMKETAQTERQLLMENGRQVVNEQKVDKFLYTMFKLNSTILRYSRMAAVVLVSLPPPPLYHPSYFYMEYMDLLVENVPRMLIVRGYTRDVVTFFT

SEQ ID NO: 192194 - protein, 62 aa, Zea Mays
MAKSKNHTAHNQSFKAHKNGIKKPKRHRQTSTKGVRASLSLQLFASQHASRFEFESYPFAET

SEQ ID NO: 192195 - protein, 137 aa, Zea Mays
MEHDEEEELPSPSSSLGYLMLCRICHEEEDGGRATMESPCGCSGSLKYAHRRCVQRWCDEKGTAICEICLQNFEPGYTMPPKKTPVVETAVTIRYSTHAHILASICTNLLHCPMRSQVDGLIKKEHVCPCPPAFQRE

SEQ ID NO: 192196 - protein, 78 aa, Zea Mays
MQFSQAILCEHRNLVPISGSITRARQLNHQVITLLSSCPSYLDHGDPCTLVLLRNQGEDRKGKGYEHAGFGLQKNTNL

SEQ ID NO: 192197 - protein, 190 aa, Zea Mays
MPYTSYLLDYRHGGSFSRKHVKYDEIERVEAYRKVLKTWSRWVEAHIDPKRSTVLFMSVSPVHMQSEGWGSPNAVKCFSETQPAINYTKKLEVGTDWDLFAAAQRVTRSMEKVPVRFVDVTALSEIRKDAHTSVHTLRQGKLLTPEQKANPRKFADCIHWCLPGVPDTWNQFVYGHIVSSPPPPQDQPHR

SEQ ID NO: 192198 - protein, 539 aa, Zea Mays
MGFRGGLRPPVTRVCFVLLCLCASLSEAKRTPQPAPTTGKKQQPPAASSSQQSPAVSYPALPVRAVCLGGWLVTEGWILPSLFDGIPNKDLLDGTQLQFKSALRKTYLTADNGGGGAVVANRTQASDWETFKLWRLNDTTFNFRTSGNQFVGIGASDGIIVATATTPGLPETFQIVRCPFDKNRVRIKAANGYFVQAIATGEVIADYGEPTRWSDFDASVFLMTTVGQQLQGEYQLCNGYGADKAAPLLREHWSTYIVEDDFKFFASSGLTAVRIPVGWWIASDPSPPAPYVGGSLQALDNAFRWAEYHELGVIVDLHAAPGSQNPWEHSSSRDGTQEWGTTDASIAQTVQVIDFLASRYATSPRLLAVELLNEPLAPGATLDSLTRYYRDGYAAVRKHAPAAYVVMSNRLSSGNSTELLWFAGRGFPGAVVDVHYYTVFNSLFGNFTAQQNIDFVRTNFSGELAAVTTRDGPLTFVGEWVAEWKVPNATKEEYQKYAAAQMNVYGQATFGWAYWTAKNANNHWDLEWMIRNGYISLKG

SEQ ID NO: 192199 - protein, 189 aa, Zea Mays
MYGDLARTNFPGQDATTSAQAALSSTSAQAAPTAVEALQTGTSCESTTTSNHSDIASTSHKLEASDISSYLKEKCPAGSCGIQDGTPIVADKEVFGPLEPITNLPDGGDGFDIGEMLRMMESDPHNAGGADAGMGQPWYLDELDSSVLESMLQPEPEPEPEPFLMSEEPDMFLAGFESAGFVEGLERLN

SEQ ID NO: 192200 - protein, 74 aa, Zea Mays
MLVEKPSDPIDNDESKNQSADVSTSEDDSIREDIHETVCTIEPSLLNRKYIFMAFLVLLAAAVVFLLHEDGSPA

SEQ ID NO: 192201 - protein, 80 aa, Zea Mays
MTLDQNHAMPMQPPALQPGRAYGAEGSAVVHGSIRTVAGGPTLALNECQILVQQKPQGDSRLLASNLWCVLTVLYLVALC

SEQ ID NO: 192202 - protein, 82 aa, Zea Mays
MKELLYITMTHTSGEDAVGTIFHHRKLKANDIILNSEKRVFGVPGGMLFGFQSPSEVLWPTRRRFCPSRIWGSYGISIMFSD

SEQ ID NO: 192203 - protein, 206 aa, Zea Mays
MPGQGTFLPFAIVTFMLSRGFNFSEVWPAASSKTKLWVDPESSRARRRLPPNWICTCIVSRVWTPAMASREMIGDWCGSSSGAASSSSSTKSRRKMRWQTRLWPRANFSLQLKQSPSRRCSSISDWDKRRIGWPPVAGGVDRVGGASRANDGAGPDRRPRPPKRRAAGVCTACVMYCSRNSSLRAMLMAMTRDWGLCISTSRLSSG

SEQ ID NO: 192204 - protein, 264 aa, Zea Mays
MAESFVLSTGSRIPSVGLGVWQIQPDAANDAIYAAVKAGYRHIDCAAAYNNEEEVGLALKKLFEDGVVKRDDLFITSKLWAANHAPEDVEEGIDTTLQDLQLDYLDLYLIHGPIRIKKGTSTMTPENFLPTDIPATWAAMEKLYDSGKARAIGAFSPLGSPGSPWINGPSVLKNPIVVSVADKLQKTPAQVALRWGIQMGHSVLPKSANESRIKENIDIFGWSIPEDLMAKFSEIKQVRLLTAEFVVHPQAGYNTLEDFWDGEI

SEQ ID NO: 192205 - protein, 257 aa, Zea Mays
MAESFVLSTGSRIPSVGLGVWQIQPDAANDAIYAAVKAGYRHIDCAAAYNNEEEIHGPIRIKKGTSTMTPENFLPTDIPATWAAMEKLYDSGKARAIGVSNFSCKKLHDLLAVARVPPAVNQVECHPVWQQDKLRKLCQSNGVHLSAFSPLGSPGSPWINGPSVLKNPIVVSVADKLQKTPAQVALRWGIQMGHSVLPKSANESRIKENIDIFGWSIPEDLMAKFSEIKQVRLLTAEFVVHPQAGYNTLEDFWDGEI

SEQ ID NO: 192206 - protein, 629 aa, Zea Mays
MELDGKACAAVGQSGLMALYDMLFTQLDVSSSQLLVTDSDFENPNFRERLCETVESLLDLKVVPIFNENDAISTRKAPYEDSSGIFWDNDSLAGLLAIELKADLLVLLSDVDGLYSGPPSEPGSKIIHTYIKDKHYSGITFGDKSRVGRGGMTAKVKAAFVASNSGTPVVITSGFASQSIVRVLQGEKIGTLFHKDASLWEPSKDVSAREMAVAARECSRRLQNLSSDERKKILLDIADALEQNEDLIRTENEADVSAAQDAGYQKSLVDRLTLKPEKIASLAKSIRTLANMEDPINQILKRTEVAEDLVLEKTSCPLGVLLIVFESRPDALVQIASLAVRSGNGLLLKGGKEAMRSNTVLHKVITGAIPDNVGQKLIGLVTSRDEIADLLKLDDVIDLVIPRGSNKLVSQIKASTKIPVLGHADGICHVYIDKSADMNMAKRIVMDAKTDYPAACNAMETLLVHKDLIKAPGLDDILLSLKTEGVAIYGGPVAHEVLCIPKADSFHHEYSSMACTIEFVDDVQSAINHIHRYGSAHTDCIITTDDKVAETFLRQVDSAAVFHNASTRFSDGARFGLGAEVGISTGRIHARGPVGVEGLLTTRWIMRGSGQVVNGDKNVAYTHKNLPLQ

SEQ ID NO: 192207 - protein, 419 aa, Zea Mays
MAVAARECSRRLQNLSSDERKKILLDIADALEQNEDLIRTENEADVSAAQDAGYQKSLVDRLTLKPEKIASLAKSIRTLANMEDPINQILKRTEVAEDLVLEKTSCPLGVLLIVFESRPDALVQIASLAVRSGNGLLLKGGKEAMRSNTVLHKVITGAIPDNVGQKLIGLVTSRDEIADLLKLDDVIDLVIPRGSNKLVSQIKASTKIPVLGHADGICHVYIDKSADMNMAKRIVMDAKTDYPAACNAMETLLVHKDLIKAPGLDDILLSLKTEGVAIYGGPVAHEVLCIPKADSFHHEYSSMACTIEFVDDVQSAINHIHRYGSAHTDCIITTDDKVAETFLRQVDSAAVFHNASTRFSDGARFGLGAEVGISTGRIHARGPVGVEGLLTTRWIMRGSGQVVNGDKNVAYTHKNLPLQ

SEQ ID NO: 192208 - protein, 135 aa, Zea Mays
MTTPLSNTLQPSSYTTSTQVQPISSPTRVFDGPITRSRAKKLQQEVHALVFDGPITRSRAKKLQQEVHALLYEFQLNTNANFMLPKSCMLILLRFTKRKDKTYQRRISKKSYVRVSPALQNRPEETVITFDSQKL

SEQ ID NO: 192209 - protein, 319 aa, Zea Mays
MKILSRTFNCQIGSMSFTYLELSLRLSKPRIHHFLPLIQRIERRPSCTSTFLSQAGRLELVNSVFSALPTFFICTLKIPAATIKQIDAYRKHCLWRGNDVNSKNATSYMEHDYSAKKQQGLGVVRLETHNKTLLLKYLHKFFNNYDLPWVNLICNNYYRSDRLPSCSRIGSFWWRSLLSLVQNFKGLASPIIGNGRTIFFWDDLWNKGIPAQQYPELFSFACNSKLSIKEAKQKEHLFEIFQLPLSEQAYEQYLELNESCEQINIINAKDNWEFIWGSKIFSKKRLSGILWGISRFIAYSNRFRKINMNQSINFSIGYG

SEQ ID NO: 192210 - protein, 180 aa, Zea Mays
MKSVDPRPFKKKGAICSPRRSDRLPSCSRIGSFWWRSLLSLVQNFKGLASPIIGNGRTIFFWDDLWNKGIPAQQYPELFSFACNSKLSIKEAKQKEHLFEIFQLPLSEQAYEQYLELNESCEQINIINAKDNWEFIWGSKIFSKKRLSGILWGISRFIAYSNRFRKINMNQSINFSIGYG

SEQ ID NO: 192211 - protein, 173 aa, Zea Mays
MYGLIPDDWGAYARPWITELAAPLECLKALHLRRMVVTDDDLAELVRARGHMLQELKLDKCTGFSTHGLRLVARSCRSLRTLFLEECQIDDKGSEWIHDLAVCCPVLTTLNFHMTELEVMPADLKLLAKSCKSLISLKISDCDLSDLIEFFQFATALEEFAGGTFNEQGELSK

SEQ ID NO: 192212 - protein, 162 aa, Zea Mays
MLRRALLSSVSPLHGTVRIPSPSYSPIQALLAQWSRYASVVSSSAPPPLPPPPPSPPRGPSRSSGGGPTSSSLNPAEVAKFASIAETWWDSSGPFKPLHVMNPTRLSFICSTLCRHFRRDPNSSKPLEGLKVIDVGCGGGILSEVESFSVSIISENRYWHLT

SEQ ID NO: 192213 - protein, 91 aa, Zea Mays
MRAYATAIVATEYILRWLPRGTHEWSKLVTPEELVLMLQKASVSVEEMAGFVYNPLSGEWSLSDDISVNYIAFGVKKGEASSTNDREANLS

SEQ ID NO: 192214 - protein, 667 aa, Zea Mays
MAAASASTRQATAEACSSHVHHAHLAALLNASARLPPLPLSRLHLPLSLPTASRLVASFPPLPLLVCFLRALRLLPSSPPRPFDSLIKSYASLPNRASLAAAALAFARSAGRFFDSMLSDGVAPNVYTYNILIRALCGRGHRKEALSILRDMRGAGCGPNVVTYNTLVAAFFRAGEVDGAERLVGMMLDGGLKPNLVTFNSMVNGMCKAGKMEDARKVFDEMMREGLAPDGVSYNTLVGGYCKAGCSHEALSVFAEMTQKGIMPDVVTFTSLIHVMCKAGNLEWAVTLVRQMRERGLQMNEVTFTALIDGFCKKGFLDDALLAVRGMRQCRIKPSVVCYNALINGYCMVGRMDEARELLHEMEAKGLKPDVVTYSTIISAYCKNCDTHSAFELNQQMLEKGVLPDAITYSSLIRVLCEEKRLSDAHVLFKNMIKLGLQPDEFTYTSLIDGHCKEGNVERALSLHDKMVKAGVLPDVVTYSVLINGLSKSARAMEAQQLLFKLYHEEPIPANTKYDALMHCCRKAELKSVLALLKGFCMKGLMNEADKVYQSMLDRNWNLDGSVYSVLIHGHCRAGNVMKALSFHKQMLQRGFAPNSTSTISLIRGLFENGMVVEADQVIQQLLNCCSLADAEASKALIDLNLNEGNVDAVLDVLHGMAKDGLLPSPR

SEQ ID NO: 192215 - protein, 55 aa, Zea Mays
MVSYNLMSSSLLCICISCVTFIIFIHMHLASHLGPRDDDRASEVVPTTRSSWWTT

SEQ ID NO: 192216 - protein, 535 aa, Zea Mays
MADGASSSGGAQNGGESVVIDYGRRRTTCGYCRSSGPTSISHGMWANSLKADDYQALLDRGWRRSGCFLYKPEMERTCCPSYTIRLKANDFICSKEQARVLKKIQRFLDGELDPQIGSPQCKASPTKRSLGEPLNSPTSKVSKVSAEEFQKGTSPNILKEDDIICCLANKINEATATCFRGGVFGSVQLPKAVVKTVKPQVKRKVGEAVQEKKVGEAVQALVYTCNISFQIVAAVRRALPKENGATQTEVPADLSPNSVAEKLSVAMERLGELAGFEVKACNGHLNFYLASNQAMQNHTSVVVPVQASDKSSGSKPSSVNQTNAKYPLKRKNLEIRLSTSHFDPEEFALYRRYQTKVHKEKAVTESSYKRFLVDTPILFVPPKTGDNTVPPCGFGSFHQQYRIDGKLVAVGVVDILPKCLSSKYLFWDPDLPFLSLGKYTALKEIDWVKTTQEHCPSLQYYYLGYYIHSCNKMRYKAAYRPSELLCPLRYEWVRYDLAKPLLDASQYSVLSDYATMQAMRMRTTTMKISTTMNQI

SEQ ID NO: 192217 - protein, 437 aa, Zea Mays
MAAQLLFSNASSCHCPLGISRINVGKTLLGESASFQRKKSFSGGSYRFSRFDCSANSRRAGPRRTKDTLYDLHPEISLLYGEDNGAATLSSKEQGIDTTAERLVDTSPSYRYNEPRIKVIGVGGGGSNAVNRMIESSMKGVEFWIVNTDFQAMRMSPIEPENRLQIGQELTRGLGAGGNPEIGMNAAKESQELVEQAVAGADMVFVTAGMGGGTGTGGAPIIAGIAKSMGILTVGIVTTPFSFEGRRRALQAQEGIASLRSNVDTLIVIPNDKLLTAVSPNTPVTEAFNLADDILRQGVRGISDIITVPGLVNVDFADVRSVMSDAGSSLMGIGTATGKTRARDAALNAIQSPLLDIGIERATGIVWNITGGNDLTLTEVNAAAEVIYDLVDPGANLIFGSVIDPSYTGQVSITLIATGFKRQEESESRSSQMYFHE

SEQ ID NO: 192218 - protein, 737 aa, Zea Mays
MAVRATVSRFPATPEALESCAVQWGVAVTPFAAADEHGQPPTTGAGGDRVPRCEHCWAYLSSHCDLERWGWTCALCGTLNGFDDEAERRFQRPDVCPELKSSFVDLEILVDEAEGGGDGVQALPVYVAAVDLACSEEFLELVKSALLAALEALVPGSLFGLMTFSHKIGLYDVQGPIPLVKNVFIPPDLEEDGLPVALEDAMPLLCFLAPVDTCKDQIAAVLETLRPTSSWERGVASGQEEDTVLLGRRGFGTAMSALIEYLSSEYGSTFALARVFAFLSGAPDYGAGVLDTRRYGEQYASKGVDADLALLPEQIPFYRDLAAVAVQSGVCIDIFAVTDEYTDLASLKFLSIESGGSLFLYASTDDSTVPQDIYRLLSRPYAFGCVLRLRTSSDFEPGNSYGHFFPDPQYENVQHIICCDSFATYAYDFEFAHNDGFSRHTDPAVVQIAFQYSVIEPVKETSGNGSQPSASYKFCLKRRLRIRTLQYRPTNNISEIYDSVDPEVILESLDKGVREGRHQVHAWLSLLAARYNQALSSDVRPLSSIDIDFSQCPQLQTIPQLVFALLRSPLLRLHEEGVHPDYRIYLQCLFSALEPSSVAKAIYPVLISYSSPDKQAFPRHTLSHAALIMSESPIFLLDTFTNLIVYYSSTADPSVPFPPPHDCLLRKTINGLKQDRCITPKLTFIHGGKDDSTLFESYLIEEQDVDGSGLTTGSGFVAFRESVRNVAGEIIQEEIGS

SEQ ID NO: 192219 - protein, 56 aa, Zea Mays
MNRSAPPESTLPYQACYYARRVHATPAISPLPVRDCLFTYGIARFKLTLSHTSVCG

SEQ ID NO: 192220 - protein, 70 aa, Zea Mays
MITEGGGQNRVTSDSLASQRRDEELCSIDLDEGGRERGEFIGPVSHHDGHGDNHHRTLLATNDDIGAALF

SEQ ID NO: 192221 - protein, 132 aa, Zea Mays
MAVHVLVHNEPVTPDVPCRTSPETSFFFWKNFPKKLRSTSCGQCPDQFRHTLPWRSTSANTVAHCQRNEIKIMSASNGNARKIFGAITLVIPFPHPAYIYREEKGLKIFSFPQKDVTIKFKSMSVMIKQRND

SEQ ID NO: 192222 - protein, 342 aa, Zea Mays
MFIMDRSIMADGETSAEEKRRWTGPPEAQELEETKRRRTGPPEAQELEERLDSLRDKIAAASLVAGSRFGEEQRRSLLQEWLRLASAKLDLDLSGISEFDLSAEALPWLMPPEEADKRTTHTRQEAQELEERMTCLRLLFEDAADDRILARRELGAAADEFLLRLTTRQQALTREYSRLANLKRPLDLSGMTEADRAAEAERLREEKLQKARQLQDQGDMSGARECEGLARIIDFDVKQGGEYLNSICCVGNIYTFDHTEESPVGPMRFTNRPWQDKMCVNCASINILSVKIACSDIDFPIQVYGTVVARDCIDYKCVYLFRRDNDHCQLISSNAQYCGCDI

SEQ ID NO: 192223 - protein, 81 aa, Zea Mays
MQRQKRMIKNRESAARSRDRKQAYVAELESQVMQLEEEQTELLREQEDRRQKRLKELTERAVPVIRKKSPQDLRRTNSMEW

SEQ ID NO: 192224 - protein, 244 aa, Zea Mays
MSQDQENGGTNGQHAADVMEVEPKRRAPRLNERILSSLSRRSVAAHPWHDLEIGRGDHQGEQGEVRAGQEDGAHQGGPDPLLVRRLPSQLRLRAPDALRGQRPHGRPRAHAGTRPSRRLPPRQGHRPHAYDRSGREGRQDHRRLRRRPRVPPLQRHQRALPSPPPGDPPLLRRLQEEREQGGGRQRLPARRRCPRSHPVLHGPVRPVHHADPAAVERVLPDPMRAELTQEHRSTESLWSRLMHG

SEQ ID NO: 192225 - protein, 226 aa, Zea Mays
MNKDILVAADDHEGGLCLPKSSARLTQESGVGYNKASSLSFSAESRRQIHYCRAPLPSLSLRRSVSRRQNPRSLSLLNPLNKCGRMSEPSKVIHIRNVGHEIAESDLLQLLQPFGMVSKIVMLRAKNQALLQMEDLHASVSALQYYTSVQPSIRGRNVYMQFSSHQELTTDQSSHGRNSDQGSEPNRILLVTIHHMIYPITVEILHQVFKAYGFVEKIVTFQKSAG

SEQ ID NO: 192226 - protein, 226 aa, Zea Mays
MNKDILVAADDHEGGLCLPKSSARLTQESGVGYNKASSLSFSAESRRQIHYCRAPLPSLSLRRSVSRRQNPRSLSLLNPLNKCGRMSEPSKVIHIRNVGHEIAESDLLQLLQPFGMVSKIVMLRAKNQALLQMEDLHASVSALQYYTSVQPSIRGRNVYMQFSSHQELTTDQSSHGRNSDQWRFYIKYSKLMDLWRRLSHFKSQLVRFSCSLYLFHHARVHLVYIF

SEQ ID NO: 192227 - protein, 318 aa, Zea Mays
MWGHCRAGMYPFSKSFQALIQYHSRQEAVEAFGSLHGRNIYDGCCQLDIQYSNLSELQVHYNNDRSRDFTNPSLPTEQRPRASQQGYLDPANLYAFQQAGASYAQMGRVAMIAAAFGGTLPHGVTGTNERCTLIVSNLNTDKIDEDKLFNLFSLYGNIVRIKILRNKPDHALVEMADGLQAELAVHYLKGSILFGKKLEVNYSKYPNITPAPDAHDYLNSSINRFNSNVVKNYRHCCSPTKMIHISALPQDISEEAILNHVSEHGTVLNTKLFEVNGKRQALILFKSEEEATEALVSKHASTLEGNTIRISFSQMQSI

SEQ ID NO: 192228 - protein, 225 aa, Zea Mays
MPSNKLELLQYQMGRVAMIAAAFGGTLPHGVTGTNERCTLIVSNLNTDKIDEDKLFNLFSLYGNIVRIKILRNKPDHALVEMADGLQAELAVHYLKGSILFGKKLEVNYSKYPNITPAPDAHDYLNSSINRFNSNVVKNYRHCCSPTKMIHISALPQDISEEAILNHVSEHGTVLNTKLFEVNGKRQALILFKSEEEATEALVSKHASTLEGNTIRISFSQMQSI

SEQ ID NO: 192229 - protein, 60 aa, Zea Mays
MLLVAQRVNRKRNRCFQEEMLTKLARREKTTNIKPDHDIDVYMKILDLEVCADTLVGKEM

SEQ ID NO: 192230 - protein, 83 aa, Zea Mays
MLIAAAYDKVFLEVLFCSATTLWTCTDVAHVLLQFSLAWYGKLIRYACAVAAHYVRSVKGLCFDLFIIRGGNSAFNAGWRCAM

SEQ ID NO: 192231 - protein, 426 aa, Zea Mays
MASFSSLSASSSTSTPSFNLPAKTSAGTGSLSFHRARESQKSRARMVTVRAEAVDTTISPRVNALRPSKTMAITDQATALRQAGVPVIGLAAGEPDFDTPAVIAEAGINAIRDGATRYTPNAGTLELRKAICKKLEEENGLSYSADQVLVSNGAKQCITQAVLAVCSPGDEVLIPAPYWVSYPEMARLAGATPVILPTSISDNYLLRPESLASVINENSRILILCSPSNPTGSVYPKELLEEIAAIVRKHPRLLVLSDEIYEHIIYQPAKHTSFASLPGMWERTLTVNGFSKAFAMTGWRLGYLAAPKHFVAACGKIQSQYTSGASSISQKAGLAALNLGYAGGEAVSTMVKAFQERRDYLVRSFRELPGVKISEPQGAFYLFIDFSSYYGSEVEGFGTIKDSESLCLFLLEKAQLCRHCKLQWER

SEQ ID NO: 192232 - protein, 497 aa, Zea Mays
MPSGDDSDPLLAPADGIRFAALDYRDHPADRGATGGWRSALFIIAVEISERFTFYGVSSNLINYLTGPLGEGTAAAAAAINTWNGVAQLLPLLGGALADKWLGRYRTIVVASLLYVIGAGMLAFSTLLSSGSGHQCTTAGGQTCAPSTIKDNIGWGLGFGIPCAVMAAALAVFLLGTRRYRYYVTAGERGLFARAGEAFVEWRSRRKALQHGDRPVAEGAPGFSAGVDEEEQAAVSHDAGLVKETKDILRLFPIWATCLLYAVAFSQSSTFFTKQAATLDRRVGRHLQVPPAALQSFISITIVVFIPLYDRVLVPVARRYSGNPSGITMLQRIGTGMFLSLLSMVIAALVEKHRLRVAVDAGLVDKPMVPLPMSLWWMVPQYVLFGAADVYTMVGLQEFFYDQVPDKLRSLGLALYLSIFGVGSFISSTLVSIIDSVTTARGGSWFSNNLNRGHVDYFYWLLAALSALELLAYVFFAVTYKYKNKATVHATVVGQSL

SEQ ID NO: 192233 - protein, 414 aa, Zea Mays
MNPYILAPLMNLYVFVICQFGLLILVISFTLLVYFVFLLFCTQELYHELHALDRFEHDCRLKQKEQDGLSSRGDNLDILKQELKVQSKHVKSLKKKSLWSKNLEEVMVKLVDIVHFLYLEIYNAFGRPDSEEPQEPAKHHNRLGPAGLALHYANIINQIDNLVSRSCAMPPNARDTLYHSLPPTIKSAFRSKLQSFEVKEELTASRIKAEMEKTLRWLVPFASNTNRAHHGFGWVGEWANTGSELNCKISGQMDMSRMETLYHADKEKTEALILELVVWLHHLISKSGNASGGVRSPIKSPVSSPTQKGAAITLLSGKTNNLPPILTQEDQDMLRGVKYRKFVPGISKSQEFDTKSSHSKHSRLSKSNSHSPASGSRKDLLPVRRSSMLPVIDFEIDRTKALDLIDRLDNLKVQ

SEQ ID NO: 192234 - protein, 309 aa, Zea Mays
MGGLCSKVSAVDKSPSDTALGRNQVADHEPGASLELEKPPVSRESAAPAKRLDEQLQSFSFLESVVPGVAFHAGANTGGEAGSRTSPQLTRSLSQRAGVGKAKAGAAKVSEVSSILGRASTAGLEKAVEVLDTLGSSMTSLNSSSGFVSSSAAKGNKISMLAFEVANTIVKGSNLMRSLSEPSIKHLKEVVLHSEGVENLISKDFDELLKMASADKREELEVFTREVVRFGNRCKDPQWHNLDRYFEKLASERTPQSYLKEKAESVMQKLVTCVQNTVELYHELHALDRFEHDCRLKQKEQDGLSSRGI

SEQ ID NO: 192235 - protein, 317 aa, Zea Mays
MGGLCSKVSAVDKSPSDTALGRNQVADHEPGASLELEKPPVSRESAAPAKRLDEQLQSFSFLESVVPGVAFHAGANTGGEAGSRTSPQLTRSLSQRAGVGKAKAGAAKVSEVSSILGRASTAGLEKAVEVLDTLGSSMTSLNSSSGFVSSSAAKGNKISMLAFEVANTIVKGSNLMRSLSEPSIKHLKEVVLHSEGVENLISKDFDELLKMASADKREELEVFTREVVRFGNRCKDPQWHNLDRYFEKLASERTPQSYLKEKAESVMQKLVTCVQNTVELYHELHALDRFEHDCRLKQKEQDGLSSRGQFHQLQIRN

SEQ ID NO: 192236 - protein, 102 aa, Zea Mays
MIAFTLLMERMGRILLLQGRLKTAASFLSLGSVNGLLTSARSFDSSPPYQKKRSKRMAIIKSVEKQLDFSADGLDTSGSEIMNSPCHNSQGIDLNLMKPYRT

SEQ ID NO: 192237 - protein, 697 aa, Zea Mays
MDVASTIPFQGLAYLITGEVRENAVYSMLGVLRLWRLRRVKQFFTRLEKDIRFSYFWIRSARLVAVTLFLVHCAGCLYYLIADRYPDRQKTWIGAVIPNFRQASLRIRYISSIYWSITTMTTVGYGDLHAQNNVEMIFNIFYMLFNLGLTAYLIGNMTNLVVEGTRRTMEFRNSIRAASSFVGRNHLPPRLKQQILAYMCLKFRAESLNQQQLMDQLPKSICKSICEHLFVPVVKDVYLFRGVSREMLLSLVTKMKPEYIPPKEDVIVQNEAPDDVYVVVSGEVEVILFDGIYEQVQATLGARDIFGEVSALSDRAQAFTFRTRTLSQLLRLKQATLKEAMQSRPEDSVVVIKNFLKVEMHGMKVEDLLGDNTGEHDDDANVLTVAAMGNSGLLEDLLRAGKDADVGDAKGRTALHIAASKGYEDCVLVLLKHACNVNIRDAQGNTAMWNAIAAGHHKTFNLLYQFGRASNPRAGGDVMCLAARRGHLGALQELLKLGLDVDSEDHDGATALRVAMAEGHADAARFLILNGASVDKASLDDDGSGSGSGSGAARLAMSPTELRELLQKRELGHSITIHDSPAVVPNGGSSGHSRPGRLQSTSSDSQRWPRVSVYKGHPFLRNRTSEAGKLINLPGTMEEFRAIVGEKLKVDAEKALIVSDEGAEIDSIDVIRDNDKLFMVTEEDLRRLASMDWLSCE

SEQ ID NO: 192238 - protein, 579 aa, Zea Mays
MREPSPRPSWGLSLVLDQHWAMRVGIAGLVFGETLLGWYQAGDDGFSTSFLPLEGAAQKTSSLYLSTFFIMDVASTIPFQGLAYLITGEVRENAVYSMLGVLRLWRLRRVKQFFTRLEKDIRFSYFWIRSARLVAVTLFLVHCAGCLYYLIADRYPDRQKTWIGAVIPNFRQASLRIRYISSIYWSITTMTTVGYGDLHAQNNVEMIFNIFYMLFNLGLTAYLIGNMTNLVVEGTRRTMEFRNSIRAASSFVGRNHLPPRLKQQILAYMCLKFRAESLNQQQLMDQLPKSICKSICEHLFVPVVKDVYLFRGVSREMLLSLVTKMKPEYIPPKEDVIVQNEAPDDVYVVVSGEVEVILFDGIYEQVQATLGARDIFGEVSALSDRAQAFTFRTRTLSQLLRLKQATLKEAMQSRPEDSVVVIKNFLKHQVEMHGMKVEDLLGDNTGEHDDDANVLTVAAMGNSGLLEDLLRAGKDADVGDAKGRTALVEVEALVIQGPKLSTILSQVKKLEASVLVLSQRKPSPFCCFLRSRSSSEEEELVEECINRAECLTLAVRRRSKGVGGYLVSTRWQKNFWLLA

SEQ ID NO: 192239 - protein, 785 aa, Zea Mays
MAESSVWREEDRRVRGEVTYEQRALVLDGARRMLFAGEMHYPRSTPEMWPKLIAKAKEGGLDVIQTYVFWNVHEPIQGQYNFEGRYDLVRFIKEIQAQGLYVSLRIGPFIESEWKYGGFPFWLHDVPNITFRSDNEPFKQHMQRFVTDIVNMMKHEGLYYPQGGPIITSQIENEYQMVEPAFGSSGQRYVSWAAAMAVDLQTGVPWTMCKQNDAPDPVVGIHSYTIPVNFQNDSRNYLIYGNDTKLRSPQDITFAVALFIARKNGSYVSYYMYHGGTNFGRFASSYVTTSYYDGAPLDEYGLIWQPTWGHLRELHAAVKQSSEPLLFGTYSNLSIGQEQEAHIFETETQCVAFLVNFDQHHISEVVFRNISLELAPKSISILLDCKQVVFETAKVNAQHGSRTAEEVQSFSDISTWKAFKEPIPQDVSKSAYSGNRLFEHLSTTKDATDYLWYIVGYEYTPSDDGQLVLINVESRAHILHAFVNNAYVGRIHGSHGGPANIIFSTNISLQEGPNTISLLSAMVGSPDSGAHMERRVFGIRKVSIQQGQEPENLLNNELWGYQVGLFGERNNIYTQDSKITEWTTIDNLTYSPLTWYKTTFSTPVGNDAVTLNLTGMGKGEVWVNGESIGRYWVSFKAPSGNPSQSLYHIPREFLNPQDNTLVLFEEMGGNPQLITVNTMSVSRVCGNVNELSAPSLQYKDKEPAVDLWCPEGKHISAIEFASYGGPTGDCKKFGFGRCHAGSSESVVKQACLGKSGCSVPVTPIKFGGDPCPGIQKSLLVVANYR

SEQ ID NO: 192240 - protein, 773 aa, Zea Mays
MAESSVWREEDRRVRGEVTYEQRALVLDGARRMLFAGEMHYPRSTPEMWPKLIAKAKEGGLDVIQTYVFWNVHEPIQGQYNFEGRYDLVRFIKEIQAQGLYVSLRIGPFIESEWKYGGFPFWLHDVPNITFRSDNEPFKQHMQRFVTDIVNMMKHEGLYYPQGGPIITSQIENEYQMVEPAFGSSGQRYVSWAAAMAVDLQTGVPWTMCKQNDAPDPVINTCNGLICGETFVGPNSANKPALWTENWTSRYLIYGNDTKLRSPQDITFAVALFIARKNGSYVSYYMYHGGTNFGRFASSYVTTSYYDGAPLDEYGLIWQPTWGHLRELHAAVKQSSEPLLFGTYSNLSIGQEQEAHIFETETQCVAFLVNFDQHHISEVVFRNISLELAPKSISILLDCKQVVFETAKVNAQHGSRTAEEVQSFSDISTWKAFKEPIPQDVSKSAYSGNRLFEHLSTTKDATDYLWYIVGLFLNILGRIHGSHGGPANIIFSTNISLQEGPNTISLLSAMVGSPDSGAHMERRVFGIRKVSIQQGQEPENLLNNELWGYQVGLFGERNNIYTQDSKITEWTTIDNLTYSPLTWYKTTFSTPVGNDAVTLNLTGMGKGEVWVNGESIGRYWVSFKAPSGNPSQSLYHIPREFLNPQDNTLVLFEEMGGNPQLITVNTMSVSRVCGNVNELSAPSLQYKDKEPAVDLWCPEGKHISAIEFASYGGPTGDCKKFGFGRCHAGSSESVVKQACLGKSGCSVPVTPIKFGGDPCPGIQKSLLVVANYR

SEQ ID NO: 192241 - protein, 105 aa, Zea Mays
MTQALGQQPRPLLCRFRQGTYHPLRRRPAQTTQDNLMGKTVASPFKKSRRVTANRSRLAVEGPPATPAKDSSTISSVELLKSTGFDARKPLFFYLNVFFIYQDSM

SEQ ID NO: 192242 - protein, 98 aa, Zea Mays
MTQALGQQPRPLLCRFRQGTYHPLRRRPAQTTQVASPFKKSRRVTANRSRLAVEGPPATPAKDSSTISSVELLKSTGFDARKPLFFYLNVFFIYQDSM

SEQ ID NO: 192243 - protein, 124 aa, Zea Mays
MTQALGQQPRPLLCRFRQGTYHPLRRRPAQTTQVASPFKKSRRVTANRSRLAVEGPPATPAKDSSTISSVELLKSTGYPFQLAQLPQSPLLAQVVVFLASTAADLLQRSWRRLCAHKIGCDASI

SEQ ID NO: 192244 - protein, 416 aa, Zea Mays
MMQQAQAHTSALAGAPSASAVAPTVAHPHDPVGGDAPPKQVAQAMERLGRAGRFIADIRLGADRLLEALFVSGDAPPYSVRQHVDRMERIIVKEDAAMRLHFQDLRALGRQLEESGVLNGALKAQGNSWGLHMPLVCPDGAVVAYAWKRQLAGQAGASAVDRTRLALKAFTDQKRRFFPHLEDEVVSHLHDGQPGDTKKSKLFTSNGYLEEKSLSEILKNLEHEVPNIKIFTYWHLDWSKRASSLASLLDDDFVDPSKELNLQNMDKSRSDALTTTIDQVAVIELLVPSIFRAVVSLHPAGSTDPDAVAFFSPTEGGSYLHARGTSVHHVFKHVKEHADKALQYFINAEPSKALPLLLRWIASYQTLFTKVCRRLLMMDKSLALLLPPVHRPYHQTSNVGPDLQEAYHIGCSSYDG

SEQ ID NO: 192245 - protein, 299 aa, Zea Mays
MVQCIFCKKVVPAGIKRFKQHIAGGYAVVERCPAAPAMIRKEMFDFLVKNARKELNLQQGREWDSESGGGVQEVPVVPSSGTRVKENKRKVQASIGSYMDPVKQGSQKYTKNVASMLCKSPEEVVSERHNSKSYQPSMEQCTQKSKESKQVVDDHVADFLYENGIPLNVVNSRSWEIMLESIGQYGPGYLSPSYHQLRNSLLERAVDKTNEVRKKHEEAWKKYGCTLMSDAWTDTRHRHLINFFVKSPVLVENEENEEDVDMEDEEDDFNEMQDDEDDEEDEDGGGGAAGAFRVDDALL

SEQ ID NO: 192246 - protein, 262 aa, Zea Mays
MIRKEMFDFLVKNARKELNLQQGREWDSESGGGVQEVPVVPSSGTRVKENKRKVQASIGSYMDPVKQGSQKYTKNVASMLCKSPEEVVSERHNSKSYQPSMEQCTQKSKESKQVVDDHVADFLYENGIPLNVVNSRSWEIMLESIGQYGPGYLSPSYHQLRNSLLERAVDKTNEVRKKHEEAWKKYGCTLMSDAWTDTRHRHLINFFVKSPVLVENEENEEDVDMEDEEDDFNEMQDDEDDEEDEDGGGGAAGAFRVDDALL

SEQ ID NO: 192247 - protein, 249 aa, Zea Mays
MLREKLHTFGILGCILCVVGSTTIVLHAPPERQIESVAEVWDLATEPAFLCYAAVVLAAAFVLIFHFVPEYGQTHIMVYVGICSLVGSLSVMSVKALGIALKLTFSGMNQLVYPQTWVFSSVVTLCIVTQMNYLNKALDTFNTAVVSPIYYTMFTSLTILASVIMFKDWDRQNPTQIVTEMCGFVTILSGTFLLHKTKDMVDGLPPNLPIRLPKHADEDGYAAEGIPLRSAADGIPLRSPRATDSFRSS

SEQ ID NO: 192248 - protein, 209 aa, Zea Mays
MGRGKIKIKRIENSTNRQVTFSKRRAGLVKKAREIGVLCDTEVGVVIFSSGGKLYDYCSPRTSLSRILEKYQTNSGKILWGEKHKNLSAEIDRVKKENDNMQIQLRHLKGEDLNSLQHRELIAIEEGLQNGQTNMREKQMDYWRMHKTNGKMLEDEHKILTFRMAVDLSGRMRELEIGYHQVQHDRDFISQMPFTFRVQPNHPNLQEDE

SEQ ID NO: 192249 - protein, 148 aa, Zea Mays
MGRGKIKIKRIENSTNRQVTFSKRRAGLVKKAREIGVLCDTEVGVVIFSSGGKLYDYCSPRTSLSRILEKYQTNSGKILWGEKHKNLSAEIDRVKKENDNMQIQLRHLKGEDLNSLQHRELIAIEEGLQNGQTNMREKQMDYWRMHKT

SEQ ID NO: 192250 - protein, 278 aa, Zea Mays
MPRERKRNRTPATTTEPSGGGYGSGRRPPPPPPLLRRCPNSNTWPTPPFLVASSRRAAVLPRPFQLPSRDPRPHARRKHWRQQRRLARRDDGVVVVAGGAARGLHHLDVARDARELPRQRTGAARTARPRLRRLRRALAQVSRPCPSAPLIDHNLLMKPYLGSTRDRWCTHAMCSSLCLCMRQPLLGTLINSLGRNIGVLSESYTVYAIDLLGFGASDKPPGFSYTMETWAEEAHGACRELGWKPRVRHCCIRVQQRSRPGACPAELRRWHEQQGDRR

SEQ ID NO: 192251 - protein, 291 aa, Zea Mays
MPFHATRSSTTNLGPGPGLGSSQLMVSVHAGHDDASTPTGDTSAGLNQSHDEPKTSKPINVSSSNYWRDVRANLVRREQELLVDPSTPSESKASSGDPLQLPQKWAHAITMPEAGCVLVATEALDDDSIFERTVIFLLRLGTRGTFDGPFGVIMNRPLYTKIKHVNPMFRDQATPFGDSPLFFGGPVDMSMFLVRTEDSARLKGFEEVVPGICYGFRTDLEKAAALMNSGAIRTQDLRFYVGHAAWDHEQLLGEIRAGYWAVASCSTELIGDALMGDPSRLWTEIQQLMGG

SEQ ID NO: 192252 - protein, 491 aa, Zea Mays
MAAETEETALEFTPTWIVAGVCSLIVLLSLLAERGLHYLGKTFKKKNQKPLFEALLKVKEELMLLGFISLLLTVFQGMIQKTCIPEDWTFDMLPCKKPDEAAAIAKASFVDVGTTLGRIGRRLLAEEVDGAEHCHSKGKVPLLSLEATHQLHIFIFVMAITHVIFSVTTMLLGSAQIRQWKQWEDEIQKDASENGPKKATRDEFMENRVKGIGKDSVIVSWLHSFGKQFYRSVSRSDYTTMRLGFIKTHCPSNPKFDFHGYMVRVLEADFRRVVGISWYLWIFVVIFLLLNVNGWHIYFWISFLPLLLLLAVGTKLEHVIAQLGHDVAKKHAAIDGDVIVKPSDSHFWFGKPRIILYLIHFILFQNSFEIAFFFWILTTYGFDACMMEHLRFIIPRLVMGVVIQLLCSYITLPLYAIVTQMGSCYKKEIFNDHVQKGVLVWAQKVKMRKGLKGALSKSDSAKNNNADPAGPSVKIEMAKAGEDAKVVGNTE

SEQ ID NO: 192253 - protein, 464 aa, Zea Mays
MAAETEETALEFTPTWIVAGVCSLIVLLSLLAERGLHYLGKTFKKKNQKPLFEALLKVKEELMLLGFISLLLTVFQGMIQKTCIPEDWTFDMLPCKKPDEAAAIAKASFVDVGTTLGRIGRRLLAEEVDGAEHCHSKGKVPLLSLEATHQLHIFIFVMAITHVIFSVTTMLLGSAQIRQWKQWEDEIQKDASENGPKKATRDEFMENRVKGIGKDSVIVSWLHSFGKQFYRSVSRSDYTTMRLGFIKTHCPSNPKFDFHGYMVRVLEADFRRVVGISWYLWIFVVIFLLLNVNGWHIYFWISFLPLLLLLAVGTKLEHVIAQLGHDVAKKHAAIDGDVIVKPSDSHFWFGKPRIILYLIHFILFQNSFEIAFFFWILLLCSYITLPLYAIVTQMGSCYKKEIFNDHVQKGVLVWAQKVKMRKGLKGALSKSDSAKNNNADPAGPSVKIEMAKAGEDAKVVGNTE

SEQ ID NO: 192254 - protein, 55 aa, Zea Mays
MVSLIGKSLVFFSCAGSAQVHTEINGLSSNCCVHTENICHSCLKVCSSIITLQRR

SEQ ID NO: 192255 - protein, 555 aa, Zea Mays
MPAPAPWPVSQDVAALADRASAFSRAVVGPRNDLGALAAALLRIQPVARELERWRWLTPGDPEVPDLHAWLFELRDAVADAESILDELHRRRQIGPPLSACVYATFRGPGRKLRRLTERLNRARDDSERLRPGSAAAIYGVRSPNRVTGSVFAERKVLGRGEECNSIISRLVDDCEETCRPVSPVIAVVGHGGIGKTTVAQCVYNDARVEARFDLRAWVCVWDRSDEAELTREILQSIGCADDKPCDDGLASLDSLQEKFENLVARKRFLLVLDDVWIDEGKTEKENRSIWNRVLVPLRSATTGSKVLLTTRMKLVAEVLNAGYLVSLDGLRSSDCWLLLKEVALGGETMDFPPELQEVAGTLVAMVKGSPLAAKAIGQMARSTRSTRKWRTLVNTEISNDIIISSIQLSYKHLPGHLQRCFAYCSIFPSTWRFSRSQLVNMWIALGFIQSSAEGKGLEELGQKYFDDLLSRSFFGTANKDQQTYYFLDDLMHILAQHFSAHDCMKINEGIPVVIPPTVRHLSVSTDYLPQLKSKYRLGRLQTLLVLRSSSLSSE

SEQ ID NO: 192256 - protein, 385 aa, Zea Mays
MADGLDRWRGFFRGAGAGICDVIENAILVAAADAPRDFLHRRDRIAERLFTALRRDAAPPSFGSAAASTTPATPVEEDKGSVRRVAEKECKVDSSSNGTHGGGGHGHGHADEDDDSDSDDERLRRAAASNYGHNYDDDDEDGDQQEEDEQQHAADDTEEGEEDHDAEELEALTNEIDEESQIVGEVLRIKELLLHKEDHSDATLFDSLRRLQLMQLSVSTLKATEIGRAVNRLRKHNSREIRHLVCTLIEGWKVLVDEWVSTTNAALTENSPGSSNPSVVDEEEEGLPSPPLDEGAFFATQTTSIQLSEFFDEMDEDGNLRHSNDPSLGNKRGNNGGRLASHSTVARQDPPRSYPGVVERVQPRRLELARQEPPMSKGSSTETIW

SEQ ID NO: 192257 - protein, 54 aa, Zea Mays
MPGLVGSCVYYAQRGADEQSFFSFCTEPSMEGSFEVARVALDAMSGDESLAMSG

SEQ ID NO: 192258 - protein, 367 aa, Zea Mays
MDNQFNSEEWSLPVASAMMELEKYNLTGAFTRSMHNMGVPIQPVNLAINASSRHHPTEDPEVQEVYRSQVSNNKGKKKVAQRGKSFTKEEDRAICSAFLHVSTDPIVGTNQSASGYYTRMHRHFMENIGVGSNRTKVSIENRWTTIQKAVNKFCGFFAAIERRNESGKNEQDRINDDIRMYEGTEPWQFHHCWVILRGEPKWHEKMAESNTSQKVNQKHSLNDSEIEINSMHTNSAIPERPEGRDNAKKRCRVMADTSSSSTAVEMLQKMHERGEKNDEKEDQLRQEMFQMERERLELQKLNWEKKWAIMESNAKLRQNEYELNQWNADLLVMSQDLDKLAPPLRAMYEQKQMEIMKRRGINTPSAS

SEQ ID NO: 192259 - protein, 394 aa, Zea Mays
MGGERTGKLAGLDTPAILQPSRSPREGTGGQRLHEICDGAAPSTTRMDNQFNSEEWSLPVASAMMELEKPVNLAINASSRHHPTEDPEVQEVYRSQVSNNKGKKKVAQRGKSFTKEEDRAICSAFLHVSTDPIVGTNQSASGYYTRMHRHFMENIGVGSNRTKVSIENRWTTIQKAVNKFCGFFAAIERRNESGKNEQDRINDDIRMYEGTEPWQFHHCWVILRGEPKWHEKMAESNTSQKVNQKHSLNDSEIEINSMHTNSAIPERPEGRDNAKKRCRVMADTSSSSTAVEMLQKMHERGEKNDEKEDQLRQEMFQMERERLELQKLNWEKKWAIMESNAKLRQNEYELNQWNADLLVMSQDLDKLAPPLRAMYEQKQMEIMKRRGINTPSAS

SEQ ID NO: 192260 - protein, 348 aa, Zea Mays
MDNQFNSEEWSLPVASAMMELEKPVNLAINASSRHHPTEDPEVQEVYRSQVSNNKGKKKVAQRGKSFTKEEDRAICSAFLHVSTDPIVGTNQSASGYYTRMHRHFMENIGVGSNRTKVSIENRWTTIQKAVNKFCGFFAAIERRNESGKNEQDRINDDIRMYEGTEPWQFHHCWVILRGEPKWHEKMAESNTSQKVNQKHSLNDSEIEINSMHTNSAIPERPEGRDNAKKRCRVMADTSSSSTAVEMLQKMHERGEKNDEKEDQLRQEMFQMERERLELQKLNWEKKWAIMESNAKLRQNEYELNQWNADLLVMSQDLDKLAPPLRAMYEQKQMEIMKRRGINTPSAS

SEQ ID NO: 192261 - protein, 150 aa, Zea Mays
MCWERKSAEQIKALNLHFDALRSDYRTSRSNPQNYPSPSLPLGIDRLFSAAYIYTYLSIWKQKPPSHAQWVNGCLRHFSDGSLAALKPRWLHCIASLKNGTDDEGCLSRPWNLGAAAKIGVVLRSDDGGAEARKLSSHTTVRSLFVRCTL

SEQ ID NO: 192262 - protein, 54 aa, Zea Mays
MPHTGIRPATASLCSSRCSIAYRQWCSPSSPSTRFVPCLSVILIPVLHMKVHGA

SEQ ID NO: 192263 - protein, 113 aa, Zea Mays
MTASFYLVLHLHPLFFTSLAQVISLLLHATTALVPAFCAGCPLALATPHHPFMFRWRGLVFYLYTITVMFCGVFQDILCAGIHRVSKLKSIVRYMFHNPDDVKWFKASISARH

SEQ ID NO: 192264 - protein, 99 aa, Zea Mays
MQNPAPFYVPLEGFGFLSVHNHCNVLWSFPGYIMCRYPQSLETEIDRAVYVPQSRRRKMVQGKYFCAPLTYPIYPFSTQRQCYFCSLLSGGQNMVVVDA

SEQ ID NO: 192265 - protein, 72 aa, Zea Mays
MRPPPPPPVTGPSRCFSRPDAVPCTSVRERLADLVIPLPRPHSISVSLIVYTTYLLLFHLSANSCSYFWICG

SEQ ID NO: 192266 - protein, 68 aa, Zea Mays
MPSPRRRHCSPRPRCSAAPASPVVPTQATTVTSPLPLDLPAATLSPRRSRCSIISCRPGTCDPPPPPL

SEQ ID NO: 192267 - protein, 177 aa, Zea Mays
MGMWDLTQTVAQRWTITTSCSWLLEGMSSVVDVVLESLEFGGAIRRSATTTRKRSGDRYPKEEIGGFDQRCTGRGEGGGSGALGFGMANREGKGASGAIRGVWLGVQVRKLPYADSQGHQSLRIQTQDPIRRLVSHSLYADCPQRDPVRTSSKGLPPKGLQESSDGPLPQHYLRIHE

SEQ ID NO: 192268 - protein, 133 aa, Zea Mays
MCRFVREGLILPFVWLTSPSRLGPPYMLTLSELLFGCLHIGDVSCMSECKTNHFVTIWLHPLVCRKLPYADSQGHQSLRIQTQDPIRRLVSHSLYADCPQRDPVRTSSKGLPPKGLQESSDGPLPQHYLRIHE

SEQ ID NO: 192269 - protein, 109 aa, Zea Mays
MTDITEGVGNGFHMLAIGVDGSVTLLHGVKLMDEEDGLRLLVGAEKVLDGNPEIARSLVVIVHGEAEDEAIDGAKYPTANTSVYLIPLRVSGIGKACAIDVRLEAKFAT

SEQ ID NO: 192270 - protein, 162 aa, Zea Mays
MGMWDLTQTVAQRWTITTSCSWLLEGMSSVVDVVLESLEFGGAIRRSATTTRKRSGDRYPKEEIGGFDQRCTGRGEGGGSGALGFGMANREGKGASGAIRGVWLGVQVRKLPYADSQGHQSLRIQTQDPIRRLVSHSLYADCTFFLLDKMTRSSPVLFEKLK

SEQ ID NO: 192271 - protein, 118 aa, Zea Mays
MCRFVREGLILPFVWLTSPSRLGPPYMLTLSELLFGCLHIGDVSCMSECKTNHFVTIWLHPLVCRKLPYADSQGHQSLRIQTQDPIRRLVSHSLYADCTFFLLDKMTRSSPVLFEKLK

SEQ ID NO: 192272 - protein, 463 aa, Zea Mays
MASPTCCDWGRQDQFHSLHPATASPSLPASPRGIVRVPKSPELILPCGRAVVRASLSPEMDAPDSGGGGSADAGEPIWDWGNLLDFVVQDDDSLILPWDDAAGIAASDPTEAATALLPASPPLPQSVEEEPEPEPEPGPVLPPPPLRVQGIGRRVRKRDPRLVCPNYLAGIVPCACPEVDEMVAAAEVEDVATEFLAGARKKTKTAGRRGKAEAAGTAGGTVRAAVAEMKCQVPGCEADIRELKGYHRRHRVCLRCAHAATVMLDGVQKRYCQQCGKFHVLLDFDEDKRSCRRKLERHNKRRRRKPDSKGTLDKEIDEPLDMPADVSGSDELREENMEGITSEILETVLSNKVMDRETPVGSEDVLSSPTCTQPCLQNDQSKSVVTFAASVEACIGAKQESIKLANSPMHDTKSAYSSSGASHSSCMIGILQNFLDDYDTRSSNGWVACLLNWRATFVRVVLF

SEQ ID NO: 192273 - protein, 564 aa, Zea Mays
MDAPDSGGGGSADAGEPIWDWGNLLDFVVQDDDSLILPWDDAAGIAASDPTEAATALLPASPPLPQSVEEEPEPEPEPGPVLPPPPLRVQGIGRRVRKRDPRLVCPNYLAGIVPCACPEVDEMVAAAEVEDVATEFLAGARKKTKTAGRRGKAEAAGTAGGTVRAAVAEMKCQVPGCEADIRELKGYHRRHRVCLRCAHAATVMLDGVQKRYCQQCGKFHVLLDFDEDKRSCRRKLERHNKRRRRKPDSKGTLDKEIDEPLDMPADVSGSDELREENMEGITSEILETVLSNKVMDRETPVGSEDVLSSPTCTQPCLQNDQSKSVVTFAASVEACIGAKQESIKLANSPMHDTKSAYSSSCPTGRISFKLYDWNPAEFPRRLRHQIFEWLGSMPVELEGYIRPGCIILTVFIAMPQHMWDKLSDDAADLLRNLVNSPNSLLLGKGAFFIHVNNMLFQVLKDETTLMSTRLDIQAPRIDYVHPTWFEAGKPVNLILYGSSLDQPNFRSLLSFGGDYLKHDCYRLPSHDTFDGFESGDFIPDSQHEIFRIHITQSRPDIYGPAFVE

SEQ ID NO: 192274 - protein, 437 aa, Zea Mays
MDAPDSGGGGSADAGEPIWDWGNLLDFVVQDDDSLILPWDDAAGIAASDPTEAATALLPASPPLPQSVEEEPEPEPEPGPVLPPPPLRVQGIGRRVRKRDPRLVCPNYLAGIVPCACPEVDEMVAAAEVEDVATEFLAGARKKTKTAGRRGKAEAAGTAGGTVRAAVAEMKCQVPGCEADIRELKGYHRRHRVCLRCAHAATVMLDGVQKRYCQQCGKFHVLLDFDEDKRSCRRKLERHNKRRRRKPDSKGTLDKEIDEPLDMPADVSGSDELREENMEGITSEILETVLSNKVMDRETPVGSEDVLSSPTCTQPCLQNDQSKSVVTFAASVEACIGAKQESIKLANSPMHDTKSAYSSSCPTGRISFKLYDWNPAEFPRRLRHQIFEWLGSMPVELEGYIRPGCIILTVFIAMPQHMWDKLSDDAADLLRNLMKQH

SEQ ID NO: 192275 - protein, 611 aa, Zea Mays
MDAPDSGGGGSADAGEPIWDWGNLLDFVVQDDDSLILPWDDAAGIAASDPTEAATALLPASPPLPQSVEEEPEPEPEPGPVLPPPPLRVQGIGRRVRKRDPRLVCPNYLAGIVPCACPEVDEMVAAAEVEDVATEFLAGARKKTKTAGRRGKAEAAGTAGGTVRAAVAEMKCQVPGCEADIRELKGYHRRHRVCLRCAHAATVMLDGVQKRYCQQCGKFHVLLDFDEDKRSCRRKLERHNKRRRRKPDSKGTLDKEIDEPLDMPADVSGSDELREENMEGITSEILETVLSNKVMDRETPVGSEDVLSSPTCTQPCLQNDQSKSVVTFAASVEACIGAKQESIKLANSPMHDTKSAYSSSCPTGRISFKLYDWNPAEFPRRLRHQIFEWLGSMPVELEGYIRPGCIILTVFIAMPQHMWDKLSDDAADLLRNLVNSPNSLLLGKGAFFIHVNNMLFQVLKDETTLMSTRLDIQAPRIDYVHPTWFEAGKPVNLILYGSSLDQPNFRSLLSFGGDYLKHDCYRLPSHDTFDGFESGDFIPDSQHEIFRIHITQSRPDIYGPAFVESFGLHVPRPKRNYNVKRWIDVFGISCGVRFSPLVLLVTTVPPSQSVP

SEQ ID NO: 192276 - protein, 846 aa, Zea Mays
MATAARKGSSSRSAAAAAATVAVLFLTVVSAAGGAAATPRRLLVDTDMDTDDLLGLLYLLKQNRSEIDVKAITISANAWSDAGHAVNHLYDMLYMMGRDDIPVGVGGDGGISYAGDVQRDVGGYLPLIDQGMSTDGGCRYRQAIPLSGRLDVDTNSGVRKGFLPRGSRAYRPLRQPTAQRVMADALSAGPTSVLLLGTHTNLALLLMSRPRLRRNVERVYVSGGAVRAAGNLFTAAAANPVAEFNVFGDPFAAYLVLHSGVPITMIPLDATNTIPVTEAFYSEFQRRQRTYEAQYCLLSLDGALARQRRRSDSHDNTGFYLWDPFAVGVAISSMRHGDGETSNEFAELEYMNVTVVTSNKPYGARDDGSNPFFDGRTTPKFGLREGGVHSGHVETGIRDPFCLVPGSNRGRCQDGYTKEVAGPEAVQVLNLPQNTGRFNISTQFPYYREVLYKPDSIMNVTRRGGKPKPVVFDMDMSPGDFVSLICLLKEPRHEIDLKAVLVNGNGWANSASIDIVYDVLHMMGRDDIPVGLGNATALGSPTLGCNNSYAIPQGSGGFVDSDTLYGLARSLPRSPRRFISDDLDHPERRHPSAFDVWRSVRKQLGPGQKITALTSGPLTNLASIISLSDMDAGSVIERVYVVGGVVRDGGDDRGNVFTVPSNRYAEFNMFLDPLAAKTVLESGLNITLIPLNVQRKVSSFEGVLGALKQHTQHTPESKLVRRLLLLLQQLQREQRKFYHHMDIFLGEVLGAVYMVQGSNLEPSVEVKSICIVANTTESINGLILVKKSAKPVDVLYSLNTGAYYDHLANSLVNHKQSAPIGSFGEQKAIWSRPQKHLGTDIAKDRK

SEQ ID NO: 192277 - protein, 135 aa, Zea Mays
MLCQQGKRIEDLSRHNRFYYVTGSNCYTPWVALSICPWPGVWEYVRVNVIKLAVEEMRVPEYLQFKEQLMEEGLRLRELTIREFLRYLTNWKNCFSQWASPTTRSWKPTTYSTRMWIVLCGLSSFENQLGDWELA

SEQ ID NO: 192278 - protein, 269 aa, Zea Mays
MIMAPTVELRQQALDRLLPYQRSDFEGIFRAMDGLSVTIRLLDPPLHEFLPEGNVEEIVRELCSETGANQEDALARIEKLSEVNPMLGFRGCRLGISYPELTEMQARAIFEAAIAMTNQGVQVFPEIMVPLVGTPQELGHQVALIRQVANKVFTSMGKTIGYKIGTMIEIPRAALVADEIAEQAEFFSFGTNDLTQMTFGYSRDDVGKFIPIYLAQGILQHDPFEVGICGEHGGEPSSVAFFAKTGLDYVSCSPFRVPIARLAAAQVLV

SEQ ID NO: 192279 - protein, 73 aa, Zea Mays
MCVQRLLRPSSRRSSSTSYASRAPSTLERVSTTSSLRRAFINVLDVELPYTNHRQSSTQGVAGRHSMKDFLGP

SEQ ID NO: 192280 - protein, 228 aa, Zea Mays
MMKSLLFSAHPTSLLLPAPRLRRLLRLRAASSASASAPPRADRRSPGTPSRRPSSSLYARPSLLDMERDRATRRADVDAFLTSLGVDPGELAGLELPVTVDVMRERAEFLGSLGLTQEDLAAYPLALGCSVRKNMVPVLDYLGKLGVRRDALPDLLRRYPQVLHASVVVDLAPVVKYLQGMDVRPTDVPRVLERYPELLGFKLEGTMSTSVAYLVGIGVGRRQVPWNG

SEQ ID NO: 192281 - protein, 451 aa, Zea Mays
MMKSLLFSAHPTSLLLPAPRLRRLLRLRAASSASASAPPRADRRSPGTPSRRPSSSLYARPSLLDMERDRATRRADVDAFLTSLGVDPGELAGLELPVTVDVMRERAEFLGSLGLTQEDLAAYPLALGCSVRKNMVPVLDYLGKLGVRRDALPDLLRRYPQVLHASVVVDLAPVVKYLQGMDVRPTDVPRVLERYPELLGFKLEGTMSTSVAYLVGIGVGRRQKPYVLGFGLQEKVKPNIEALVDIGVRKEALASIVMQYPDVLGLELRDKLVAQQSLFESSILVSREDFGRVLERMPQAISLGRAAVLKHVNFLTACGFMLSQVSKMVVACPQLLALNIDIMRMNFEYFKNEMERDLEELVEFPAFFTYGIESTVRPRHEMVSRKGLTCSLAWLLNCSDAKFDERMKYDTIGVEEMEREDSSDMNASVDEVESEEYEDSDYGDSDDEFVR

SEQ ID NO: 192282 - protein, 52 aa, Zea Mays
MGAGQRSHVLPVEDTWGSYSKGRGLKRLPTSDTVLIAFRSSLFRPPRKPDCR

SEQ ID NO: 192283 - protein, 108 aa, Zea Mays
MASSQCCDNPPALNPACGKGKVVDSFGGLKAYVAGPEDSKAAVVLVADVFGFEAPILRNIADKVASSGYFVVVPDFFHGDPYVPENAEKLIPVWLKSHTPVRCPLLLP

SEQ ID NO: 192284 - protein, 110 aa, Zea Mays
MNERCISSSNMIKIRRIYKYKQNKGKVLLYYAKLVTYDGALCLIKSLHIDYILHTNKYLSHGNTGCKFEENWTNENPVAIHRDCTNNKNNFEGGMPLWVCGGVEVGKRLT

SEQ ID NO: 192285 - protein, 153 aa, Zea Mays
MEASVLNNLKFEMTVPTAKCFLRRFVRVAQVPDKVHVSLFCSSYQFHVLVDFFFFLQGSSLHLEFLVNYICELSLLEYSLLCYLPSMVAASSVFLAKFILMPIKNPWNSSLSYYTRYTPSELRGCVRVLHRLFRLGPGSNLPAIREKYSQHKG

SEQ ID NO: 192286 - protein, 435 aa, Zea Mays
MNRGQFRASPLQQQVIWSADTATASSSSVVMSAFNFNSCHEDQEAFSPNNLPSLSSPSLLFSHDQQQSFPHTGTTTTSPGHQLLANRGAAAGGCLPSLHDGGQENHHMPESWSQMLLAGLVGGDQERCTAALLSKGMDDWGDHAATASAACMVGGGGTKKDEGSAVPQQPPYSFYGSHGHLAAGGDEHEMPAPASKAQLSQMLLASSPRSCVTTSLGSNMLDFSNSAPPMELKRHHHHSDNSSECNSTATAAGSAVKKPRVQAASSSAQSTLKYETCFCTLQVRKERLGDRITALHQIVSPFGKTDTASVLQETIGYIRFLLGQIEALSYPYMGHGNLTSSSTQNGPAGSERNPAGLFPEYPGQLLNHNHNTGAQQQQPAAVQQPPDEKQGVDDEVKRDLRSRGLCLVPVSCTSHFGGDNAADYWAPAALGGMFR

SEQ ID NO: 192287 - protein, 408 aa, Zea Mays
MNRGQFRASPLQQQVIWSADTATASSSSVVMSAFNFNSCHEDQEAFSPNNLPSLSSPSLLFSHDQQQSFPHTGTTTTSPGHQLLANRGAAAGGCLPSLHDGGQENHHMPESWSQMLLAGLVGGDQERCTAALLSKGMDDWGDHAATASAACMVGGGGTKKDEGSAVPQQPPYSFYGSHGHLAAGGDEHEMPAPASKAQLSQMLLASSPRSCVTTSLGSNMLDFSNSAPPMELKRHHHHSDNSSECNSTATAAGSAVKKPRVQAASSSAQSTLKVRKERLGDRITALHQIVSPFGKTDTASVLQETIGYIRFLLGQIEALSYPYMGHGNLTSSSTQNGPAGSERNPAGLFPEYPGQLLNHNHNTGAQQQQPAAVQQPPDEKQVRLFLSSQMCQTTSRSRERVPFLGTAT

SEQ ID NO: 192288 - protein, 666 aa, Zea Mays
MSSSPTAAPAPTTPSAPPANATNPPPATPSAPPPAAPTPPTPTPPTPSPPSPAAPPPSPPSVPAPAPASTPVTPSAPSPSSPSSPGTPATPSPPSDTPSPPSSGGGGRSPPSSGGGRSTPSSHSPPKSHSPGGGGGSSGPSTSLVVGVAVGGLVLLLLASFICLCCLRKKRRRAPPPPPPQHYGYPPPPPPYKEDPYGGTYQSWQQNAPPAPPPEHVVKMHPSPPPAYANRPPQPPVPPPPAMLNSSGGSGSNYSGGEILPPPSPGAVLGFSKSTFTYEELLRATDGFSDANLLGQGGFGYVHRGLLPNGKEIAVKQLKLGSGQGEREFQAEVEIISRVHHKHLVSLVGYCISGGKRLLVYEFVPNNTLEFHLHAKGRPTMEWPARLKISLGAAKGLAYLHEDCHPKIIHRDIKASNILLDFQFEAKVADFGLAKFTTDNNTHVSTRVMGTFGYLAPEYASSGKLTEKSDVFSFGVMLLELITGRRPVDTTQTYMDDSLVDWARPLLMRALEDGEYDSLVDPRLGKDFNPNEMARMIACAAACVRHSARRRPRMSQVVRALEGNVSLEDLNEGVRPGHSRFFGSYSSSDYDSGQYNEDMKKFKKMAFNNNYTSSQYSAPTSEYGQIPSASSSEGHQTQEMESAAIVYSFMKVVLDQCLLCSSKRAN

SEQ ID NO: 192289 - protein, 172 aa, Zea Mays
MKDPMSQELLEAVEQERNIRSNPSRNTAVFHHPMLGDFEIPIGADDAELEERIIQHLAATAVVRRSHRHHNRRDGHQSRSGASSHPHFLVLSADVHTISGQEEDYEQAPAVASGRPLRTLVEQEHTRGLADASSLLCVTTGHKLFSIFRKRAIHNKNRFKHFRSSLQLRLRS

SEQ ID NO: 192290 - protein, 393 aa, Zea Mays
MGSSPMWWSGPPPSPWSRGLGKWWALVGPFVVKAVGFLLLAGLLFRVLWSFPSSPAPALQITKGKCSLFNGEWIPNPSGPAYTNASCRFIDDHQNCMMNVRFLDSVRNKGWGLIGDSILRNQVQSLLCLLSKAEEPVEVYHDNEFKNRRWHFQSYNFTVSIVWAPFLIKSGIFENEDGVSTSEIQLHLDILDANWTSQYESFDYIIISGGQWFLRTAVYWENGAVVGGHNSQNKNVAELGFEHLYQKTLQNVFNFIVSAKHKPVIFFRTWSPDHFEDGEWFSGGSCRRKLPYNKGEYREGNIERVMRQIELESFNKAVAALRGSADMDRLRLMDTYSLSSLRPDGHVGPYRTPYPFARGSSKSTPVQNDCLHWCVPGPIDAWNDLVMKMALDP

SEQ ID NO: 192291 - protein, 438 aa, Zea Mays
MVGAGRAIRGEGRRVPAARGPLVPGALVLSVLSGAGVADHKSCSTYCAVTQHSAIFKAMHVLGCRHRNDLTSLLSIKKYGTNELGKCSLFNGEWIPNPSGPAYTNASCRFIDDHQNCMMNGRPDKEYLHWKWKPYGCDLPPFDAVRFLDSVRNKGWGLIGDSILRNQVQSLLCLLSKAEEPVEVYHDNEFKNRRWHFQSYNFTVSIVWAPFLIKSGIFENEDGVSTSEIQLHLDILDANWTSQYESFDYIIISGGQWFLRTAVYWENGAVVGGHNSQNKNVAELGFEHLYQKTLQNVFNFIVSAKHKPVIFFRTWSPDHFEDGEWFSGGSCRRKLPYNKGEYREGNIERVMRQIELESFNKAVAALRGSADMDRLRLMDTYSLSSLRPDGHVGPYRTPYPFARGSSKSTPVQNDCLHWCVPGPIDAWNDLVMKMALDP

SEQ ID NO: 192292 - protein, 321 aa, Zea Mays
MMNGRPDKEYLHWKWKPYGCDLPPFDAVRFLDSVRNKGWGLIGDSILRNQVQSLLCLLSKAEEPVEVYHDNEFKNRRWHFQSYNFTVSIVWAPFLIKSGIFENEDGVSTSEIQLHLDILDANWTSQYESFDYIIISGGQWFLRTAVYWENGAVVGGHNSQNKNVAELGFEHLYQKTLQNVFNFIVSAKHKPVIFFRTWSPDHFEDGEWFSGGSCRRKLPYNKGEYREGNIERVMRQIELESFNKAVAALRGSADMDRLRLMDTYSLSSLRPDGHVGPYRTPYPFARGSSKSTPVQNDCLHWCVPGPIDAWNDLVMKMALDP

SEQ ID NO: 192293 - protein, 343 aa, Zea Mays
MSCQWCSKEQLVVVFLLDHTLALDFKFHLCQVTTSKIQNSLALPPAFEFCDLQHNLLVTLGMNTLKELDLSRCKKISDAGIKHIVTIESLEKLHLSETELTDNGVMLISSLTNLSFLDLGGILMTDKTLQSLQVLTKLEHLDIWGSETTNEGASALKSFARLLSLNLALTRVNHLSIPPTTSYLNMSNCEIHSICDVDSEVPVPLENFIVSAATFGNIDKVFSSIQASSLIHLDLSSCKLSNLSFLEKMKNLEHLDLSYNIITDGAIEHIAKIGTNLQYLSLKNTGITSQALCILAGTVPNLTSLSLANTKIDDSALAYIGMIPLLRTIDLSQTSIKGCALAY

SEQ ID NO: 192294 - protein, 196 aa, Zea Mays
MSAFEHLKYLESLNLEDTPLSAEVIPPLASFATLKYLYLKSDFLSDPALHALSAASNLIHLGFRGNILSSFGLLQFVPPVTLCVLDLSGCWILTGDAISTFRKRHPTIELRHELLHEVEENFVGGSQFRKPRRRRSPHVKAEVGNSFAGSSRLHDIRFVDERIKYSKEEFVELQGLAKPNSLMLGVWLPPELRRPK

SEQ ID NO: 192295 - protein, 293 aa, Zea Mays
MKNLEHLDLSYNIITDGAIEHIAKIGTNLQYLSLKNTGITSQALCILAGTVPNLTSLSLANTKIDDSALAYIGMIPLLRTIDLSQTSIKVNSEKLLSMSAFEHLKYLESLNLEDTPLSAEVIPPLASFATLKYLYLKSDFLSDPALHALSAASNLIHLGFRGNILSSFGLLQFVPPVTLCVLDLSGCWILTGDAISTFRKRHPTIELRHELLHEVEENFVGGSQFRKPRRRRSPHVKAEVGNSFAGSSRLHDIRFVDERIKYSKEEFVELQGLAKPNSLMLGVWLPPELRRPK

SEQ ID NO: 192296 - protein, 335 aa, Zea Mays
MVFGRSVEEVDLSGFLSVNSEWLAYLGSFRYLRVLKLADCKNINNDAVWSLSGMNTLKELDLSRCKKISDAGIKHIVTIESLEKLHLSETELTDNGVMLISSLTNLSFLDLGGILMTDKTLQSLQVLTKLEHLDIWGSETTNEGASALKSFARLLSLNLALTRVNHLSIPPTTSYLNMSNCEIHSICDVDSEVPVPLENFIVSAATFGNIDKVFSSIQASSLIHLDLSSCKLSNLSFLEKMKNLEHLDLSYNIITDGAIEHIAKIGTNLQYLSLKNTGITSQALCILAGTVPNLTSLSLANTKIDDSALAYIGMIPLLRTIDLSQTSIKGCALAY

SEQ ID NO: 192297 - protein, 934 aa, Zea Mays
MRKGQLLLLLLLFAAGSTTASAKTDPQDEAALRSLMKRWKNVPASWGKSSPCDMPWDGILCDENGRVTSLNLFGMGMGGTLSDDIGSLTELTILDLSSNRDLGGPLPAAIGKLFKLESFFSGPVPSELGNLSQLTFFALNSNKLTGSIPPSLGKLSNVTWLDLADNQLTGPLPTSRDNRTGLDQLLNAQHFHFNRNMLEGSIPDSLFSSSMHLKHILFDLNRFTGQIPASIGAIPSLTVLRLNNNGFMGPVPALNNLTNLQVLMLSNNKLSGPIPNLTGMGSLENVDISNNSFDPSNVPSWFSDLKSIMTLTMQSVGLSGQLPQKLFSFPQLQHLVLSDNELNGTLDMGNNMSKHLDLVDIQNNKITSVTVYNSFKNLKLEGNPLCNDSLLSDTSPCMGLQTEAPPQPYQFDVQCAYPFIETIVFRAPSFANVFEYLPELQKNLSKQLNSCTPNWLGLVPYFDEDAYLNVNIKACPVKQKRFNYSQVLNCFNLTRQTYKPPEMYGPYYVNAHPYAFHDKTSRAVLIGIVTGSVLLVVGLTLVVFYAVNQKKRAQRLVSINNPFASWGSLGEDIGAAPQLKSAKFFSLEELKLCTNDFREINAIGAGGYGTVYRGKLPDGQLVAIKRSKEGSMQGGLEFKTEIELLSRVHHNNLVGLVGFCFEKGEKMLVYEFIPNGTLSEALYGMKGIQLDWSRRLKIALDSAKGLAYLHDHANPPIIHRDVKSTNILLNEKMTAKVSDFGLSLLVTDSEEGQLCTNVKGTLGYLDPEYYMTQQLTAKSDVYSFGVVLLELIVGKPPIHNNKYIVREVKMALDEDDGTHYGLKDVMDPVLQKIGGLFGFPRFLKLALQCVEEVATARPSMNSIVREIEAIMLDNGLTPGSMSTSSSFSIESRTMKVGPKHPYSSSSMSTSTFDMDSRAFEYSGVFPSSHGSLKP

SEQ ID NO: 192298 - protein, 571 aa, Zea Mays
MRKGQLLLLLLLFAAGSTTASAKTDPQDEAALRSLMKRWKNVPASWGKSSPCDMPWDGILCDENGRVTSLNLFGMGMGGTLSDDIGSLTELTILDLSSNRDLGGPLPAAIGKLFKLESLALIGCSFSGPVPSELGNLSQLTFFALNSNKLTGSIPPSLGKLSNVTWLDLADNQLTGPLPTSRDNRTGLDQLLNAQHFHFNRNMLEGSIPDSLFSSSMHLKHILFDLNRFTGQIPASIGAIPSLTVLRLNNNGFMGPVPALNNLTNLQVLMLSNNKLSGPIPNLTGMGSLENVDISNNSFDPSNVPSWFSDLKSIMTLTMQSVGLSGQLPQKLFSFPQLQHLVLSDNELNGTLDMGNNMSKHLDLVDIQNNKITSVTVYNSFKNLKLEGNPLCNDSLLSDTSPCMGLQTEAPPQPYQFDVQCAYPFIETIVFRAPSFANVFEYLPELQKNLSKQLNSCTPNWLGLVPYFDEDAYLNVNIKACPVKQKRFNYSQVLNCFNLTRQTYKPPEIISRCVDWHCDWICSPGRGAHSGCILRCKSKETGSEACVHQQSFCVLGIIGRRYWCSTTTEEC

SEQ ID NO: 192299 - protein, 920 aa, Zea Mays
MALRRRERKAALRSLMKRWKNVPASWGKSSPCDMPWDGILCDENGRVTSLNLFGMGMGGTLSDDIGSLTELTILDLSSNRDLGGPLPAAIGKLFKLESLALIGCSFSGPVPSELGNLSQLTFFALNSNKLTGSIPPSLGKLSNVTWLDLADNQLTGPLPTSRDNRTGLDQLLNAQHFHFNRNMLEGSIPDSLFSSSMHLKHILFDLNRFTGQIPASIGAIPSLTVLRLNNNGFMGPVPALNNLTNLQVLMLSNNKLSGPIPNLTGMGSLENVDISNNSFDPSNVPSWFSDLKSIMTLTMQSVGLSGQLPQKLFSFPQLQHLVLSDNELNGTLDMGNNMSKHLDLVDIQNNKITSVTVYNSFKNLKLEGNPLCNDSLLSDTSPCMGLQTEAPPQPYQFDVQCAYPFIETIVFRAPSFANVFEYLPELQKNLSKQLNSCTPNWLGLVPYFDEDAYLNVNIKACPVKQKRFNYSQVLNCFNLTRQTYKPPEMYGPYYVNAHPYAFHDKTSRAVLIGIVTGSVLLVVGLTLVVFYAVNQKKRAQRLVSINNPFASWGSLGEDIGAAPQLKSAKFFSLEELKLCTNDFREINAIGAGGYGTVYRGKLPDGQLVAIKRSKEGSMQGGLEFKTEIELLSRVHHNNLVGLVGFCFEKGEKMLVYEFIPNGTLSEALYGMKGIQLDWSRRLKIALDSAKGLAYLHDHANPPIIHRDVKSTNILLNEKMTAKVSDFGLSLLVTDSEEGQLCTNVKGTLGYLDPEYYMTQQLTAKSDVYSFGVVLLELIVGKPPIHNNKYIVREVKMALDEDDGTHYGLKDVMDPVLQKIGGLFGFPRFLKLALQCVEEVATARPSMNSIVREIEAIMLDNGLTPGSMSTSSSFSIESRTMKVGPKHPYSSSSMSTSTFDMDSRAFEYSGVFPSSHGSLKP

SEQ ID NO: 192300 - protein, 314 aa, Zea Mays
MKVLEHIHTLPKVEGLVPIYINPSSGQFSGENIRLGSRGDSYYEYLLKVWVQQEEYRDSSLKYLFEMYTEAMRGVKHLLVRKTVPNGLVFVGELPFGRNGGFSPKMDHLVCFLPGTLALGATKGITKRKALETNLLTDEDIENLQLAEDLAKTCVEMYFVTSTGLAPEIAYFHIEGDTEGGPDGGNKSSKYINDIVIKPLDRHNLLRPETVESLFVLYRITEDSKYREWGWQIFQAFEKYTKVDSGGYTSLDDVTSLPPSTRDKMETFFLGETLKYLYLLFDENNTLPLDKYVFNTEAHPLPVMRSAEQASHSV

SEQ ID NO: 192301 - protein, 520 aa, Zea Mays
MSGSSGPLPYSMRDVGAGGAYNNAKFRHRSRLKMVLQSLATNRSKYHCGKFTVGKFLSLLMVSGLLYLFMHKGSEGIVSSELHGKEVQNKNVRRSPSIRTFWRKPPRLPPRLPPNEIYKNNSLLQQSPSEWTSRQKKVKEAFEHAWSGYQKYAMGYDELMPLSHRGTDGLGGLGATIVDSLDTAIIMGADDVVSEASKWIEDNLMKRISEKGQVNLFETTIRVLGGLLSAYHLSGGDHPGAGDSGVPVTYKKANPERLLEVSKDLADRLLLAFTSSPTAIPLSDVILRDHTAHAAPDGLSSTSEASTLQLEFSYLSKVLGDPKYDRAAMKVLEHIHTLPKVEGLVPIYINPSSGQFSGENIRLGSRGDSYYEYLLKVWVQQEEYRDSSLKYLFEMYTEAMRGVKHLLVRKTVPNGLVFVGELPFGRNGGFSPKMDHLVCFLPGTLALGATKGITKRKALETNLLTDEDIENLQLAEDLAKTCVEMYFVTSTGLAPEIAYFHIEKGGLMVGIKAPNISMIS

SEQ ID NO: 192302 - protein, 158 aa, Zea Mays
MYFVTSTGLAPEIAYFHIEGDTEGGPDGGNKSSKYINDIVIKPLDRHNLLRPETVESLFVLYRITEDSKYREWGWQIFQAFEKYTKVDSGGYTSLDDVTSLPPSTRDKMETFFLGETLKYLYLLFDENNTLPLDKYVFNTEAHPLPVMRSAEQASHSV

SEQ ID NO: 192303 - protein, 453 aa, Zea Mays
MGYDELMPLSHRGTDGLGGLGATIVDSLDTAIIMGADDVVSEASKWIEDNLMKRISEKGQVNLFETTIRVLGGLLSAYHLSGGDHPGAGDSGVPVTYKKANPERLLEVSKDLADRLLLAFTSSPTAIPLSDVILRDHTAHAAPDGLSSTSEASTLQLEFSYLSKVLGDPKYDRAAMKVLEHIHTLPKVEGLVPIYINPSSGQFSGENIRLGSRGDSYYEYLLKVWVQQEEYRDSSLKYLFEMYTEAMRGVKHLLVRKTVPNGLVFVGELPFGRNGGFSPKMDHLLAEDLAKTCVEMYFVTSTGLAPEIAYFHIEGDTEGGPDGGNKSSKYINDIVIKPLDRHNLLRPETVESLFVLYRITEDSKYREWGWQIFQAFEKYTKVDSGGYTSLDDVTSLPPSTRDKMETFFLGETLKYLYLLFDENNTLPLDKYVFNTEAHPLPVMRSAEQASHSV

SEQ ID NO: 192304 - protein, 251 aa, Zea Mays
MAYRRKPQPHPQPQPTPSLEHHYPSSVGPASPDSLAAQAMRASAAHRDASSLTSAYSASASLAASRRSHHEPSVSTPSLDSSGYEYTSMKNLNEAKYGFWGTLARKAKSFLDEDCSPEQYKSPRDDVHVGVQLPHSKQLPGETWKPETPPSQKRSESITSSLTYIGGTIKNALEEGRTIVENKTADIIQETRKLNIRRKGAGLNTQGEAGHKIAQRHLPQNPLDHETQLKASRDVRLQMPWLQKQSCYCGS

SEQ ID NO: 192305 - protein, 325 aa, Zea Mays
MPPPSPPPTPPQPRWRPLAGATTSPPCPHRPCSGYEYTSMKNLNEAKYGFWGTLARKAKSFLDEDCSPEQYKSPRDDVHVGVQLPHSKQLPGETWKPETPPSQKRSESITSSLTYIGGTIKNALEEGRTIVENKTADIIQETRKLNIRRKGAGLNTQGEAGHKIAQRHLPQNPLDHETQLKASRDVANAMAAKAKLLLRELKTVKADLAFAKERCAQLEEENKMLRESYDKGDNPEDDDLIRLQLETLLAEKARLAHENSVYARENRFLREIVEYHQLTMQDVIYVDEGIEEVTEVYPTQVLPRTGSSVSRAATAATPKSAPTST

SEQ ID NO: 192306 - protein, 148 aa, Zea Mays
MIAAAKDIGAAKLNGEDPRDFLAGLASNIGLDKFRAATLVCASVATRTRTCFLQCWALEIQGKRPEALDELVKICRIHYIFPPEDNSAEMEMVAAGLEKNLHVAERVHLLYLYRSVCTAGNLKTAAQALGLRQLCEGIGVWLVALEVK

SEQ ID NO: 192307 - protein, 131 aa, Zea Mays
MIAAAKDIGAAKLNGEDPRDFLAGLASNIGLDKFRAATLALEIQGKRPEALDELVKICRIHYIFPPEDNSAEMEMVAAGLEKNLHVAERVHLLYLYRSVCTAGNLKTAAQALGLSLPNENTEGFAMPIRQP

SEQ ID NO: 192308 - protein, 59 aa, Zea Mays
MEMVAAGLEKNLHVAERVHLLYLYRSVCTAGNLKTAAQALGLRQLCEGIGVWLVALEVK

SEQ ID NO: 192309 - protein, 66 aa, Zea Mays
MDWDCRLDCGLTGTGGSQNRPRTLFSSAKRPTPQLEPSSPHPTTVVATAPARHSIGSLVTQTKKEW

SEQ ID NO: 192310 - protein, 95 aa, Zea Mays
MEATVVVAAAVEAEEEEAAAAAASTPQRSGRKRPRAIGSGRYRSVSSQQAGSRPGTDGRRRRMEAAATSQPHRRPRTQEKEAVFAWTGIADLTAD

SEQ ID NO: 192311 - protein, 123 aa, Zea Mays
MIWCMFHTIERWPLGSKKCVKKGRTSILWFLKILIGTMSGLIHLLIRLLLGITLFSQGSMFIMPRAHGTQSANSLRMMKTGLMWVKRMKTMKILCLMTLTWMMKKQQTTMVDVVMSKKRMVLV

SEQ ID NO: 192312 - protein, 62 aa, Zea Mays
MKGDKELVGTLCGFDVYVNMVLEDVTEYEYTAEGRRITKLDQILLNGNNIAILVPGGSPPDV

SEQ ID NO: 192313 - protein, 571 aa, Zea Mays
MGSGSSKATTSSTSPTAAEAGGEGKRPNGSEKARRGRSLLPLPSSSCFRGSTTPCDCDVSAVAVDVECNKGGETASLPSLTHTTKSDEDVLATPKSHPGEEITLPSSDRERDQDDGVLQNAAATNTLTAASQLTDPSGRSRPRFGVNFGLSRAVSLGSSVACSILSSGLPTSANPGEGRGDVDDSSDTVISQQGSAPTAGIDSTLDMLRDSVTAQARAARQARRNLQESEDAILRNSYRRMGSQEPFEGSVRFSRTLSVGRLRDRVLKRPPFSDGLFTPALLYDRAVWLSGNASARQDSAVMQRTNSDRSSESRSDPSTNGLYNLSSERQASNSDLLERRSVFLERRRRIRSQVRALQRLGSRFENLSGHERSCILSGQHRTGTCNCRTGSRQGNPDEETSTRASISRIVMLAEALFEVLDEIHHQSAALSSSRPAFSSIGSVPAPREIVERLPAKVYRRPLKYHSEEAAQCYICLVEYEEGDCLRILPCHHEFHLTCVDKWLKEIHRVCPLCRGDVCRSDALIGKDAPVLYGKFALKLVTRYCEFKTLVWWGEFVDIGLLPSVSLYRCDV

SEQ ID NO: 192314 - protein, 541 aa, Zea Mays
MGSGSSKATTSSTSPTAAEAGGEGKRPNGSEKARRGRSLLPLPSSSCFRGSTTPCDCDVSAVAVDVEGGETASLPSLTHTTKSDEDVLATPKSHPGEEITLPSSDRERDQDDGVLQNAAATNTLTAASQLTDPSGRSRPRFGVNFGLSRAVSLGSSVACSILSSGLPTSANPGEGRGDVDDSSDTVISQQGSAPTAGIDSTLDMLRDSVTAQARAARQARRNLQESEDAILRNSYRRMGSQEPFEGSVRFSRTLSVGRLRDRVLKRPPFSDGLFTPALLYDRAVWLSGNASARQDSAVMQRTNSDRSSESRSDPSTNGLYNLSSERQASNSDLLERRSVFLERRRRIRSQVRALQRLGSRFENLSGHERSCILSGQHRTGTCNCRTGSRQGNPDEETSTRASISRIVMLAEALFEVLDEIHHQSAALSSSRPAFSSIGSVPAPREIVERLPAKVYRRPLKYHSEEAAQCYICLVEYEEGDCLRILPCHHEFHLTCVDKWLKEIHRVCPLCRGDVCRSDALIGKGCSCIVWKIRIETGHTLL

SEQ ID NO: 192315 - protein, 490 aa, Zea Mays
MGSGSSKATTSSTSPTAAEAGGEGKRPNGSEKARRGRSLLPLPSSSCFRGSTTPCDCDVSAVAVDVECNKGGETASLPSLTHTTKSDEDVLATPKSHPGEEITLPSSDRERDQDDGVLQNAAATNTLTAASQLTDPSGRSRPRFGVNFGLSRAVSLGSSVACSILSSGLPTSANPGEGRGDVDDSSDTVISQQGSAPTAGIDSTLDMLRDSVTAQARAARQARRNLQESEDAILRNSYRRMGSQEPFEGSVRFSRTLSVGRLRDRVLKRPPFSDGLFTPALLYDRAVWLSGNASARQDSAVMQRTNSDRSSESRSDPSTNGLYNLSSERQASNSDLLERRSVFLERRRRIRSQVRALQRLGSRFENLSGHERSCILSGQHRTGTCNCRTGSRQGNPDEETSTRASISRIVMLAEALFEVLDEIHHQSAALSSSRPAFSSIGSVPAPREIVERLPAKVYRRPLKYHNAIFALLNMKREIVFVYFHAIMNFI

SEQ ID NO: 192316 - protein, 180 aa, Zea Mays
MVYLPDYVEYQYVAAPPLRTLFPMASDDALDLLSKMLTYDPKARISAQQALEHRYFSSLPAPTRPSQLPRPRRKGDQGNNKIPDLNLQDGPMVLSPPRKLRRVTAHEGMEGMHRTDKVDEHPSGMRHTDDMPSQSSRIPMSVDVGAVFGTRPAPRPTLNSADKSRLKRKLDMDPEFGYAE

SEQ ID NO: 192317 - protein, 52 aa, Zea Mays
MSDENFPMNSSFLIESICRGFGNRGDNRFEFGGEYRHGLTPNGESRASRLRS

SEQ ID NO: 192318 - protein, 441 aa, Zea Mays
MLPARPLLVAAAVFLLLLPVHVAIVAAQGFRGFSYLLNCGAASPTTDSRGLRWDPDGDYVSAGTPGVVSLSGLINPTLATLRTFPLRYGAKFCYELPVDRNRRYLIRPTFFYGALFASSSAPPPPVFDLIVDGTFWTAVNTTDDALAGAASSYEGVFPASGRNMSFCLGVNPDYTDARPFISALQVIQLDDSVYNATDFPTSAMGLIARTKFGSTGGIERYPNDSFDRYWQPFPDDKHAVSSTQNVTSADFWNLPPPDVFNTAFIAEQDAPLVLQWPPVPLQNDSYYVALYFADTLPDNSRTFDVYINDYLFFKDLNVTSAGLSVFATQWILSGLTTIILKSASPSALPPLINAGEVFGLFPVGRLTYARDVLALESIKKSLQNIPEDWNGDPCMPSGYSWTGVTCDEGSKIRVISLHLQENQLSGSVPETLGTINTLREM

SEQ ID NO: 192319 - protein, 263 aa, Zea Mays
MLRPFLSPPLTALPPPPASTAAAAGAAAMRPASSSSSRSSAGGGGAHHHQHNHGGHSISVSPPTCRHAPSSATLDLLILLLVLFSLAFLLASSLSHVARSLSPLLATPPAAAALAYATAALPYLAAAAVLVATAFLSCRRLPRRRCRNPRCRGLRKALEFDVQLQTEGALRAGAGSTAGGAEASMWREIEALPWKGGQGGNNPDYECLRAELRRMAPPNGRAVLLFRNRCGCPVAKLEGWGAPKSKRRNKKGTQGSFHDRGLR

SEQ ID NO: 192320 - protein, 63 aa, Zea Mays
MYSVVILCPTMHLYCYNMFILDACDTNPLFIHTKTSSSDTIGRRGAHPFFLVSLTLQLLKVIE

SEQ ID NO: 192321 - protein, 58 aa, Zea Mays
MIMCYFTVYDGNRTLEGGGTAEACFIKIQAAHELLIHDERRRAYDREDHVNPMKELQT

SEQ ID NO: 192322 - protein, 53 aa, Zea Mays
MIFRWSYLNVVCYGRKMIFWHYMVPSFYYLAKKYLNVTDRFPISLFWITFPFL

SEQ ID NO: 192323 - protein, 1405 aa, Zea Mays
MGYEEGELELEEGEAASGGGRELVIPDALTCIDERIQNVLGHLRKKFEGEITHMNLGSMYGCHGSFLPTYPRSPLGFPQYRNTADPKNHGSASRSLHVLTENAQKNHFVKTELDSSRKNEYCRISNESDGNQQMLNRAVIGSEQKARKIRIKLNSNKSLPRNTAAIYSGLGLDISPSSSAEDNLDETAGALVPEVLPDESPRAILEIMTSHYIPGGHLLSPLKENVLELKQKPKVMVKQEAPEFQVKVELHGDWGCTTSATLDNKDKCTKEIKSDEKKDKIPIFRSSKIRVNKPSAVNKGTKPLQDVLDDTGSNLLPTIVNTEHTVEEPAKFTGAISDKMKGSKDGASKGHISGKNKNIKEEPSLDHGFSRKNRCDSDEYNGKPHASSCQLQNIPNKTSPLERDKGKVLHMEDEPSQYKSKENGDLFSADSMAVMVGNVDRNSLGMMKGKKKVSSLQATLSGKFKFKAKKQLNDNIDRKKYGEDEHYALDHRIGLDNSYQIDKSVRLEKKTISSGEIDNKSDVGNDGGVNISAMFDEKSDVLPLASASLPAPEPILINEQWVCCDKCENWRLLPYGMNPDILPKKWRCSMQSWLPGMNSCKITEDETTKALRALYMVPAPENNIKDGGHDNAMSGKGTAIAPTFQGNTQSISSLGKLKGSLDGANVANTLESAGMSKPSKNLHAPSSRNFSKLKEKRKLVESSDKGEIVGKDQSRRMRSSVGVDHDNLRASKKMKKESNGPVMKHQPSEFEISKSSPASETLKNIQKRSCISPGMGKYGLSSSGKHSHGEDKDFSAVVIKTSDTENSGPRDSSIKKRKLKQRQSSQHFRDPHCSNNDTNGITKQNITEINAVKKKSRSELNLLKTDRIATDSRGTVGGVDDRISTDKECLSEQLQENTHFQHPSLVEGTTKREIRHAQTPIAATSSSSKMSNSNKYIAHFQETRASPVESVSSSPLRSSDKNPLGRHRSSSWTITENVHSQESGKINSSCSNRNYDLGSDCDKAKARISGCFNGDVSHHVQKDRDFLKDKQDVMNACLINKGSGFGARNFQLSPEHKVNPDVLSSHDNDGHKQPTVRQNGKTQPHFGSNQGDHANLTYGHIKPGKGNIPNKDQKTNPSAVKASKQQPSLNNASNGDASYKARQIEKAVIENLDTRKHITLNGDASNLTSASVLLKEARDLKHLSKRLKEKGDDFESTSMCFEAGLKFLHVASLWETPNIDSSNQGVSIQAMKLYSETGILFGFCAHEFERLKKMANAALAYKCVEVAYMKAAFFRSPGVIKDRHALHAASLMVAPDIDNLNNQSTVAKAVSARGVYSPQIASNSISRNNHHLMGLLSYAEDTNNSFEGTRKSQTSFSAYLSGIGKNQVDEVALVRKVLDFSFHNVKGLLQLIRHSLESINHESGK

SEQ ID NO: 192324 - protein, 1414 aa, Zea Mays
MGYEEGELELEEGEAASGGGRELVIPDALTCIDERIQNVLGHLRKKFEGEITHMNLGSMYGCHGSFLPTYPRSPLGFPQYRNTADPKNHGSASRSLHVLTENAQKNHFVKTELDSSRKNEYCRISNESDGNQQMLNRAVIGSEQKARKIRIKLNSNKSLPRNTAAIYSGLGLDISPSSSAEDNLDETAGALVPEVLPDESPRAILEIMTSHYIPGGHLLSPLKENVLELKQKPKVMVKQEAPEFQVKVELHGDWGCTTSATLDNKDKCTKEIKSDEKKDKIPIFRSSKIRVNKPSAVNKGTKPLQDVLDDTGSNLLPTIVNTEHTVEEPAKFTGAISDKMKGSKDGASKGHISGKNKNIKEEPSLDHGFSRKNRCDSDEYNGKPHASSCQLQNIPNKTSPLERDKGKVLHMEDEPSQYKSKENGDLFSADSMAVMVGNVDRNSLGMMKGKKKVSSLQATLSGKFKFKAKKQLNDNIDRKKYGEDEHYALDHRIGLDNSYQIDKSVRLEKKTISSGEIDNKSDVGNDGGVNISAMFDEKSDVLPLASASLPAPEPILINEQWVCCDKCENWRLLPYGMNPDILPKKWRCSMQSWLPGMNSCKITEDETTKALRALYMVPAPENNIKDGGHDNAMSGKGTAIAPTFQGNTQSISSLGKLKGSLDGANVANTLESAGMSKPSKNLHAPSSRNFSKLKEKRKLVESSDKGEIVGKDQSRRMRSSVGVDHDNLRASKKMKKESNGPVMKHQPSEFEISKSSPASETLKNIQKRSCISPGMGKYGLSSSGKHSHGEDKDFSAVVIKTSDTENSGPRDSSIKKRKLKQRQSSQHFRDPHCSNNDTNGITKQNITEINAVKKKSRSELNLLKTDRIATDSRGTVGGVDDRISTDKECLSEQLQENTHFQHPSLVEGTTKREIRHAQTPIAATSSSSKMSNSNKYIAHFQETRASPVESVSSSPLRSSDKNPLGRHRSSSWTITENVHSQESGKINSSCSNRNYDLGSDCDKAKARISGCFNGDVSHHVQKDRDFLKDKQDVMNACLINKGSGFGARNFQLSPEHKVNPDVLSSHDNDGHKQPTVRQNGKTQPHFGSNQGDHANLTYGHIKPGKGNIPNKDQKTNPSAVKASKQQPSLNNASNGDASYKARQIEKAVIENLDTRKHITLNGDASNLTSASVLLKEARDLKHLSKRLKEKGDDFESTSMCFEAGLKFLHVASLWETPNIDSSNQGVSIQAMKLYSETGILFGFCAHEFERLKKMANAALAYKCVEVAYMKAAFFRSPGVIKDRHALHAASLMVAPAESPSSSASDIDNLNNQSTVAKAVSARGVYSPQIASNSISRNNHHLMGLLSYAEDTNNSFEGTRKSQTSFSAYLSGIGKNQVDEVALVRKVLDFSFHNVKGLLQLIRHSLESINHESGK

SEQ ID NO: 192325 - protein, 214 aa, Zea Mays
MASRILARSKALPLVAALTPAAAKAATPIAGARALSSLPRYPSAPSPHGLGKVLGYEPTSHLSGPQVLPRWFSSLASNGSQISETYKSGGEMKQSETRKSSEEATPKVVAFSPLEAAIAKPRSSPLTSESSKVRRSEIATQVTFYMIPALLLASKNSISTSLLVGAVFHQVYMFHKEILLDYVHHDITRKWALIYFKLLLLVMAKDTIMYFNLF

SEQ ID NO: 192326 - protein, 202 aa, Zea Mays
MELSPVGRWADLPEDIAVAVASCLQEADVCALGGCSRSWRRACDADCIWERLFRCRWPSAVASASPVQVPQRRVKGWKALYISQHRRMAVAISNVVEFVGSSLNNESLESEYYLKAIADLALIPDIGFLDVQFFLFSRNHSAIINLIGLHYSIASLHVLVSYVLLMILLWRNRLCVERTQHCFVSKLLKQLFLMLYWKLHQQ

SEQ ID NO: 192327 - protein, 116 aa, Zea Mays
MGHFGLQLLIRGGFCPKGYFCWHLTVIISFCAKNHRKLRDGYLVEIFQSLMPKRHFPLPCYLKNVKQQISYFSYVLHNKRLTIPQVGVFSPWGDFRRVFISFSCFLKIKGILFILY

SEQ ID NO: 192328 - protein, 155 aa, Zea Mays
MADKEPVVERPEAGEEEEDASAAAAAGEEEDTGAQVAPIVRLEEVAVTTGEEDEDVLLDMKAKLYRFDKDGNQWKERGTGAVKLLKHKQTGKVRLVMRQAKTLKICANHLVASTTKMQEHAGSDKSCVWHAADFADGELKEEMFAIRLQEVQGVG

SEQ ID NO: 192329 - protein, 182 aa, Zea Mays
MADKEPVVERPEAGEEEEDASAAAAAGEEEDTGAQVAPIVRLEEVAVTTGEEDEDVLLDMKAKLYRFDKDGNQWKERGTGAVKLLKHKQTGKVRLVMRQAKTLKICANHLVASTTKMQEHAGSDKSCVWHAADFADGELKEEMFAIRFGSVESIQFWWPGVDIAAWEASNQIQKLQEVQGVG

SEQ ID NO: 192330 - protein, 120 aa, Zea Mays
MPPPQPLTMDPKMTEVTQMFARFKTAYACNDLNTCVTLLSQLKVHLTQFPSHPALFQQTPNIVEELKLARDIYEHAVVLSMKFEDQDAFERNFCQLKPYYVDTWLVLCHPICRFYFPLLF

SEQ ID NO: 192331 - protein, 106 aa, Zea Mays
MAMSWIRSVVRRALIAPKPRGSRQFTVTAAGGGATQTERVAAEMVRYALGGAVHRSSPEEAMRILEQGASNLQGGGEGSAEAVGLLMLAMSTLLYRRCGALHHSFL

SEQ ID NO: 192332 - protein, 356 aa, Zea Mays
MAMSWIRSVVRRALIAPKPRGSRQFTVTAAGGGATQTERVAAEMVRYALGGAVHRSSPEEAMRILEQGASNLQGGGEGSAEAVGLLMLAMSTLLYRSGRRQDAVEKLKATQQVAPSAVFRAWEALMGLHMEAGQEMSYLISPNDSVDLSIKYDSKWSDQDHLKFRVNAVRGLVTLLNGETESAAQLFDGWCRDFSRGENQTENAAVSYGEYLHCVGDFQMAAQVYEKILEAFCMDDMSGNLLAAGNMVPEEASLGATCSYGQLLSHSGKFAEAEDYLTRALQKAEEQFGANHPKVGIILTCVARMYKLKAKSEGSTSIMVQEGLYRKALEVLKAPAINSEGKNNDLLSMIRFLLIC

SEQ ID NO: 192333 - protein, 180 aa, Zea Mays
MAAQVYEKILEAFCMDDMSGNLLAAGNMVPEEASLGATCSYGQLLSHSGKFAEAEDYLTRALQKAEEQFGANHPKVGIILTCVARMYKLKAKSEGSTSIMVQEGLYRKALEVLKAPAINSEGEYAELLLIQSNRKAEGERMKQWAEDAWRNRRLTLAQALEFSEPSKPTVVVDTRIGRVV

SEQ ID NO: 192334 - protein, 166 aa, Zea Mays
MAMSWIRSVVRRALIAPKPRGSRQFTVTAAGGGATQTERVAAEMVRYALGGAVHRSSPEEAMRILEQGASNLQGGGEGSAEAVGLLMLAMSTLLYRSGRRQDAVEKLKATQQVAPSAVFRVAAWEALMGLHMEAGQLICQSNMIANGLIRTILNFGLMLSEDLLHF

SEQ ID NO: 192335 - protein, 353 aa, Zea Mays
MAMSWIRSVVRRALIAPKPRGSRQFTVTAAGGGATQTERVAAEMVRYALGGAVHRSSPEEAMRILEQGASNLQGGGEGSAEAVGLLMLAMSTLLYRSGRRQDAVEKLKATQQVAPSAVFRVAAWEALMGLHMEAGQEMSYLISPNDSVDLSIKYDSKWSDQDHLKFRVNAVRGLVTLLNGETESAAQLFDGWCRDFSRGENQTENAAVSYGEYLHCVGDFQMAAQVYEKILEAFCMDDMSGNLLAAGNMVPEEASLGATCSYGQLLSHSGKFAEAEDYLTRALQKAEEQFGANHPKVGIILTCVARMYKLKAKSEGSTSIMVQEGLYRKALEVLKAPAINSEGKNNDLLSMIR

SEQ ID NO: 192336 - protein, 397 aa, Zea Mays
MTLASLARALGRSARSSRPRQGFQLGGLRQPPAPPLPPPVHGGEGGAAGFVRSYLTAASSAALGKPSAGKTVDWRYVLASPHFRRLFSDGSKKNYENYYPKGKKEVPKGDGTNKSESKQESNTDEGWNFQDNAMKHMQNFLAPLLILGLMLSSMSSSSADQKEVISKLERRTVAYHESGHAVAGWFLEHAEPLLKVTIVPRGTAALGFAQYVPNENLLMTKEQLFDMTCMTLGGRAAEEVLIGKISTGAQNDLEKVTKMTYAQVAVYGFSEKVGLLSFPQKDGGFEMSKPYSNQTASIIDDEVREWVGKAYKKTVELITEHKEQVAQIAELLLEKEVLHQDDLTRVLGERPFKALEPTNYDLFKKGFEDGGDNSQAPAENAELPDDSSPPVGDVVPT

SEQ ID NO: 192337 - protein, 682 aa, Zea Mays
MKHMQNFLAPLLILGLMLSSMSSSSADQKEISFQEFKNKLLEPGLVDRIVVSNKSVAKVYIRSSPHPKSQGQDSDIHITTTDAPGKPAPSRCKYYFNIGSVDLFEEKLEEAQEALGIDPHDFVPVTYVAEVNWFQEVMRFAPTALIVGLLYFTGKRMQSGFNIGGGAGKGRGGIFNIGKATVMKMDKNSKNKVFFKDVAGCDEAKQEIMEFVHFLKNPKKYEDLGAKIPKGALLVGPPGTGKTLLAKATAGESGVPFLSISGSDFMEMFVGVGPSRVRNLFQEARQCAPSIVFIDEIDAIGRARGRGGFSGSNDERESTLNQLLVEMDGFGTTSGVVVLAGTNRPDILDKALLRPGRFDRQIAIDKPDIKGRDQIFRIYLKKLKLDNKPSFYSQRLAALTPGFAGADIANVCNEAALIAARSEETQITMQHFESAIDRIIGGLEKKNRVISKLERRTVAYHESGHAVAGWFLEHAEPLLKVTIVPRGTAALGFAQYVPNENLLMTKEQLFDMTCMTLGGRAAEEVLIGKISTGAQNDLEKVTKMTYAQVAVYGFSEKVGLLSFPQKDGGFEMSKPYSNQTASIIDDEVREWVGKAYKKTVELITEHKEQVAQIAELLLEKEVLHQDDLTRVLGERPFKALEPTNYDLFKKGFEDGGDNSQAPAENAELPDDSSPPVGDVVPT

SEQ ID NO: 192338 - protein, 547 aa, Zea Mays
MAAASTPARSSAHLSQPVRVVLRVRPFLSSEAASATAPCVSLLGCHPGGGVTVQLKDQHTSRSEQYKLDAFFRQEDSVSQIFDQEVRAVIPSIFEGINATVFAYGATGSGKTYTMQGTEDFPGLIPLAASTILALCTGTWCSVEISYYEVYMERCYDLLEPKAKEIMALDDKDGNMQLKGLSWVPVRSMEEFQELYSIGVQRRKVAHTGLNDVSSRSHAVLSLRVSSTDVVKGKLNLIDLAGSEDNKRTLNEGIRLQESSKINQSLFALSNVISALNKNEHRIPYRQSKLTRLLRDSLGGGCRTVMIACLNPAEYQESANTVSLAARSCHIENFTSSSKQETPKLKIDMEAKLRAWLESKGKTKSIQRMDGLFSPIASKTPLSVSHMKQPTSSRIPCRVKAMDQDGGKIKKILFDPVVHVPTENIPREHRQTEVNTPKKVVLPSVTPCNEKHEASLRKALSPISSNMVPVEQQIPDNGNCPVLLEPQTPIEKRNIVEETPGATPLERFNALGSNLKGRATAAERNWREESRIYSGITGGLTKTIQNS

SEQ ID NO: 192339 - protein, 543 aa, Zea Mays
MAAASTPARSSAHLSQPVRVVLRVRPFLSSEAASATAPCVSLLGCHPGGGVTVQLKDQHTSRSEQYKLDAFFRQEDSVSQIFDQEVRAVIPSIFEGINATVFAYGATGSGKTYTMQGTEDFPGLIPLAASTILALCTGTWCSVEISYYEVYMERCYDLLEPKAKEIMALDDKDGNMQLKGLSWVPVRSMEEFQELYSIGVQRRKVAHTGLNDVSSRSHAVLSLRVSSTDVVKGKLNLIDLAGSEDNKRTLNEGIRLQESSKINQSLFALSNVISALNKNEHRIPYRQSKLTRLLRDSLGGGCRTVMIACLNPAEYQESANTVSLAARSCHIENFTSSSKQETPKLKIDMEAKLRAWLESKGKTKSIQRMDGLFSPIASKTPLSVSHMKQPTSSRIPCRVKAMDQDGGKIKKILFDPVVHVPTENIPREHRQTEVNTPKKVTPCNEKHEASLRKALSPISSNMVPVEQQIPDNGNCPVLLEPQTPIEKRNIVEETPGATPLERFNALGSNLKEALVQQYLDLLNVANKLTLCHKKYPVFSSLYF

SEQ ID NO: 192340 - protein, 419 aa, Zea Mays
MTNGLPESNGYIYVEANGGLNQQRTSICNAVAIAGFLNATLIIPNFHFHSIWRDPSKFSDIYDKDHFVQRLQNDVRVVDEIPDFMMERFGHNLSNVFNFKIKAWARIQYYKDVVLPKLVEERVIRISPFANRLSFDAPSAVQRLRCLANFEALKFSKPIVSLSETLVSRMRERSAESDGKYISVHLRFEEDMIAFSCCVYDGGDEEKKEMDAAREIGWRGKFTKRGRVIRPGVIRMNGKCPLTPLEVGLMLRGMGFSNKTAIFLASGKIYRAEKNMASLLEMFPLLQTKETLASEEELAPFKNFSSRMAAVDYSVCAQSEVFVTTQGGNFPHFLMGHRRYLYGGHSKTIKPDKRRLVVLFDNPRIGWKALKRHLLNMRAHSDAKGIEMKRPSESIYTFPCPDCMCRLNRTEHSKSKHSR

SEQ ID NO: 192341 - protein, 433 aa, Zea Mays
MQGQAYSRLGSFGAAASAPPPPSAPVRPGAGAGGASRTPAKAGPARAIPGTAASATAAARAGVAHRGGGGAARRVARAVLATLLRRQAVFLFAPLLYVAAMLLYMGSLPLDAVPRIIARQPPGSVYRSPQLYARLRADMDADNSTGALATVWRHTYKGGTWWPCINNMTNGLPESNGYIYVEANGGLNQQRTSICNAVAIAGFLNATLIIPNFHFHSIWRDPSKFSDIYDKDHFVQRLQNDVRVVDEIPDFMMERFGHNLSNVFNFKIKAWARIQYYKDVVLPKLVEERVIRISPFANRLSFDAPSAVQRLRCLANFEALKFSKPIVSLSETLVSRMRERSAESDGKYISVHLRFEEDMIAFSCCVYDGGDEEKKEMDAAREIGWRGKFTKRGRVIRPGVIRMNGKCPLTPLEVCQYLITEGWVNASWNGFQQ

SEQ ID NO: 192342 - protein, 312 aa, Zea Mays
MQGQAYSRLGSFGAAASAPPPPSAPVRPGAGAGGASRTPAKAGPARAIPGTAASATAAARAGVAHRGGGGAARRVARAVLATLLRRQAVFLFAPLLYVAAMLLYMGSLPLDAVPRIIARQPPGSVYRSPQLYARLRADMDADNSTGALATVWRHTYKGGTWWPCINNMTNGLPESNGYIYVEANGGLNQQRTSICNAVAIAGFLNATLIIPNFHFHSIWRDPSKFSDIYDKDHFVQRLQNDVRVVDEIPDFMMERFGHNLSNVFNFKIKAWARIQYYKDVVLPKLVEESAESSGFLLLPTDSHLMHLLLFNG

SEQ ID NO: 192343 - protein, 198 aa, Zea Mays
MQGQAYSRLGSFGAAASAPPPPSAPVRPGAGAGGASRTPAKAGPARAIPGTAASATAAARAGVAHRGGGGAARRVARAVLATLLRRQAVFLFAPLLYVAAMLLYMGSLPLDAVPRIIARQPPGSVYRSPQLYARLRADMDADNSTGALATVWRHTYKGGTWWPCINNMTNGLPESNGYIYVEANGGLNQQRTSVVVLP

SEQ ID NO: 192344 - protein, 389 aa, Zea Mays
MSSPNPPPSPHHPQPPPSPGLSQPPGAQLQAPASQGTTAPMLGDHTAAALVPTAPPADVLAGSSRLQAFTPHEMTAAILELGQAVAGIRAFLAGPYTPPPQLPPPQQPPASAPSYQYGMPPDWAGSASSSSPQASQGLPIHMVRFPPSPSPLPAWATVTSAPVFGSAAIQPHTFHFGYSKFSDIYDKDHFVQRLQNDVRVVDEIPDFMMERFGHNLSNVFNFKIKAWARIQYYKDVVLPKLVEERVIRISPFANRLSFDAPSAVQRLRCLANFEALKFSKPIVSLSETLVSRMRERSAESDGKYISVHLRFEEDMIAFSCCVYDGGDEEKKEMDAAREIGWRGKFTKRGRVIRPGVIRMNGKCPLTPLEVCQYLITEGWVNASWNGFQQ

SEQ ID NO: 192345 - protein, 250 aa, Zea Mays
MRERSAESDGKYISVHLRFEEDMIAFSCCVYDGGDEEKKEMDAAREIGWRGKFTKRGRVIRPGVIRMNGKCPLTPLEVGLMLRGMGFSNKTAIFLASGKIYRAEKNMASLLEMFPLLQTKETLASEEELAPFKNFSSRMAAVDYSVCAQSEVFVTTQGGNFPHFLMGHRRYLYGGHSKTIKPDKRRLVVLFDNPRIGWKALKRHLLNMRAHSDAKGIEMKRPSESIYTFPCPDCMCRLNRTEHSKSKHSR

SEQ ID NO: 192346 - protein, 84 aa, Zea Mays
MSSPSASCLCARPTARGGLIREVAGFAPYEKRITELLKVGKDKRALKLAKRKLGTHKRAKKKREEMMGVLRKMRSAGTHTDKKK

SEQ ID NO: 192347 - protein, 70 aa, Zea Mays
MVRGLIREVAGFAPYEKRITELLKVGKDKRALKLAKRKLGTHKRAKKKREEMMGVLRKMRSAGTHTDKKK

SEQ ID NO: 192348 - protein, 529 aa, Zea Mays
MAEEVQAPLSATMAKEAQSPPSATIAEATAPPQLLLFNSFTKREEPFQPRVEGKVGMYVCGVTPYDFSHIGHARAYVAFDVLYRYLKFLGYEVEYVRNFTDIDDKIIKRANERGETVTSLSSQFINEFLLDMTELQCLPPTCEPRVTEHIEHIIKLITQIMENGKAYAIEGDVYFSVESFPEYLSLSGRKFDQNQAGARVAFDTRKRNPADFALWKAAKEGEPFWDSPWGRGRPGWHIECSAMSAHYLGHVFDIHGGGKDLIFPHHENELAQSRAAYPDSEVKCWMHNGFVNKDDKKMAKSDNNFFTIRDIIALYHPMALRFFLMRTHYRSDVNHSDQALEIASDRVYYIYQTLYDCEEVLATYREEDVLDRCFMELLKAINSSLNDLKKLQQKIEQQKKKQQQQKKQQQQKQQQQKQQQLQKQPEDYIQALIALETELKNKLSILGLMPSSSLAEVLKQLKDKSLKRAGLTEEQLQEQIEQRNVARKNKQFEISDGIRKNLATKGIALMDEPSGTVWRPCEPERSEES

SEQ ID NO: 192349 - protein, 558 aa, Zea Mays
MAEEVQAPLSATMAKEAQSPPSATIAEATAPPQLLLFNSFTKREEPFQPRVEGKVGMYVCGVTPYDFSHIGHARAYVAFDVLYRYLKFLGYEVEYVRNFTDIDDKIIKRANERGETVTSLSSQFINEFLLDMTELQCLPPTCEPRVTEHIEHIIKLITQIMENGKAYAIEGDVYFSVESFPEYLSLSGRKFDQNQAGARVAFDTRKRNPADFALWKAAKEGEPFWDSPWGRGRPGWHIECSAMSAHYLGHVFDIHGGGKDLIFPHHENELAQSRAAYPDSEVKCWMHNGFVNKDDKKMAKSDNNFFTIRDIIALYHPMALRFFLMRTHYRSDVNHSDQALEIASDRVYYIYQTLYDCEEVLATYREEGTSLPVPSEEQNLIGKHHSEFLKHMSNDLKTTDVLDRCFMELLKAINSSLNDLKQKIEQQKKKQQQQKKQQQQKQQQQKQQQLQKQPEDYIQALIALETELKNKLSILGLMPSSSLAEVLKQLKDKSLKRAGLTEEQLQEQIEQRNVARKNKQFEISDGIRKNLATKGIALMDEPSGTVWRPCEPERSEES

SEQ ID NO: 192350 - protein, 168 aa, Zea Mays
MAGTPSQASLLLQKQLKDLAKNPVDGFSAGLVDDSNVFEWQVTIIGPPDTLYDGGYFNAIMTFPQNYPNSPPSVRFTSGMWHPNVYPDGRVCISILHPPGEDPSGYELASERWTPVHTVESIVLSIISMLSSPNDESPANIEAADWREKRDEFKKKVRQCVRRSQEML

SEQ ID NO: 192351 - protein, 183 aa, Zea Mays
MAGTPSQASLLLQKQLKDLAKNPVDGFSAGLVDDSNVFEWQVTIIGPPDTLYDGGYFNAIMTFPQNYPNSPPSVRFTSGMWHPNVYPDGRVCISILHPPGEDPSGYELASERWTPVHTVESIVLSIISMLSSPNDESPANIEAAMPLVSEVIHDFALQKDWREKRDEFKKKVRQCVRRSQEML

SEQ ID NO: 192352 - protein, 1863 aa, Zea Mays
MSSGAIGASDPGGGETKPVAGGDVTTSEAAGEVPAFAADVKVEGKATLATDVDREGGDTAVSDPLYANESAGMVGAEGHGDEPAEGLEAVNGEEEMLEAGARDLLTETEKNPVLVVHVPAAAAGGGSAIPEHAEAESNKVEDHVNVEPGTKNNESDNGIAHFDKEIQNNVPDDIEESSKEHEGDGAPVVDQTNNASEMLPQTGEQFPDVENSTDSNLEAASLGSVDQGARYCLPPHDKGGFQVADLVWGKVKSHPWWPGEIFDPSDASELALKHQKKGSHLVAYFGDNTFAWCDESQLKPFVTNYSQMEKQSSSDAFVGSVNNALEELSRRILSGMSCSCLPEELADNGMSYTVDNAGLKDGVTCSAVNRPEILNCFSPENLLHYIKELALFPGQGGDLLELVIACSQLTSFYRSKGCPELASFQTGDAWVEDGLDCTDTLSTQNVMVEEPVINEVHPTQDKPKRGRGRPRKQKPGGDQVVMEKRSISNQVNDTSYNEKQVGMDFDNYGNLQNKNKRNFESFEDSEKSSAPTGGSSFKIGECIRRAASQLTGSPSIMKAQNAAEGENGEFDIFSDDAGDELTVEKRAKRRSLHRNHTADPKELLSQLCLVATEPMNGYNFSVMIISYFSDYRNYIVSTTTEANIVDKGTSRRGRKRKEVLPSPDVETTDHMQDSYWSGLSLHNHPIHDLRKESPTTRPRRRRRSSSHAYVPLSELGEPVPKKQIQVMERSIIHVDEKMIDELKPTALVLSFARSASIPSELDLVKMFSRFGPLKEREAEVHRETNTVKVVFKKRADAERAFSAAGKYGTFGPSLRSYRLVSMPFSLETQSANNPVKHPENHGMEIPGSNQSEAPKDSMEVDLVQKTDEVEVAGEPSSEEVETVRQISQVQAADSTFVSQDRFDEAGNIDAELIDHVNQIGKAAQAASVSEESRDVEQVYTQKEVSANDLPTETEILNSDAITKELPQNAPDNVETDIVEDPKQSHNSRDNAVFEAVIEAPSTAQDHTEEDTGNAVPEEPMVSPELQSQTPGDLPTETETLHSDAILKKLPQNAPDNMQTDIAEDPKQSHNSGDNAVFEAVTEAPSTAQDHTEDDTGNEVPEEHMVSLELQSQTPGDLPTETETLHSDAIVKELPHNAPDNMQTDIAEDPKQSHNPGGNAVFDAVTEARSTTQDHTEDDTGNEVPEEDMVSLELQSQTPGDLPTETETLYSDAIVKELPHNAPDNLQTDIARDPKQSHNLGDNAVFEAVTEAPSTAQDHTEDDTGNEVPEEHMVSPELQSQTPGDLPTETETLHSDAMIKELPQNAPNSMQTDIAEDPKQSHNPGDNAVFEAVTEAPSTAQDHTEDDTGNKVPEEHMVSLELQSQTPGDPPTETETLHSDAIVKELPHNAPDNMQTDIAEDPKQSHNPGDAVFEAVTEAPSTAQDHTEDDTGNEVPEEHMVSPELQSQTPGDLPTETETLHSDAIMKELPQIAPDNMQVDIAEHPNQSHNSGDNAVFEAVAEAPSTAHDHTEDDTGNEVPEEDMVSSELQGQTPGEKLVGQSATEQMVGSEDPKPQAENFVAEPVVLGAVGQVEIELESKTTVEVSGEQGYSIEQTVQVEALIEASGGQLEVGRQIPEDESIACATTEHSMVVDETVEAKVVLLDESIENNAAVIGVVEETAEGETKEEASDEKGKIENNEDADKLAPAGKGKIENNEIIIDAPDEKTENKADADTPAGETKEGEITVEETDEKIESKVTAEPVIGETTEGQTAAGEPVEEARTAEDMVEDVKVLDDKSTAAEKPVENATVVAHENSTTVENTLKDAIVAPPDANTTNAEKTAIGATIETQNEDAPAERTIEDTSVEAPDVQAGATRGYESTKE

SEQ ID NO: 192353 - protein, 532 aa, Zea Mays
MNFFAGLLLLLMPEENAFWTLVGIMDDYFDGYFSEEMIESQVDQLVLEELVREKFPKLANHLDYLGLQVAWVTGPWFLSIFTNVLPWESVLRVWDVLLFDGNRVMLFRTALALLEFYGPALVTTKDAGDAVTLLQSLAGSTFDSSQLVLTARMGYQSVNETILQELSNKHRPPVISAMEERAKGLGVWTDTNGLASKLYNFKRDPEPLVSLSDSTDQLSDVGDGDTNQESDLGNMDDEYGGVIVNSEIDSLPDPKDQVAWLKLELCRLIEERRSAVLRADELETALMEMVKQDNRRQLSAKVEQFEQEISELRQALSDKQEQEQAMFQVLMRVEQELKIAEEARISAEQDAAAQRYAANVLQEKYEEAMASLAQMENRAVMAETMLEATLQYQSSQQKAMSPCPSPRPSMLDASPSQSSQNSSQEFQPRRKNLLGPFSLSWRDKNKEKPNNADDSTNTKSTNNDEMVETSNTNDEKHRETLDLNSEQRAESPKADVKMRAETPEKDNDLPGVQLVTDDLNGHHEQMQEIKLD

SEQ ID NO: 192354 - protein, 164 aa, Zea Mays
MASLAQMENRAVMAETMLEATLQYQSSQQKAMSPCPSPRPSMLDASPSQSSQNSSQEFQPRRKNLLGPFSLSWRDKNKEKPNNADDSTNTKSTNNDEMVETSNTNDEKHRETLDLNSEQRAESPKADVKMRAETPEKDNDLPGVQLVTDDLNGHHEQMQEIKLD

SEQ ID NO: 192355 - protein, 171 aa, Zea Mays
MEKYEEAMASLAQMENRAVMAETMLEATLQYQSSQQKAMSPCPSPRPSMLDASPSQSSQNSSQEFQPRRKNLLGPFSLSWRDKNKEKPNNADDSTNTKSTNNDEMVETSNTNDEKHRETLDLNSEQRAESPKADVKMRAETPEKDNDLPGVQLVTDDLNGHHEQMQEIKLD

SEQ ID NO: 192356 - protein, 581 aa, Zea Mays
MEKVLPLIHTGGLTALSPSTCSNLIGLLAKLACTSLVAVKSLFELGVSSTIKGILITSDISHGMPYLPLEKQNNQGLTCGSQNLPAETCPKQGTSSSGQAERNTTILSDYTIQQKLVFSLNGKELDRSVTLYQSILQDHINAGSEIILDMQFWRSVHDITFKAANPEANRTAVNPEANDSPRHSSTAMSSINENTTGFTWQMLPFFSSMLLGKLPCKLDRSGASYDILFMLHILEGLNRYSFHLVSDERNRSFAHGRITNLDDLKAEVFSIPQQEFVSAKLTDKLEQQMHDPLVSRSCCLPLWCIELMSACPFLFSFEARWKYFQLTAFGSLKNHHGHMMDASVNSVAERGSSHSRKKFKVDRDDILVSAAKMMKSHAKSNALLEVEYKEEVGTGLGPTMEFYTLISHEFQKSGLGMWRGELPCKSGTHDTHVSRFVVASNGLFPRPWSASEDPASFQEVSERFHLLGLVVAKAIKDNRILDIPFSKAFYKLILGQELNIYDIQSLDSELAICLVEFQALACQRKYAESNLTRDCQISDLTYRGCRIEDLAIEFALPGYPEYVLSPGSRSDCVSVLSSACF

SEQ ID NO: 192357 - protein, 1607 aa, Zea Mays
MGGGRRATWPLCGVARMELVPDLASTSQSGRGLRRAGGRIMAFAAVAAGRQEGSALASVIGEGSGAATASGSPPMDRCRKRPDSDPEGCSEPEPPADKRPCTAEPSTSAAAVAAAPPPGARQAEQGGSDMDTSSSGHHGDADVDADDGDGDGDGDGDGDGGSSCESDGDGSPGPRGSGGGRFQRMVDAVADDGAGQDALLAALTELCEALSFCTEDVGGYFPTEAAARALVRRAGGGDGAGTTPDVILLSVRAITYLCDAMPRAADAVVRHGLLPVLCSRLLTIEYVDVAEQCLQAFEKISRRQPTQCLQAGMINAVLAFIDFFAASIQRVAVSAVANACKKVPSDCSQFVLDAVPTLCNLLQSEDKVIVEKVAACLVSIADSFSTSVDLVDHLCHQGVMEKVLPLIHTGGLTALSPSTCSNLIGLLAKLACTSLVAVKSLFELGVSSTIKGILITSDISHGMPYLPLEKQNNQVNEALKLANQLIPSAARDVEDTQIILAKEKILTDEPRFLCQFSRDILPVLIKAVNSGANSYICYGCASIVNNICYFSKSEILQDLLKETNIPSFLAGLLSRKDHHVLTSSLKIVEILMQKLPNAYLGFFIKEGVVNAVEALLNQQDCSKSTHMPDNMQQPETQPVIRNKTTCFCYAFDACRSEAAEKRTCRIGKDSLFTFARHVKTTYFTKDVVSSEMGLTEILQKLKNCCAVLNETTDKSSEQCNLQNEEYLSTILSEVMMELHGGETMTTFEFLESGLVKSLSNYLSNGKYLQVEDNMGCSSDHLLAVVKRFQSFSRMSFSRMGQGWDDMLLTLLVRKLQNALTSLDNFPVIMSHNFKPRSSIADIPTRHSTITPCIRVRFKKDEDETKLSSYNSAVNVEISSSLQTIEEFLWPKVSIDVNSQKAESPPSDTALEIKYADDDSQEQDSTPSQKADSPSEGLTCGSQNLPAETCPKQGTSSSGQAERNTTILSDYTIQQKLVFSLNGKELDRSVTLYQSILQDHINAGSEIILDMQFWRSVHDITFKAANPEANRTAVNPEANDSPRHSSTAMSSINENTTGFTWQMLPFFSSMLLGKLPCKLDRSGASYDILFMLHILEGLNRYSFHLVSDERNRSFAHGRITNLDDLKAEVFSIPQQEFVSAKLTDKLEQQMHDPLVSRSCCLPLWCIELMSACPFLFSFEARWKYFQLTAFGSLKNHHGHMMDASVNSVAERGSSHSRKKFKVDRDDILVSAAKMMKSHAKSNALLEVEYKEEVGTGLGPTMEFYTLISHEFQKSGLGMWRGELPCKSGTHDTHVSRFVVASNGLFPRPWSASEDPASFQEVSERFHLLGLVVAKAIKDNRILDIPFSKAFYKLILGQELNIYDIQSLDSELAICLVEFQALACQRKYAESNLTRDCQISDLTYRGCRIEDLAIEFALPGYPEYVLSPGSRSDCLNAENLEEYVRHVVDATVKSGIARQMEAFKSGFNEVFPLKKLQVFSEDELERLLCGEQDTWDFAKLVDHIKFDHGYTSSSPPVINLLEIIQEFGSIQRRAFLQFITGSPRLPPGGLAALNPKFTVVRKNNSNDVDHDLPSVMTCANYLKLPPYSSKMREKLLYAITEGQGSFHLS

SEQ ID NO: 192358 - protein, 1147 aa, Zea Mays
MPYLPLEKQNNQVNEALKLANQLIPSAARDVEDTQIILAKEKILTDEPRFLCQFSRDILPVLIKAVNSGANSYICYGCASIVNNICYFSKSEILQDLLKETNIPSFLAGLLSRKDHHVLTSSLKIVEILMQKLPNAYLGFFIKEGVVNAVEALLNQQDCSKSTHMPDNMQQPETQPVIRNKTTCFCYAFDACRSEAAEKRTCRIGKDSLFTFARHVKTTYFTKDVVSSEMGLTEILQKLKNCCAVLNETTDKSSEQCNLQNEEYLSTILSEVMMELHGGETMTTFEFLESGLVKSLSNYLSNGKYLQVEDNMGCSSDHLLAVVKRFQSFSRMSFSRMGQGWDDMLLTLLVRKLQNALTSLDNFPVIMSHNFKPRSSIADIPTRHSTITPCIRVRFKKDEDETKLSSYNSAVNVEISSSLQTIEEFLWPKVSIDVNSQKAESPPSDTALEIKYADDDSQEQDSTPSQKADSPSEGLTCGSQNLPAETCPKQGTSSSGQAERNTTILSDYTIQQKLVFSLNGKELDRSVTLYQSILQDHINAGSEIILDMQFWRSVHDITFKAANPEANRTAVNPEANDSPRHSSTAMSSINENTTGFTWQMLPFFSSMLLGKLPCKLDRSGASYDILFMLHILEGLNRYSFHLVSDERNRSFAHGRITNLDDLKAEVFSIPQQEFVSAKLTDKLEQQMHDPLVSRSCCLPLWCIELMSACPFLFSFEARWKYFQLTAFGSLKNHHGHMMDASVNSVAERGSSHSRKKFKVDRDDILVSAAKMMKSHAKSNALLEVEYKEEVGTGLGPTMEFYTLISHEFQKSGLGMWRGELPCKSGTHDTHVSRFVVASNGLFPRPWSASEDPASFQEVSERFHLLGLVVAKAIKDNRILDIPFSKAFYKLILGQELNIYDIQSLDSELAICLVEFQALACQRKYAESNLTRDCQISDLTYRGCRIEDLAIEFALPGYPEYVLSPGSRSDCLNAENLEEYVRHVVDATVKSGIARQMEAFKSGFNEVFPLKKLQVFSEDELERLLCGEQDTWDFAKLVDHIKFDHGYTSSSPPVINLLEIIQEFGSIQRRAFLQFITGSPRLPPGGLAALNPKFTVVRKNNSNDVDHDLPSVMTCANYLKLPPYSSKEKMREKLLYAITEGQGSFHLS

SEQ ID NO: 192359 - protein, 1522 aa, Zea Mays
MGGGRRATWPLCGVARMELVPDLASTSQSGRGLRRAGGRIMAFAAVAAGRQEGSALASVIGEGSGAATASGSPPMDRCRKRPDSDPEGCSEPEPPADKRPCTAEPSTSAAAVAAAPPPGARQAEQGGSDMDTSSSGHHGDADVDADDGDGDGDGDGDGDGGSSCESDGDGSPGPRGSGGGRFQRMVDAVADDGAGQDALLAALTELCEALSFCTEDVGGYFPTEAAARALVRRAGGGDGAGTTPDVILLSVRAITYLCDAMPRAADAVVRHGLLPVLCSRLLTIEYVDVAEQCLQAFEKISRRQPTQCLQAGMINAVLAFIDFFAASIQRVAVSAVANACKKVPSDCSQFVLDAVPTLCNLLQSEDKVIVEKVAACLVSIADSFSTSVDLVDHLCHQGVMEKVLPLIHTGGLTALSPSTCSNLIGLLAKLACTSLVAVKSLFELGVSSTIKGILITSDISHGMPYLPLEKQNNQVNEALKLANQLIPSAARDVEDTQIILAKEKILTDEPRFLCQFSRDILPVLIKAVNSGANSYICYGCASIVNNICYFSKSEILQDLLKETNIPSFLAGLLSRKDHHVLTSSLKIVEILMQKLPNAYLGFFIKEGVVNAVEALLNQQDCSKSTHMPDNMQQPETQPVIRNKTTCFCYAFDACRSEAAEKRTCRIGKDSLFTFARHVKTTYFTKDVVSSEMGLTEILQKLKNCCAVLNETTDKSSEQCNLQNEEYLSTILSEVMMELHGGETMTTFEFLESGLVKSLSNYLSNGKYLQVEDNMGCSSDHLLAVVKRFQSFSRMSFSRMGQGWDDMLLTLLVRKLQNALTSLDNFPVIMSHNFKPRSSIADIPTRHSTITPCIRVRFKKDEDETKLSSYNSAVNVEISSSLQTIEEFLWPKVSIDVNSQKAESPPSDTALEIKYADDDSQEQDSTPSQKADSPSEGLTCGSQNLPAETCPKQGTSSSGQAERNTTILSDYTIQQKLVFSLNGKELDRSVTLYQSILQDHINAGSEIILDMQFWRSVHDITFKAANPEANRTAVNPEANDSPRHSSTAMSSINENTTGFTWQMLPFFSSMLLGKLPCKLDRSGASYDILFMLHILEGLNRYSFHLVSDERNRSFAHGRITNLDDLKAEVFSIPQQEFVSAKLTDKLEQQMHDPLVSRSCCLPLWCIELMSACPFLFSFEARWKYFQLTAFGSLKNHHGHMMDASVNSVAERGSSHSRKKFKVDRDDILVSAAKMMKSHAKSNALLEVEYKEEVGTGLGPTMEFYTLISHEFQKSGLGMWRGELPCKSGTHDTHVSRFVVASNGLFPRPWSASEDPASFQEVSERFHLLGLVVAKAIKDNRILDIPFSKAFYKLILGQELNIYDIQSLDSELAICLVEFQALACQRKYAESNLTRDCQISDLTYRGCRIEDLAIEFALPGYPEYVLSPGSRSDCLNAENLEEYVRHVVDATVKSGIARQMEAFKSGFNEVFPLKKLQVFSEDELERLLCGEQDTWDFAKLVDHIKFDHGYTSSSPPVINAAWLH

SEQ ID NO: 192360 - protein, 163 aa, Zea Mays
MADAPASPGGGGSVREQDRFLPIANISRIMKKAIPANGKIAKDAKETVQECVSEFISFITSEASDKCQREKRKTINGDDLLWAMATLGFEDYIEPLKVYLQKYREVQGDSKLTSKSSDGSIKKDALGHVGASSSAVQGMGQQGTYNQGMGYMQPQYHNGDISN

SEQ ID NO: 192361 - protein, 155 aa, Zea Mays
MADAPASPGGGGGSHESGSPRGGGGGGGGSVREQDRFLPIANISRIMKKAIPANGKIAKDAKETVQECVSEFISFITSEASDKCQREKRKTINGDDLLWAMATLGFEDYIEPLKVYLQKYREVRTDEGIGDFRLIGLIWWSGCAITNLSPCRLYL

SEQ ID NO: 192362 - protein, 194 aa, Zea Mays
MADAPASPGGGGGSHESGSPRGGGGGGGGSVREQDRFLPIANISRIMKKAIPANGKIAKDAKETVQECVSEFISFITSEASDKCQREKRKTINGDDLLWAMATLGFEDYIEPLKVYLQKYREVQGDSKLTSKSSDGSIKKDALGHVGASSSAVQGMGQQGTYNQGMGYMQPQVIDKKILGSCYLLFICVYKHNV

SEQ ID NO: 192363 - protein, 189 aa, Zea Mays
MADAPASPGGGGGSHESGSPRGGGGGGGGSVREQDRFLPIANISRIMKKAIPANGKIAKDAKETVQECVSEFISFITSEASDKCQREKRKTINGDDLLWAMATLGFEDYIEPLKVYLQKYREMEVCCIKHCLMGDSKLTSKSSDGSIKKDALGHVGASSSAVQGMGQQGTYNQGMGYMQPQYHNGDISN

SEQ ID NO: 192364 - protein, 132 aa, Zea Mays
MKKAIPANGKIAKDAKETVQECVSEFISFITSEASDKCQREKRKTINGDDLLWAMATLGFEDYIEPLKVYLQKYREGDSKLTSKSSDGSIKKDALGHVGASSSAVQGMGQQGTYNQGMGYMQPQYHNGDISN

SEQ ID NO: 192365 - protein, 109 aa, Zea Mays
MKKAIPANGKIAKDAKETVQECVSEFISFITSEASDKCQREKRKTINGDDLLWAMATLGFEDYIEPLKVYLQKYREVRTDEGIGDFRLIGLIWWSGCAITNLSPCRLYL

SEQ ID NO: 192366 - protein, 142 aa, Zea Mays
MDRAQLLLVGLPALLFFSDLTHIFAPPPPHLRHPHHHPPHHQHPHPPHHPHSPHPHPHPPHHPHPHPPHHHQHPDPSTAIIQEPRVDEAGFGSTVELQFCASCSYKYSQNLLSRGSLASSSCGTLLAADCLGLHLGGIRGKP

SEQ ID NO: 192367 - protein, 792 aa, Zea Mays
MASRAPIPPAPPHLRLHAASLFSQRLPLPRARAPRCRGGRSRLLSALPSPPPSPASRSQGVSTAPIEREPPGLAPTPAPTPAQQPHQDPAIAAEVARLSAARERLRAAHTLHEKLRALDAEPRVAAFFGEESSRGVLGVLEPREVLLLKCLVAAGQEHVLGHELDWYGGDGGHHEHHHRNGVSGGSALRDALYSLAGLVGKWTSEGVVAAKERREEMEVLPRLLKFLDNVEEFYDCIGGIIGHTRSYQIMVLELLSASKDRMHRPSKDKFVDFHVPSGLNLLKDKEYASQAALWGIEGLPELGEIYPIGGAGDRLGLVDSDTGESLPAALLPYCGRSLLEGLIRDLQAREFLHFKIFGGQCITPVAIMTSSVKDNHEHIIAICERLDWFGRGRDNFRLFEQPLVPVVNAKDGKWLISKSLFPVGKPGGHGAIWKLAYDRGVLQWLQNCGRKGATVRQVSNVVAATDLTMMALAGIGLRCNKKLGFASCERRPGATEGVNVLIEKQNLEGLWSYGITCIEYTEFEKYGIPEPTLTNSSQVSFPANTNILYVDLQAVQEVGSRKNASCLPGMVLNLKKAVSYPNHLGFECSAAGGRLECTMQNIADDFMNTFNYRCSKGIESELNTFIVYNERKRVTSSAKRKLKSEDRSLHQTPEGSLLDIMRNAHDLLSSCGIDIPMVQDNSEYMHSGPPFLIFLHPALGPFWDIIRQKFVGGSVSKGSELQIEVAEFLWKDVEVTIKTISLHALCLFLQTKFIMLNSYKLDGSFIILADNVMGSTKNSKNGEQILHYGSRL

SEQ ID NO: 192368 - protein, 920 aa, Zea Mays
MASRAPIPPAPPHLRLHAASLFSQRLPLPRARAPRCRGGRSRLLSALPSPPPSPASRSQGVSTAPIEREPPGLAPTPAPTPAQQPHQDPAIAAEVARLSAARERLRAAHTLHEKLRALDAEPRVAAFFGEESSRGVLGVLEPREVLLLKCLVAAGQEHVLGHELDWYGGDGGHHEHHHRNGVSGGSALRDALYSLAGLVGKWTSEGVVAAKERREEMEVLPRLLKFLDNVEEFYDCIGGIIGHTRSYQIMVLELLSASKDRMHRPSKDKFVDFHVPSGLNLLKDKEYASQAALWGIEGLPELGEIYPIGGAGDRLGLVDSDTGESLPAALLPYCGRSLLEGLIRDLQAREFLHFKIFGGQCITPVAIMTSSVKDNHEHIIAICERLDWFGRGRDNFRLFEQPLVPVVNAKDGKWLISKSLFPVGKPGGHGAIWKLAYDRGVLQWLQNCGRKGATVRQVSNVVAATDLTMMALAGIGLRCNKKLGFASCERRPGATEGVNVLIEKQNLEGLWSYGITCIEYTEFEKYGIPEPTLTNSSQVSFPANTNILYVDLQAVQEVGSRKNASCLPGMVLNLKKAVSYPNHLGFECSDMEVNLQHKVLDSEVKASIQARKLDFNYKHGHKNSCRAELDCAPKPVLETGKHIDRIWNPTAAVAAGGRLECTMQNIADDFMNTFNYRCSKGIESELNTFIVYNERKRVTSSAKRKLKSEDRSLHQLLCIPELCSTPEGSLLDIMRNAHDLLSSCGIDIPMVQDNSEYMHSGPPFLIFLHPALGPFWDIIRQKFVGGSVSKGSELQIEVAEFLWKDVELDGSFIILADNVMGSTKNSKNGEQILHYGSRCGRCRLQSVKIVNEGINWTSPNNVYWKHDVERSESVKIILHGNAEFEAKDVVLKGNHVFEVPDGHRMCIIQDRAGLLISSGI

SEQ ID NO: 192369 - protein, 589 aa, Zea Mays
MASRAPIPPAPPHLRLHAASLFSQRLPLPRARAPRCRGGRSRLLSALPSPPPSPASRSQGVSTAPIEREPPGLAPTPAPTPAQQPHQDPAIAAEVARLSAARERLRAAHTLHEKLRALDAEPRVAAFFGEESSRGVLGVLEPREVLLLKCLVAAGQEHVLGHELDWYGGDGGHHEHHHRNGVSGGSALRDALYSLAGLVGKWTSEGVVAAKERREEMEVLPRLLKFLDNVEEFYDCIGGIIGYQIMVLELLSASKDRMHRPSKDKFVDFHVPSGLNLLKDKEYASQAALWGIEGLPELGEIYPIGGAGDRLGLVDSDTGESLPAALLPYCGRSLLEGLIRDLQAREFLHFKIFGGQCITPVAIMTSSVKDNHEHIIAICERLDWFGRGRDNFRLFEQPLVPVVNAKDGKWLISKSLFPVGKPGGHGAIWKLAYDRGVLQWLQNCGRKGATVRQVSNVVAATDLTMMALAGIGLRCNKKLGFASCERRPGATEGVNVLIEKQNLEGLWSYGITCIEYTEFEKYGIPEPTLTNSSQVSFPANTNILYVDLQAVQEVGSRKNASCLPGMVLNLKKAVSYPNHLGFELLLEAG

SEQ ID NO: 192370 - protein, 294 aa, Zea Mays
MASRAPIPPAPPHLRLHAASLFSQRLPLPRARAPRCRGGRSRLLSALPSPPPSPASRSQGVSTAPIEREPPGLAPTPAPTPAQQPHQDPAIAAEVARLSAARERLRAAHTLHEKLRALDAEPRVAAFFGEESSRGVLGVLEPREVLLLKCLVAAGQEHVLGHELDWYGGDGGHHEHHHRNGVSGGSALRDALYSLAGLVGKWTSEGVVAAKERREEMEVLPRLLKFLDNVEEFYDCIGGIIGYQIMVLELLSASKDRMHRPSKDKFVDFHVPSGLNLLKDKEYASQAALWGIEN

SEQ ID NO: 192371 - protein, 432 aa, Zea Mays
MGGVAHPTHHQSVSQQPQPRTITKAAHESTTAPRLFFFTCVACPAPMETLLAGNPANGVAKPTCNGVGALPVANSHAIIATPPAAATLAPAGATLGRHLARRLVQIGASDVFAVPGDFNLTLLDYLIAEPGLTLVGCCNELNAGYAADGYARSRGVGACAVTFTVGGLSVLNAIAGAYSENLPVVCIVGGPNSNDYGTNRILHHTIGLPDFSQELRCFQTITCYQAIINNLDDAHEQIDTAIATALRESKPVYISVSCNLAGLSHPTFSRDPVPMFISPRLSNKANLEYAVEAAADFLNKAVKPVMVGGPKIRVTAQDVSTMLRCGQKSIIFLINNGGYTIEVEIHDGPYNVIKNWDYTGLVNAIHNSEGNCWTMKVRTEEQLKEAIATATGAKKDCLCFIEVIVHKDDTSKELLEWGSRVSAANSRPPNPQ

SEQ ID NO: 192372 - protein, 643 aa, Zea Mays
MGGVAHPTHHQSVSQQPQPRTITKAAHESTTAPRLFFFTCVACPAPMETLLAGNPANGVAKPTCNGVGALPVANSHAIIATPPAAATLAPAGATLGRHLARRLVQIGASDVFAVPGDFNLTLLDYLIAEPGLTLVGCCNELNAGYAADGYARSRGVGACAVTFTVGGLSVLNAIAGAYSENLPVVCIVGGPNSNDYGTNRILHHTIGLPDFSQELRCFQTITCYQIDTAIATALRESKPVYISVSCNLAGLSHPTFSRDPVPMFISPRLSNKANLEYAVEAAADFLNKAVKPVMVGGPKIRVAKAREAFAAVADASGYPFAVMPAAKGLVPEHHPRFIGTYWGAVSTTFCAEIVESADAYLFAGPIFNDYSSVGYSLLLKREKAVIVQPDRMVVGDGPAFGCILMPEFLRALAKRLRRNTTAYDNYRRIFVPDREPPNGKPNEPLRVNVLFKHIKGMLSGDSAVVAETGDSWFNCQKLRLPEGCGYEFQMQYGSIGWSVGATLGYAQAAKDKRVIACIGDGSFQVTAQDVSTMLRCGQKSIIFLINNGGYTIEVEIHDGPYNVIKNWDYTGLVNAIHNSEGNCWTMKVRTEEQLKEAIATATGAKKDCLCFIEVIVHKDDTSKELLEWGSRVSAANSRPPNPQ

SEQ ID NO: 192373 - protein, 291 aa, Zea Mays
MMLQCNHLNPKNLSMILWRRTRWLLRVQLWVSQRTMEQSMWLHVHSSHKECPVCKGEVTEGNITPIYGRGNSGSAMEKVAEDGNASGPKIPPRPHGNRLESFRQQFHHLRPISRRLGEAHGFLSTWRRIFDQHLANSMSRFEGTPELSVSETAQHASRLGRMTTRLRARRLQREAENPTPIVSSAPDSGQPRNNTPDLPRRSSSPFPSEGMDLLRQIAFAGLEDSERFATAVSELRRIARPSHYGASTSSNPPNPEPIDGTHIAMALAADQASNSSTMAVIQEDAAFAENS

SEQ ID NO: 192374 - protein, 305 aa, Zea Mays
MDEPSPLELADGDAVLWLPEPAAVDLAPQLPDEVDVEPDGVDPASPLLVVSPSLVVDPSPPLPLDCKVDRHRDDPFQPAVETMLAFQSDTERILLLRSLSIPRTQDDESALAVLEPSRIDWDAIEIEPRWDEEGTEGVASEHGLYVKLGLQKEDEKGKKVRESRAKKRGVSTFENEYIDDHEGMAYLEHIPEDRAIVYDWTNPVMKVGALYPNMSVFRLAVRHYAIMKEFELGIETTSTSRYRGLCMGDDCPWRLHAVLEVPGSATIIVTAMTDRHTCTSSARRRTTTPTSSWVAGLALPILMKK

SEQ ID NO: 192375 - protein, 504 aa, Zea Mays
MPDSVIEIDAEEEDGKVFFSRFFCAFGPCIKRFLQGCRPYLSVDSTALNGRWNGHLPSATSVDGQNWMFPVAFGFFDFETEKNWTWFMKQLHKAVGDLPVLAVCSDACKGLLNSVKSVFPYAEKRECFRHLVQNFIKLFQGSQHLFPAARAYMPEVFEQYYANVESVPGVSNWFNKHHNMLWYRSGFNPAIKCDYITNNIAEVFNNWVKDYKDLPVCELADKIRELLMDLFHRRRRIGEKFQGKILPAVISVLNARTRGLGHLSVTQGDYFDAEVRDHNDCITRHIVKAKDRYCSCQEWMHTGKPCQHGLVVIISQQYRNVKLEDFVDDSYSVEKFRKAYEGRVEQLRDKFFWPRVDFANEVSAPLGKRGVGRQWKNRIKGCLEGGSGRKHKGNETEKDRKVIRRKYKCPNCGELGHRKNSPKCPQNGTKKKPRKPRKNTTKGWIPPAPREDVGSSQTPLALSHALEDAGSSQPSARVAESPPRQTRIAVRKMTPKKKKISSMI

SEQ ID NO: 192376 - protein, 187 aa, Zea Mays
MGRMWHADGPCVAHRCGGLCGRGKRRRVRARRRGEGMAVVYTIILIVSREVEIFCQVAHFHNPKRAKGRNNRVTKPLDKHVTIPIISLVRVPSRAIARRLRLVHTTQPLSPLRSLTVKPTPQTPSLQECQIIHCGLFLLFLRPSHHDCHPSLPSPQAVPLLVPAPLHLSQPPPSRAPPAPPPPPQLR

SEQ ID NO: 192377 - protein, 214 aa, Zea Mays
MQAEALVKAQDDLRETTGHLGMTLIKLAKFEREQATCNSLRRRAGEIHNFANSVLKMSRSQIKLNSEMVKHLGSIHEYLEMMISVHHAFTDRSNALYYVQSLSADLFSLHTRAGGLESSSARDMGHEWSTYQKVEGLKEAIRSAEAAKSDAVREYESIKENNMIEIKRFDKERRHDFIEMLKGFVVTQVSYSDHFANMWTKVTEETEVYANRSN

SEQ ID NO: 192378 - protein, 458 aa, Zea Mays
MFGSGRSLIDKISSIDDSMFGSTSYLSEQARVVDDYTISQVITRELSDGDVSRLLIVVTGASHVMYGPRGSGVPGRISKKVPKKDQVVVLLDPERQVIRREGEVPIADFLWYSAAKPCTRNCFDRAEIARVMNAAGRRPEALPQDLQKGLDLGVVSPEILQNFFDLEKYPVMTELIHRFQGFRERLLADPKFLQRLAIEEVISITTTLLAQYERRKGRFFEEIDYVLTDTIRGSVVDFFTVWLPAPTISVLQYADDGSGSSLEFVKGLLGSLPDNAFQKNILGQDWSIKQRIAAVLVGGLKLASVGFISSVGAGVSSDLIYAARGIVKPSENVETGRKRSPIWKSAAVYSCFLGTSANLRYQIIAGLVEYRLGESLVTYYNQPLIAGLLSFVARTLNSYWGTQQWVDLARYTGLQRSEEKPPAEATMPPDSAHLEGCTTEGHDFDDSSNNTNKSTGPS

SEQ ID NO: 192379 - protein, 643 aa, Zea Mays
MLSHAPSQIPAASKPRLSSRRRSSRLGAKHLTATAAAASTLRSVSASRRGFVLFVPSLAAASAVLRPLPSAATEADDTESPAPHPPPTEESLSPQPAADAAETKPEASESAMSRVYDATVLGEPEALAGDARGRVWEKLAAARVVYLGEAELEPDPDDRVVELEIVRGLAGRCADAGRGLALALEAFPCDLQQQLDQFMDGRIDGGILKLYTSHWSQELWQEYEPLLCYCRDTGIKLIACGTPLEVKRTVQADGIRALKKAEREAYAPPAGSGFISSFMFGSGRSLIDKISSIDDSMFGSTSYLSEQARVVDDYTISQVITRELSDGDVSRLLIVVTGASHVMYGPRGSGVPGRISKKVPKKDQVVVLLDPERQVIRREGEVPIADFLWYSAAKPCTRNCFDRAEIARVMNAAGRRPEALPQDLQKGLDLGVVSPEILQNFFDLEKYPVMTELIHRFQGFRERLLADPKFLQRLAIEEVISITTTLLAQYERRKGRFFEEIDYVLTDTIRGSVVDFFTVWLPAPTISVLQYADDGSGSSLEFVKGLLGSLPDNAFQKNILGQDWSIKQRIAAVLVGGLKLASVGFISSVGAGVSSDLIYAARGIVKPSENVETGRKRSPIWKSAAVYSCFLGTSANLRYQKLY

SEQ ID NO: 192380 - protein, 399 aa, Zea Mays
MLQKAMLIQGWYIHFLLSNKIPSHQSRAQKSQIQKEKGSLEKTRERLQFNLGKASSLEADLTKTVARLQAAKAPQPVLEPSEIWLQMKHLNADKARHKKASEDLRNEICELTAAIEHTRSKTKTLQFRILMAEKLKEASQRGESVALAEMEKLSNGRDPNGSTSDAVTLSVEEHSTLVLKAQEADGAARKKVDAAMQGLDQANRCKLELLERVEEAMAAVETSRKALEEAQRREESETKAKLVAEETLRKLRSDQIIQNWRPTNSSSVKFKNTALLAPRRAAAGAGIYDVNGLSLVAAGPNSVKTVSIGQILSMKLDRELEMTRTTTTSARKKKVSLGQILSQKYEMFSPLRIDHDCASHRQFQQPRRKRMGFVVYALLLARQRHRRRKAASCTRGGLS

SEQ ID NO: 192381 - protein, 767 aa, Zea Mays
MDVNEEAMAAHKRAFLDFLDQDVGKGVYMQAVRDMVQNKRHRLIIGMDDLRNHNLDLARRVIRSPGEYMQPASDAVSEVAKNLDPKFLKEGERVMVGFSGPFGFHRVTPRDLMSSFIGTMVCVEGIVTKCSLVRPKVVKSVHFCPVTGAFLSREYRDITSFVGLPTGSVYPTRDDNGNLLVTEYGMCEYKDHQTLSMQEVPENSAPGQLPRTVDVIVEDDLVDCCKPGDRVSIVGVYKALPGKSKGSVSGVFRTVLIANNVSLLNKEANAPVYTREDLKRMKEISRRNDTFDLLGNSLAPSIYGHLWIKKAVVLLMLGGVEKNLKNGTHLRGDINMMMVGDPSVAKSQLLRAVMNIAPLAISTTGRGSSGVGLTAAVTSDQETGERRLEAGAMVLADRGVVCIDEFDKMNDQDRVAIHEVMEQQTVTIAKAGIHASLNARCSVIAAANPIYGTYDRSLTPTKNIGLPDSLLSRFDLLFIVLDQMDPEIDRQISEHVARMHRYCTDDGGARSLDKQGYAEEDDGDANAAIFVKYDRMLHGQDRRRGKKAKQDRLTVKFLKKYIHYAKNLIQPKLTDEASDHIATSYAELRDGSANAKSGGGTLPITARTLETIIRLSTAHTKMKLRHEVLKSDVEAALQVLNFAIYHKELTEMEEREQREAEMKQQADHDADATGGTVDGHGSSGNDPMDVDVGNTSNDQNVPLARMEAFEAFLGQHVLANHIDQMSIDEIEQVVNRESTAPYTRSQVEFILEDANRVMIRDGVVRII

SEQ ID NO: 192382 - protein, 112 aa, Zea Mays
MTHSHCIIRKLIPNPLNKKSPIFYQAAKATHTFNFIRQHKPPRRRGGGRVRAKRPTTDLRAGCSPASGSARSPPAPVLSSSFDGSRTTKEEEVTRAGGWILHLLAVIVACFH

SEQ ID NO: 192383 - protein, 238 aa, Zea Mays
MPPQLSKKTVDEVWKGIQGGPETSTVVDGLQRRERHPTLGEMTLEDFLVKAGVVTEGLVKDSADFPSNMDTAGSSVVVAAASSLNPGAQWLQQYQQQVLGSQQLSLAGSYMASQLRPQPLSIATGATLDSIYSDDQITSPSFGALSDPQTPGRKRGALGEVVDKVVERRQKRMIKNRESAARSRARKQAYTNELENKVFRLEEENKRLKKQQELDEILSSAPPPEPKYQLRRTGSAAF

SEQ ID NO: 192384 - protein, 198 aa, Zea Mays
MDAFLHRLKRLDAYPKVNEDFYKRTLSGGIVTLVAAVVMLLLFISETKTKLVVDTSRGERLRVNFDITFPSIPCTLLSVDTTDISGEQHHDIRHDIEKRRLNSHGNVIEARKEGIGGAKVERPLQKHGGRLDKGEQYCGTCYGAEESDEQCCNSCEEVREAYKKKGWALTNPDLIDQMSVKLLEIFTSPQAKDFMNQT

SEQ ID NO: 192385 - protein, 226 aa, Zea Mays
MAVAASGVDVAACGPRPRSGGAGHDTLAARARGSPGGTSAQALAAPAPTRLQRGGPDPAAPAPARGRARQPGLVRLRPRRRRGCGGPAARARWPLIRLGPGAGSASGAMPQHRRVWAPRSRRGRRLGSPIGGAGSPSVGRDDQPRHRIRVWVPDPSGLPRSWPRAGQVPRTRLTSVQRHGHQRLDFQLPRCINRAQEILRSSRVSSYKHASRQQSLVRLLLRNLHF

SEQ ID NO: 192386 - protein, 100 aa, Zea Mays
MHCSTATSSGQALTVCSMWAATTITEAAADRKSMTWRLKMDHAFLDREWYRKGVNQQRAVNSSMKKIEDFAISGDGGSTSIIGLPDHRYGPHAFAPSSAQ

SEQ ID NO: 192387 - protein, 308 aa, Zea Mays
MAYASPGTDDTSTDLDTDEKNHMLELGQLVSLTASDSGNKAKDKLLGQKNREAARKSRLRKKAYVEQLENSRLKLSQLEQELQRARQQGIFIPTPGDDQQPNSTSEKAGALAFDKDYAGWEDEHRKQISELRAALSAHAGDDELRRIVDGVMAHHHEAFRLKCVAARADAFHVLSGMWKTPVERCFMWLGGFRPSEILKYSSSQAIWTPSPSGSSRAYTACSSPRSKPKRASRSGCKRCSSRSRRPSRRQGPRACLCLQVVLLRLATTPLQTARGRWRRRLRSLSLLKAWCMRLTVCGGRLLSRCSAC

SEQ ID NO: 192388 - protein, 165 aa, Zea Mays
MPAQKRPLPSSASPGSDADVEEAPGADADGCGGADQRSPKVTLNGVEERDGGPLQAKDQRHDSDADDEEEGDREGGGGGDGSGSGGDDDCDSQSSQSDGVMDEFTLVKLVDVRKEVQCPICLGELHILYKREEEKPYKRGYLAEQVPQGSLLLLDVRLLLIFATK

SEQ ID NO: 192389 - protein, 126 aa, Zea Mays
MPMDTFVRKVTELNLYLVLLPLDGQSVPKLEKPYLSCLPTLSVRHLCQFVALQLSRQPKEVEIYIRKSKDACLSANYTCKYETKPEQPNGLERLWEEKSLSDLYPSLATRQGDLELLYSLKAQGQG

SEQ ID NO: 192390 - protein, 211 aa, Zea Mays
MALMRGLQRAVASRTHPPGSRTPPLSEMLPSLVRARSAPLRRLVSTFSSTLAVLPRVPHVISSGGNLNLPFSAHPSPARDGPSGPAGGAQRGISFSTRAVDARDEAASSSAAADSDLSAPYLSVRIRCRRHDVEVLSEALLSFGASSVTVDDISDAENLDEISITSLYADGEDVDSSVRSAARKHTSRLKWLMAFGLFLNGELPLIQRPQT

SEQ ID NO: 192391 - protein, 53 aa, Zea Mays
MACVMQGRRVGVAYYDSDTRQLFVLEIWEDSVGEFPLIDLENEPLGFVENETI

SEQ ID NO: 192392 - protein, 246 aa, Zea Mays
MWRKMATCIQKIASEEFGLSQGNRRKVKDTWWWNEDVQKAIKEKIDCYKRLHHDKCADKIEKYRIAKKSAKRAVSRARGQAYDDLYQRLNTKQGEKDIYRMAKIRERKTRDVNQVKCIKDEANQLLVKNEEMKNRWKEYFNKLFNGGNESSTIELDEPFDDNNRGFVRRIQEYEVKEALKRMKVGKAMGPDGIPIEVWRCLGDIAIVWVTKLFNTIFRTNRMPDEWWWSTLVPIFKNKGDVQSCTN

SEQ ID NO: 192393 - protein, 65 aa, Zea Mays
MAVCQIRSDLIYCCCPGRPPVPNRLPMTTFSGSLVCNQQNYIHNLFPTFKDIVTLTCVSLDLWCI

SEQ ID NO: 192394 - protein, 171 aa, Zea Mays
MACVMQGRRVGVAYYDSDTRQLFVLEIWEDSVGEFPLIDLVKFQSKASTIYTSTKTEEALLSALQRNDGNGEAPVVKLTKSSTFSYEQAWHILIYLKVAAMDDGLSAKERICFLNSMMDLGSDVQVRAAGGLLAILDNERLLDTIEQMEGGASIAIDSVVQISFYPLMEIN

SEQ ID NO: 192395 - protein, 256 aa, Zea Mays
MYTKFIYAPDMFPIIIMYTYRRVRAISGGAALEPLGDAGEVLALVEGVLQLQFRRPPRPVPGERARAVRAAAVHALHVEYLGAERVPHRHEHHPVVRQLRHRRQPGRHAKGETLPTASAIRSVGAARGRKHVVKKGEETAAHGVVSWPPPWEPVLKKRPAGLPARLCSRHSPPVASKKAFICAAIMPNRVGNPKRTPSASASSCGVMTGASVLGGAPILPSTSSDRISGTCHTLTSTPSTEAAPFFISSASLATCP

SEQ ID NO: 192396 - protein, 485 aa, Zea Mays
MVLTLLLLLLLPAASRARDTITPGQPLRGNDTLVSSGAGSFVLGFFSPPGSNSTYVGIWYAKVPVRTVVWVANRAAPVRGAASESAGATLSVSSECALAVADANATVVWRSLSSSSPRPCAARIQDDGNLVVSDQRGRVVWQGFDHPTDTLLPGMRLGVDFAAGANMTLTAWASPSDPSPSPVVAAMDTSGDPEVFIWNGPAKVWRSGPWDGVQFTGVPDTVTYKGMGFSFRFVNDGREATYSFQVRDAGIVSRLVLNSTGVGGGLMQRWTWLDVAGAWALYWYAPKDQCDALSPCGPNGVCDTNKVPACSCLPGFTPRSPASWAMRDGRDGCVRATPLDCANRTDGFLVLPHAKVPDATRAVVDFNSSLEQCRQRCLRNCSCTAYASANLTAAPGRRGCVMWTGGLEDLRVYPSFGQELYFRLAAADLASKGKSKKVSIVVAIAVSITAALAVLLAITGFYIWRANKTKARKSGIIHMGSWFTQ

SEQ ID NO: 192397 - protein, 192 aa, Zea Mays
MELAQTNTGNTPKSYSLNMFKDFVPMCVFSESNQGKLSCEGKVEHKFDMEPHSDNLANYGKLCRERTQKYMVKSRQVQVLDNDHGMSMRPMPGIVGLISSSSKEKKKQAPVKPSDAKRTRRDRTEMENVIFKLFERQPNWALKALVQETDQPEQFLKEILNDLCVYNKRGPNQGTHELKPEYKKSTGDTDTA

SEQ ID NO: 192398 - protein, 97 aa, Zea Mays
MAREGHVPNTEDVFQDIEEDHKSYVLCGHSEKLAIVFGIISTPAGKNIRVMKNLRVCIDWHTVTKFISKLADREIVLCDANRFHHFKDGNCSRGDFW

SEQ ID NO: 192399 - protein, 249 aa, Zea Mays
MVCSSSTGTCHQSLLHDKEIMYHFLNFICVHNYKGMVPLFRFLTSLTGDTSEGYNKWVHKNTMLAEEVAKKTMELEPRSIGSHVVLSNMYSASGRWNEAAHLRESMRKKGMKKDPACSWIEVKSKLHVFVAHDWSHPWYDRIIDALNAFSEQMAREGHVPNTEDVFQDIEEDHKSYVLCGHSEKLAIVFGIISTPAGKNIRVMKNLRVCIDWHTVTKFISKLADREIVLCDANRFHHFKDGNCSRGDFW

SEQ ID NO: 192400 - protein, 252 aa, Zea Mays
MVCSSSTGTCHQSLLHDKEIMYHFLNFICVHNYKGMVPLFRFLTSLTGDTSEGYNKWACRVHKNTMLAEEVAKKTMELEPRSIGSHVVLSNMYSASGRWNEAAHLRESMRKKGMKKDPACSWIEVKSKLHVFVAHDWSHPWYDRIIDALNAFSEQMAREGHVPNTEDVFQDIEEDHKSYVLCGHSEKLAIVFGIISTPAGKNIRVMKNLRVCIDWHTVTKFISKLADREIVLCDANRFHHFKDGNCSRGDFW

SEQ ID NO: 192401 - protein, 144 aa, Zea Mays
MRKKGMKKDPACSWIEVKSKLHVFVAHDWSHPWYDRIIDALNAFSEQMAREGHVPNTEDVFQDIEEDHKSYVLCGHSEKLAIVFGIISTPAGKNIRVMKNLRVCIDWHTVTKFISKLADREIVLCDANRFHHFKDGNCSRGDFW

SEQ ID NO: 192402 - protein, 56 aa, Zea Mays
MAAIPRASEGMERSEFVRVGSEPPSNLQMHQSKMNPGILRKDHRRPEQEGVAGFTS

SEQ ID NO: 192403 - protein, 78 aa, Zea Mays
MLKPKERCAPYSSVNIKHEKRRSISSPEITKKCSQKARDPIREHSEHCFCISLLSGRYSPALVILCFARMEWNVHSLV

SEQ ID NO: 192404 - protein, 721 aa, Zea Mays
MFADVVYEHYQDGDVIWCHDYHLMFLPKCLKDHDINMKVGWFLHTPFPSSEIYRTLPSRLELLRSVLCADLVGFHTYDYARHFVSACTRILGLEGTPEGVEDQGRLTRVAAFPIGIDSDRFKRALELPAVKRHVSELTERFAGRKVMLGVDRLDMIKGIPQKILAFEKFLEENPDWNNKVVLLQIAVPTRTDVPEYQKLTSQVHEIVGRINGRFGTLTAVPIHHLDRSLDFHALCALYAVTDVALVTSLRDGMNLVSYEYVACQGSKKGVLILSEFAGAAQSLGAGAILVNPWNITEVADSIRHALTMPSDEREKRHRHNYAHVTTHTAQDWAETFVFELNDTVAEALLRTRQVPPGLPSQMAIQQYLRSKNRLLILGFNSTLTEPVESSGRRGGDQIKEMELKLHPDLKGPLRALCEDERTTVIVLSGSDRSVLDENFGEFKMWLAAEHGMFLRPTYGEWMTTMPEHLNMDWVDSVKHVFEYFTERTPRSHFEHRETSFVWNYKYADVEFGRLQARDMLQHLWTGPISNAAVDVVQGSRSVEVRSVGVTKGAAIDRILGEIVHSENMITPIDYVLCIGHFLGKDEDIYVFFDPEYPSESKVKPEGGSASLDRRPNGRPPSNGRSNSRNPQSRTQKAQQAASERSSSSSHSSTSSNHDWREGSSVLDLKGENYFSCAVGRKRSNARYLLSSSEEVVSFLKELATATAGFQATCADYMHVLG

SEQ ID NO: 192405 - protein, 575 aa, Zea Mays
MLGVDRLDMIKGIPQKILAFEKFLEENPDWNNKVVLLQIAVPTRTDVPEYQKLTSQVHEIVGRINGRFGTLTAVPIHHLDRSLDFHALCALYAVTDVALVTSLRDGMNLVSYEYVACQGSKKGVLILSEFAGAAQSLGAGAILVNPWNITEVADSIRHALTMPSDEREKRHRHNYAHVTTHTAQDWAETFVFELNDTVAEALLRTRQVPPGLPSQMAIQQYLRSKNRLLILGFNSTLTEPVESSGRRGGDQIKEMELKLHPDLKGPLRALCEDERTTVIVLSGSDRSVLDENFGEFKMWLAAEHGMFLRPTYGEWMTTMPEHLNMDWVDSVKHVFEYFTERTPRSHFEHRETSFVWNYKYADVEFGRLQARDMLQHLWTGPISNAAVDVVQGSRSVEVRSVGVTKGAAIDRILGEIVHSENMITPIDYVLCIGHFLGKDEDIYVFFDPEYPSESKVKPEGGSASLDRRPNGRPPSNGRSNSRNPQSRTQKAQQAASERSSSSSHSSTSSNHDWREGSSVLDLKGENYFSCAVGRKRSNARYLLSSSEEVVSFLKELATATAGFQATCADYMHVLG

SEQ ID NO: 192406 - protein, 498 aa, Zea Mays
MNLVSYEYVACQGSKKGVLILSEVADRLCMTYNQGVEDVLFIYLFLLSLQFQFAGAAQSLGAGAILVNPWNITEVADSIRHALTMPSDEREKRHRHNYAHVTTHTAQDWAETFVFELNDTVAEALLRTRQVPPGLPSQMAIQQYLRSKNRLLILGFNSTLTEPVESSGRRGGDQIKEMELKLHPDLKGPLRALCEDERTTVIVLSGSDRSVLDENFGEFKMWLAAEHGMFLRPTYGEWMTTMPEHLNMDWVDSVKHVFEYFTERTPRSHFEHRETSFVWNYKYADVEFGRLQARDMLQHLWTGPISNAAVDVVQGSRSVEVRSVGVTKGAAIDRILGEIVHSENMITPIDYVLCIGHFLGKDEDIYVFFDPEYPSESKVKPEGGSASLDRRPNGRPPSNGRSNSRNPQSRTQKAQQAASERSSSSSHSSTSSNHDWREGSSVLDLKGENYFSCAVGRKRSNARYLLSSSEEVVSFLKELATATAGFQATCADYMHVLG

SEQ ID NO: 192407 - protein, 686 aa, Zea Mays
MDTLVTLYHGGSVEQDVYGNVSFYAMKNVTVMFDERPSFGQIFARACEEISCNLNDPSISIEGLLSHVTSGTVVRRLISIASEDDWVKYVKIVKTIVPPYLDVVVRKLSFSHCDAPVGLSPQMPNACRIEAPLPELPEEVVVVPDAQSASNEFKISRPVRGVCGSSNPVVPPQEIPLIQDPIQDHPRSPQLDNGAYLHVPLSFNMEHICSASNSVDVQIEDEEEPYEAARALDSDDDRPVQEMTEQEIELIRRLCPERDPAVHESSSLSHCNGAYAEGRDDELLEASDNADNIDIKVGLLFKDLSTLRQWLLEYSVNRKRPFKVRHSYAQRRYTVVCEVSECNWRVCARRQKETGKFKITKIVGPHTCAQTELSSKHRHLTSTLIAKRLLGTLKGQPNLKVKSIMTMTWELFGYKIKYGKAWRAKQRAWKMIYGDWEEGYEKLPALFNAMKAKNPGMHYEYIPKPNEWRNGREIFFRAFWCFSQCVEAFRHCRPVLSIDGTFLLGKYKGTLLVAISCDADNTLVPLAFALVERENRESWAWFLRLVRIHVVGPGREVGVISDRHQGILNAVQEQIPGYAPMHHRWCTRHLAENLLRKDRSKANFPLFEEICQQLEVSFFEDKLKKLKDATNAEGKNWIAGLLREPQKWTSAYDEGGWRFEFQTSNMAELFNSVLKGIRGMPVNAIV

SEQ ID NO: 192408 - protein, 365 aa, Zea Mays
MDDEDYSWVRRTRFSQSIVRSSSGREQYGAFIEQFSRGAELRQNGLGTGYRNPRQSVQPLAKGSGVSNSARLPIPKAKSAVAQSERKLKHASSEGQLNRDGDRPLQESSAKQSRKGAVGLSLDIPQLHVVRPSKESPDALDFSFHSDEHSQRLQRVCSSPAPFSTKDGTAPAGDSRASSASMKIIGQVSKPAPKRRAKSPIPKRVISDVFKEAKAATKRFSSPQRQRKPTSPRSLDDSPPFGFASLRTPSKLKINSRTSSWPRRNLDSGLAKVAALEILERWTVDRSELLIGHRFASGAYSRLFHGIYKEQPVAVKFIRQPDDGEDDELSAKLEKQFTSEVTILARLQHRNVIKTNEKLKYCRYY

SEQ ID NO: 192409 - protein, 297 aa, Zea Mays
MLVFSDHVRSFVNPVWTSSGRPVAQRGSLTVNGLNTPSQMEKQSDSKQVQELMQSFPPAIVVDHHPCENFSLSPPPVDRKRTGPRPCPVCYLPVEQALALRPAKPSLSPVLQSLNYVLEEILIPKESKSGSLFGGFPSLEERDKSYDIKDSMTVHCGFVRGKVPGLNTGFDIDEADHSEMQLCQSTVVASAIFGNYDVMQQPENISKFSKDTVCFFMFLDEETEAAIKNTTIGHTKKIGLWRVVVVRNLPFTDARRNGKVPKLLLHRLFPNARYSIWIDGKLKLVRDPYQVLVEEEC

SEQ ID NO: 192410 - protein, 157 aa, Zea Mays
MLVFSDHVRSFVNPVWTSSGRPVAQRGSLTVNGLNTPSQMEKQSDSKQVQELMQSFPPAIVVDHHPCENFSLSPPPVDRKRTGPRPCPVCYLPVEQALALRPAKPSLSPVLQSLNYVLEEILIPKESKSGSLFGGFPSLEERDKSYDIKDSMTVHYL

SEQ ID NO: 192411 - protein, 255 aa, Zea Mays
MQIRTNKLIGSGFTIYGPCDLFLLQVPKLLLHRLFPNARYSIWIDGKLKLVRDPYQVLERFLWRKNVSFAISRHYRRFDVFEEAEANKAGGKYDNTSIDYQIEFYKREGLTHYSSAKLPITSDVPEGCVIIREHIPITNLFTCLWFNEVDRFTSRDQLSFSTVRDKIRWRVNWTADMFLDCERRDFVVQSYHRELLEQRQSALRRWPPQRSPVARFQPRKMLPDNAAREPWKASATKKLSRKRARDKKSSSRRTH

SEQ ID NO: 192412 - protein, 689 aa, Zea Mays
MAPPRNEDPMAQIMAKIEEGNKETHRRMETVQASLATVEATMKGMIKEQGEFRKWRPEVEMKVTEVAEALKTIQAKVDQFGPSSSTEPLPDGKQTKKGVPISVQLEIPPVDATNGQFRHRFAENHRRPGVEENLRTPAPVGGMPIPPETFTPFFDWGSLGRNSVANWSQMSGPTMPNMVFPVFYGSNPKLWKHRCETYFDFYAVPFEKWVRIATMHFEGPAMYWVQSMEHRIRELSWEALCATLNTRFGRDQHNLLIRHFYHIHQTNSVAEYVEQFDQLMHQLLAHENHLTSTMITGRFVDGLKDEIKSAVIIQRPSDWDTACSLALLQEDVLLHSGRRDGRRTEFGAYSSRPSVKPTPMPLPLPPLGGNRAVSNTEERRGHGPQQGRRDEGKLSALKAYRKAKGLCFKCGNKWGYEHRCSTNVPLYLVEEMWELVVNEEEKLEDCIGDSKETNEDSVLALSAAAAEGGEGSRTIRLWASVYCQQLLVLVDSGSSASFLGSHLMNVLPGIQLLTKPMQVKVADGGILWSQHWLPNCKWLCGGTTFTTDFKFIPLGGYDMILGMDWLERHCPMSVHWAAKWMEFDYDKKRVHVQGVLPKVQTCYSLNGEQLGFMIKQEAVQHWLELQTVTELIVKNTPEAVQKLLEQYQHLFLRPDSLPPKRQVDHAIELLPGAQPFRLRPYRYTCNTQK

SEQ ID NO: 192413 - protein, 382 aa, Zea Mays
MAVPSRLLLCSAVVAVALLVAPGEVAGAAGHGHTHTRRLRPKKSAAAAAAKLYPANATRAEAIERQFTRWVRFVGGRLGHGTYNYNRPALTLLPARTLVVDRRPGAGDFTSIQAAVDSLPLINLARVVIRVNAGTYTEKVNISPMRAFVTVEGAGADKTVVQWGDTADTAGSWGRPMGTFGSATFAVNSMFFVAKNITFKGVALRISADNAAFVGCNFLGAQDTLYDHLGRHYYRDCYIEGSVDFIFGNALSLYEGCHVHAIARNYGALTAQNRQSLLEDTGFSFVKCRVTGSGALYLGRAWGTFSRVVFAYTYMDNIIIPRGWYNWGDPTREMTVFYGQYKCTGPGANYAGRVQWSRELTDEEAKPFISLDFIDGFQWLRL

SEQ ID NO: 192414 - protein, 299 aa, Zea Mays
MVGEDVVSELSRAMERQGLDMKATALVNDTVGTLAGGRYMDTDVVAAVILGTGTNAAYVEHANAIPKWTGLLPKSGKMVINTEWGSFKSNKLPLSEYDKAMDFESLNPGEQIYEKMISGMYLGEIVRRILLKLAHEASLFGDVVPPKLELPFILRTPDMSAMHHDSSHDLKTLGAKLKDIVGVADTSLEVRYITRHICDLVAERAARLAAAGVYSILKKIGRDKVPSGGGKMPRTVVALDGGLYEHYKKFSSCVEATLTDLLGEEASSSVVAKLANDGSGIGAALLAASHSQYQYGASD

SEQ ID NO: 192415 - protein, 129 aa, Zea Mays
MFWHSTQKDYEELAENVMNIVDRLVHKTNQKIEQSTDVLKAIISPAMHEGDVKWPPRDPDTLKLMEKEITRREQEGQLDEGFLSEVSAQLRLNKTEISQGFRLCCKRCCSYMLLNLSKNVVMHTKGGKL

SEQ ID NO: 192416 - protein, 187 aa, Zea Mays
MLNGGGAPEESLKKTIEVDRLIDMLRDANPRELDQIVVENVLAFDAGFWVRLAARIDLCKSDDDKKDYEELAENVMNIVDRLVHKTNQKIEQSTDVLKAIISPAMHEGDVKWPPRDPDTLKLMEKEITRREQEGQLDEGFLSEVSAQLRLNKTEISQGFRLCCKRCCSYMLLNLSKNVVMHTKGGKL

SEQ ID NO: 192417 - protein, 123 aa, Zea Mays
MNIVDRLVHKTNQKIEQSTDVLKAIISPAMHEGDVKWPPRDPDTLKLMEKEITRREQEGQLDEGFLSEVSAQLRQLSLYVFRLNKTEISQGFRLCCKRCCSYMLLNLSKNVVMHTKFMSTFLF

SEQ ID NO: 192418 - protein, 227 aa, Zea Mays
MATTAAASTSLRPLSPSPPRIASLPRRWCWGIPVQSSGRSAFHAERRRRSTLLCAADKAPEESLKKTIEVDRLIDMLRDANPREVNVNLDQIVVENVLAFDAGFWKDYEELAENVMNIVDRLVHKTNQKIEQSTDVLKAIISPAMHEGDVKWPPRDPDTLKLMEKEITRREQEGQLDEGFLSEVSAQLRLNKTEISQGFRLCCKRCCSYMLLNLSKNVVMHTKGGKL

SEQ ID NO: 192419 - protein, 185 aa, Zea Mays
MDNRTELDQIVVENVLAFDAGFWVRLAARIDLCKSDDDKKDYEELAENVMNIVDRLVHKTNQKIEQSTDVLKAIISPAMHEGDVKWPPRDPDTLKLMEKEITRREQEGQLDEGFLSEVSAQLRQAKQDGDKPGLQAMLQKVLQLYASKSLQKRSYAYKGGQVVVPEKFLECVIQGLYFHVEIFFV

SEQ ID NO: 192420 - protein, 153 aa, Zea Mays
MFWHSTQVSGFDWQLELISANQMMIKHDFTYKDYEELAENVMNIVDRLVHKTNQKIEQSTDVLKAIISPAMHEGDVKWPPRDPDTLKLMEKEITRREQEGQLDEGFLSEVSAQLRLNKTEISQGFRLCCKRCCSYMLLNLSKNVVMHTKGGKL

SEQ ID NO: 192421 - protein, 177 aa, Zea Mays
MFWHSTQVSGFDWQLELISANQMMIKHDFTYKDYEELAENVMNIVDRLVHKTNQKIEQSTDVLKAIISPAMHEGDVKWPPRDPDTLKLMEKEITRREQEGQLDEGFLSEVSAQLRQAKQDGDKPGLQAMLQKVLQLYASKSLQKRSYAYKGGQVVVPEKFLECVIQGLYFHVEIFFV

SEQ ID NO: 192422 - protein, 161 aa, Zea Mays
MFWHSTQVSGFDWQLELISANQMMIKHDFTYKDYEELAENVMNIVDRLVHKTNQKIEQSTDVLKAIISPAMHEGDVKWPPRDPDTLKLMEKEITRREQEGQLDEGFLSEVSAQLRQLSLYVFRLNKTEISQGFRLCCKRCCSYMLLNLSKNVVMHTKGGKL

SEQ ID NO: 192423 - protein, 162 aa, Zea Mays
MYRKFRRLQAPIGARALSTHPTKLDQIVVENVLAFDAGFWKDYEELAENVMNIVDRLVHKTNQKIEQSTDVLKAIISPAMHEGDVKWPPRDPDTLKLMEKEITRREQEGQLDEGFLSEVSAQLRLNKTEISQGFRLCCKRCCSYMLLNLSKNVVMHTKGGKL

SEQ ID NO: 192424 - protein, 186 aa, Zea Mays
MDNRTEVLDQIVVENVLAFDAGFWVRLAARIDLCKSDDDKKDYEELAENVMNIVDRLVHKTNQKIEQSTDVLKAIISPAMHEGDVKWPPRDPDTLKLMEKEITRREQEGQLDEGFLSEVSAQLRQAKQDGDKPGLQAMLQKVLQLYASKSLQKRSYAYKGGQVVVPEKFLECVIQGLYFHVEIFFV

SEQ ID NO: 192425 - protein, 449 aa, Zea Mays
MAGMEGSNSSSQPPPFLIKTYEMVEDPATNHVVSWGPGGASFVVWNPPDFSRDLLPKYFKHNNFSSFIRQLNTYGFRKIDPERWEFANDDFVRGHTHLLKNIHRRKPVHSHSPQTQVNGPLAESERRELEDEISRLKYEKSLLLTDLQRQSQQRCGISWQMQSLERRLAQMEERQRNIVASLRDILLPVGHGVVSWGSATGADHFSKKRRVPKMDFFVDEPKVEEQQVPFLQTVGAETPGMSPIRLLSAEPFEKMELALVSLESFLQRATAHTSAAQGMLYAAGVAEPSPALALGEMLSAPMDTEIDLQPSACQNPFASTSGQDQSSSPLAEPPSYYAQSPMLPMAQLHEHAHRTAAGVDMNSDTTTGDTSQDDTTSETGGSHVPAKVNDVFWERFLTDAAEGKSEAIEAKEDVKTAVDRCCPRLQDNVDQITEQMGQLDSASYAPENY

SEQ ID NO: 192426 - protein, 499 aa, Zea Mays
MTGSAASLGLRSGSYGSLAAAAVVGSGGRKAGATACRTLRVEKERLHRALRLVGRRRTGVLLLLAVASAALFCSLFAVVKDDANSTSIVNNYEVPNAIQKSVYPSRTRPLMMSGNQESTSVVNKIDFPNRLHLSFANFTHPCEGFSVPPPLVDKKRTGPRPCPVCYVSVDQAFALMPLQASPSPVLKDLNYVSEDGVTANLSNQGSGFGGHPSLDQRNDSFNINESMTVHCGFVRGKKPGQGTGFDIKDDDLLEMEQCHDLVVASAIFGNYDMIQHPRNISDFSKANACFYMFVDEETEAYVKNSSSLYNNNKVGLWRLVVVRNLPYEDPRRTGKIPKLLLHRLFPNVRFSVWIDAKLELVVDPYLLLERFLWRKNTTFAISRHYKRFDVFEEAEANKAAGKYDNASIDYQIEFYRNEGLTHYSSAKLPITSDVPEGCVIIREHIPITNLFTCVWFNEVDRFTSRDQISFSTVRDKIRARVGWMPEMFMDCERRNFVVQ

SEQ ID NO: 192427 - protein, 553 aa, Zea Mays
MTGSAASLGLRSGSYGSLAAAAVVGSGGRKAGATACRTLRVEKERLHRALRLVGRRRTGVLLLLAVASAALFCSLFAVVKDDANSTSIVNNYEVPNAIQKSVYPSRTRPLMMSGNQESTSVVNKIDFPNRLHLSFANFTHPCEGFSVPPPLVDKKRTGPRPCPVCYVSVDQAFALMPLQASPSPVLKDLNYVSEDGVTANLSNQGSGFGGHPSLDQRNDSFNINESMTVHCGFVRGKKPGQGTGFDIKDDDLLEMEQCHDLVVASAIFDEETEAYVKNSSSLYNNNKVGLWRLVVVRNLPYEDPRRTGKIPKLLLHRLFPNVRFSVWIDAKLELVVDPYLLLERFLWRKNTTFAISRHYKRFDVFEEAEANKAAGKYDNASIDYQIEFYRNEGLTHYSSAKLPITSDVPEGCVIIREHIPITNLFTCVWFNEVDRFTSRDQISFSTVRDKIRARVGWMPEMFMDCERRNFVVQVYHRELLEQMIASGRMPPLAAAVTHANVRVGSRKAPPTKKPSVKRKREKKSSSRRRLPKPIAQGLDANVTQVFFSVAESG

SEQ ID NO: 192428 - protein, 524 aa, Zea Mays
MSCSAAAGAEATALLFRSAAPSTIVGRHRLAMSRRTSRRNLRTGVHPHQKSAPSANHRNRASIQRDRASASIDEEQKQMSEDENGLLDIQLEDLVGMIQNTQKNILLLNQARLQALERADKILKEKETLQQKINILEMKLSETGKQSVLSSEVKSDEESLEFDVVKEENMLLKDEMNFLKGKLIEITETEESLFKLEKECALLNASLRELECTSTSAQSDVLKLGPLQQDAWWEKVENLEDLLDSTANQVEHASLTLDGYRDFQDKVDKLKASLGTTNVSEFCLYLVDILQQRVKSVEERFQACNHEMHSQIELYEHSIVEFHGTLSKLINESEKKSMEHYAEGMPSEFWSRISLLIDGWSLEKKISINDASMLREMAWKRDNRLREAYLSSRGMEERELIDSFLKMALPGTSSGLHIVHIAAEMAPVAKVGGLADVISGLGKALQKKGHLVEIILPKYDCMQHNQINNLKVLDVVVKSYFEGNMFANKIWTGTVEGLPVYFIEPQHPGTSLLGCICKPGLQLS

SEQ ID NO: 192429 - protein, 740 aa, Zea Mays
MSCSAAAGAEATALLFRSAAPSTIVGRHRLAMSRRTSRRNLRTGVHPHQKSAPSANHRNRASIQRDRASASIDEEQKQMSEDENGLLDIQLEDLVGMIQNTQKNILLLNQARLQALERADKILKEKETLQQKINILEMKLSETGKQSVLSSEVKSDEESLEFDVVKEENMLLKDEMNFLKGKLIEITETEESLFKLEKECALLNASLRELECTSTSAQSDVLKLGPLQQDAWWEKVENLEDLLDSTANQVEHASLTLDGYRDFQDKVDKLKASLGTTNVSEFCLYLVDILQQRVKSVEERFQACNHEMHSQIELYEHSIVEFHGTLSKLINESEKKSMEHYAEGMPSEFWSRISLLIDGWSLEKKISINDASMLREMAWKRDNRLREAYLSSRGMEERELIDSFLKMALPGTSSGLHIVHIAAEMAPVAKVGGLADVISGLGKALQKKGHLVEIILPKYDCMQHNQINNLKVLDVVVKSYFEGNMFANKIWTGTVEGLPVYFIEPQHPGKFFWRAQYYGEHDDFKRFSYFSRVALELLYQSGKKVDIIHCHDWQTAFVAPLYWDVYANLGFNSARICFTCHNFEYQGIAPAQDLAYCGLDVDHLDRPDRMRDNSHGRINVVKGAVVYSNIVTTVSPTYAQEVRSEGGRGLQDTLKVHSKKFVGILNGIDTDTWNPSTDRFLKVQYSANDLYGKSANKAALRKQLKLASTQASQPLFPQAGWLHYEASSSKGCTSHQACNI

SEQ ID NO: 192430 - protein, 474 aa, Zea Mays
MSCSAAAGAEATALLFRSAAPSTIVGRHRLAMSRRTSRRNLRTGVHPHQKSAPSANHRNRASIQRDRASASIDEEQKQMSEDENGLLDIQLEDLVGMIQNTQKNILLLNQARLQALERADKILKEKETLQQKINILEMKLSETGKQSVLSSEVKSDEESLEFDVVKEENMLLKDEMNFLKGKLIEITETEESLFKLEKECALLNASLRELECTSTSAQSDVLKLGPLQQDAWWEKVENLEDLLDSTANQVEHASLTLDGYRDFQDKVDKLKASLGTTNVSEFCLYLVDILQQRVKSVEERFQACNHEMHSQIELYEHSIVEFHGTLSKLINESEKKSMEHYAEGMPSEFWSRISLLIDGWSLEKKISINDASMLREMAWKRDNRLREAYLSSRGMEERELIDSFLKMALPGTSSGLHIVHIAAEMAPVAKVGGLADVISGLGKALQKKGHLVEIILPKYDCMQHNQINNLKMLW

SEQ ID NO: 192431 - protein, 139 aa, Zea Mays
MLLPCAIQALDFWVVKNVSGRILVGLRWWNEIDDDGNSVWKFECLDGESLARMNKKDSWLFWWTLYLTAAAWIVLGIFSLIRLEADYLLVVGVCLSLSIANIVGFTKCNKDAKKNIQTFAQNALASRVTSSLQSAFGVI

SEQ ID NO: 192432 - protein, 84 aa, Zea Mays
MVPRSPSPCPCSLFSSSQPWRNFPVLEGEELEVLKVTPAGCLVERLNPEVVVDLSGSRRFSCGTLINHVMWRARVGLISSEDDE

SEQ ID NO: 192433 - protein, 54 aa, Zea Mays
MLPKRTSSNNTDLVLSQDIPTTTPRKTRTTRVTESEDDCKASQRAARSSGVQGV

SEQ ID NO: 192434 - protein, 92 aa, Zea Mays
MSISDGSIIDCTIPCDTTPGGCDDARQRKRERERVRYATMSAEKKNELKKRCESRKKGNVMHHEYSEDECPQVFVSDRSIKNPTIHCDNTLG

SEQ ID NO: 192435 - protein, 138 aa, Zea Mays
MDALLLLLFRAQKKIQSWLPEKVMYRPAFQQFMNYSSPHGGDPNANMNSTATRIAADLDTHQDFEPKSRSSDMPLHAAITQDIKENPVLIYMKGFPESPMCGFSALAVKVFQQYGVPTCGRDILGDLKLKESVKAHTQ

SEQ ID NO: 192436 - protein, 52 aa, Zea Mays
MRMMMKLYFLKMTKTKDTYSLGKKQGLDETPGSTGDRDTGDRETRPPPSTCH

SEQ ID NO: 192437 - protein, 56 aa, Zea Mays
MEGHHDSSSRRAPTTTKCIWWARNKALTKLLAALETETLETEKQGLHHQHVISNSL

SEQ ID NO: 192438 - protein, 184 aa, Zea Mays
MFSMQISFIRRSLPPHVLKIWRDITTPVQGELPQPPNAFGGQGMVPSLFTLHCLKLEKKIQSWLPEKQVMYRPAFQQFMNYSSPHGGDPNANMNSTATRIAADLDTHQDFEPKSRSSDMPLHAAITQDIKENPVLIYMKGFPESPMCGFSALAVKVFQQYGVPTCGRDILGDLKLKESVKAHTQ

SEQ ID NO: 192439 - protein, 310 aa, Zea Mays
MTQKPHISATWGDTGHVQVWDLSSFLNSLAESGTAAPKEDDIIHKHLPLKVFSGHKDEGYAIDWSPLVTGRLVSGDCNKCIHLWEPTSNNWNVDANPFVGHSASVEDLQWSPTEADIFASCSVDGTISIWDIRTGKKPCISVKAHEADVNVISWNKLASCMIASGCDDGSFSVRDLRSIEEDSLVAHFEYHKKAITSIEWSPHEASSLAVTSEDHQLTIWDLSLERDAEEEAEFRAKMKEQANAPEDLPPQLLFAHQGQRDLKELHWHPQIPSMIISTAIDGFNVLMPSNIDTTIPGSTDAAMPSAEPQH

SEQ ID NO: 192440 - protein, 314 aa, Zea Mays
MGRTIKKAKKAQSKKSKKKTESSSSSNPAIASGPAKVWQPGVDTLEDGEELQFDPQAYNYLRGFGIGWSCLSFDVVRDQLGLVRSEFPHTFYGVAGTQAEKASWNYIGVFKLSNISGKKREPIPASAVEADTDVDSDSSSDEEDEEINEDTKPILHLKKVAHAGCVNRIRSMTQKPHISATWGDTGHVQVWDLSSFLNSLAESGTAAPKEDDIIHKHLPLKVFSGHKDEGYAIDWSPLVTGRLVSGDCNKCIHLWEPTSNNWNVDANPFVGHSASVEDLQSHGSRHICLMFCGWYDINMGYTYREETLYFCQSS

SEQ ID NO: 192441 - protein, 354 aa, Zea Mays
MGRTIKKAKKAQSKKSKKKTESSSSSNPAIASGPAKVWQPGVDTLEDGEELQFDPQAYNYLRGFGIGWSCLSFDVVRDQLGLVRSEFPHTFYGVAGTQAEKASWNYIGVFKLSNISGKKREPIPASAVEADTDVDSDSSSDEEDEEINEDTKPILHLKKVAHAGCVNRIRSMTQKPHISATWGDTGHVQVWDLSSFLNSLAESGTAAPKEDDIIHKHLPLKVFSGHKDEGYAIDWSPLVTGRLVSGDCNKCIHLWEPTSNNWNVDANPFVGHSASVEDLQWSPTEADIFASCSVDGTISIWDIRTGKKPCISVKAHEADVNVISWNKRTRWWHILSTTRKQLHLSSGVHMKHHH

SEQ ID NO: 192442 - protein, 1254 aa, Zea Mays
MATTTDAAPVAPVEEGNAAPAAAEEEPPKKVEAAVATTDAAPVAPASVEDENPALAAAAEEELTEKFESAAAAAAEEEVDDREAPKQVVADVGEREEEEEEVRLEAKSEGVAGPEAENGKAEGVVVGGHDGRDVNEAEEDRRVGKLGAATAVKDGGGEEPASEDGEAAASVSAPVSEVESKSENGESGEGDPSLASPDAPESDEKGELQEEEQHDEERGAAVEVNVVDKIAEDVESPVAEEEKLVPEVEKGEEVGSGSAVGGELSDEEEVEVSPSPLGEEVAEVAEPQDKVAHVSEANGELGDGKEASDDVVALGGGEASEESANKDADGDDVVAQGGEEALEESTKKDADVEDEAIRPEPPSEATAVVMNDGSIEELAPASAEEIIDSVREDSPQKEQSAEDQAVAGEVVEDVGVDKPTEVENVDATSADGILSRELAPESIKETNGTGEIEGATEVVDHEEEAADNDIIEAVPDDADGDGNEAEDDDDGTNSDTSPARVAILESSEAAKQIMKELAEGSSSGGDITVTSQDGSRIFTMDRPAGLGSSAPSLRPTAPRQSARSNLFSPSELAVTADPTEEMTEEEKKLHDKVELIRVKFLRLVYRLGATPEETVAAQVLYRLSLAEGIRHGRQTNRAFSLDNARRKALLLEAEGKEDLNFSCNILVLGKTGVGKSATINSIFGEEKSRTDAFSSATTNVREIVGDVDGVKIRIIDTPGLRPNVMDQGSNRKILAAVKNYTKKCPPDIVLYVDRLDSLSRDLNDLPLLKTITAVLGSSIWFNAIVALTHAASAPPEGLNGAPMTYEVLMAQRSHIIQQSIRQAAGDMRLMNPVALVENHPSCRKNREGQKVLPNGQSWRHQMLLLCYSSKILSEANSLLKLQDPNPGKLFEQDDDEEEYDQLPPFKPLTKAQLARLTKEQKNAYFDEYDYRVKLLQKKQWKDEIRRLKEMKKRGKTDLDDYGYANIAGENDQDPPPENVSVPLPDMVLPPSFDCDNPTYRYRFLESTSTVLARPVLDAHGWDHDCGYDGVSVEETLAILSRFPANVAVQVTKDKKEFSIHLDSSIAAKHGENASSLAGFDIQTVGRQLAYILRGEAKIKNIKKNKTTGGFSVTFLGDIVATGLKVEDQLSLGKRLSLVASTGAMRAQGETAYGANLEARLKDKDYPIGQSLSTLGLSLMKWRRDLALGANLQSQFSIGRGSKMAVRLGLNNKLSGQITVRTSTSEQVQIALLGLVPVAASIYRSFRPSEPSFAY

SEQ ID NO: 192443 - protein, 1007 aa, Zea Mays
MATTTDAAPVAPVEEGNAAPAAAEEEPPKKVEAAVATTDAAPVAPASVEDENPALAAAAEEELTEKFESAAAAAAEEEVDDREAPKQVVADVGEREEEEEEVRLEAKSEGVAGPEAENGKAEGVVVGGHDGRDVNEAEEDRRVGKLGAATAVKDGGGEEPASEDGEAAASVSAPVSEVESKSENGESGEGDPSLASPDAPESDEKGELQEEEQHDEERGAAVEVNVVDKIAEDVESPVAEEEKLVPEVEKGEEVGSGSAVGGELSDEEEVEVSPSPLGEEVAEVAEPQDKVAHVSEANGELGDGKEASDDVVALGATPEETVAAQVLYRLSLAEGIRHGRQTNRAFSLDNARRKALLLEAEGKEDLNFSCNILVLGKTGVGKSATINSIFGEEKSRTDAFSSATTNVREIVGDVDGVKIRIIDTPGLRPNVMDQGSNRKILAAVKNYTKKCPPDIVLYVDRLDSLSRDLNDLPLLKTITAVLGSSIWFNAIVALTHAASAPPEGLNGAPMTYEVLMAQRSHIIQQSIRQAAGDMRLMNPVALVENHPSCRKNREGQKVLPNGQSWRHQMLLLCYSSKILSEANSLLKLQDPNPGKLFGFRFRSPSLPFLLSSLLQSRAHPKLSAEQGGNEGDSDVELDDYSDVEQDDDEEEYDQLPPFKPLTKAQLARLTKEQKNAYFDEYDYRVKLLQKKQWKDEIRRLKEMKKRGKTDLDDYGYANIAGENDQDPPPENVSVPLPDMVLPPSFDCDNPTYRYRFLESTSTVLARPVLDAHGWDHDCGYDGVSVEETLAILSRFPANVAVQVTKDKKEFSIHLDSSIAAKHGENASSLAGFDIQTVGRQLAYILRGEAKIKNIKKNKTTGGFSVTFLGDIVATGLKVEDQLSLGKRLSLVASTGAMRAQGETAYGANLEARLKDKDYPIGQSLSTLGLSLMKWRRDLALGANLQSQFSIGRGSKMAVRLGLNNKLSGQITVRTSTSEQVQIALLGLVPVAASIYRSFRPSEPSFAY

SEQ ID NO: 192444 - protein, 596 aa, Zea Mays
MVPGTRPHQKKQKAGTMPAANHQPPCTPVRLTRQSAAMPLPGGRPPPKPRHPLPPKTTSKATPKRNAISSSTQQQVRASTTTTETTETTNPVSFPPKMTRSTQAMSSPVPNTMPRPTRYTRTSGTMSTPGGHTMHSPPRFTRASAAMSSPGANPHHSPPRFTRASAAMSSPSANPHHSTPAATAIVSQQPTPTTSVNKTVPTDNSPGGHSSRQSNAINESAEQFDAATSEGNPNEGEPVGDLVPGPKKNVRKKTMGYGLEKMLNRGNRLAIHVAEGKKRPEVPLQVAKLASETGVALRDNLPIYKSWKLYDNSVGQAEVGKVLDKVTSRLDVDVKNEGPSKDACIYIIKRGVRQTRYNLKRKYFDESLTKEQLLAMQPPPKMKKEDWTGLVEYWCDPKNQEKSAKNKANRGNVQLHQRTGARSYIAHRYSLRTKYNNMEPDAVDFFGECMNSPRNGRTPLANEIYEQMVAEKERELEEGEEQKSPSKIVADSLSQISRSSNFLPNIGVPTMSKTGRSTSLAAQARMQAQFEEKLQAEREEAARKQEELQAQLQAQHAALEENQSLLHQTQEEVKGMHTKFEETNALLRAVLKLQKD

SEQ ID NO: 192445 - protein, 420 aa, Zea Mays
MEKTKYEVARDETVKHVQQVFNSLGIHVLAQTVRDVISPKKKEGRGKAIDSDNDYDPCSDIENQSDTNDDYDDDLNNEVNTEATQMVPGTRPHQKKQKAGTMPAANHQPPCTPVRLTRQSAAMPLPGGRPPPKPRHPLPPKTTSKATPKRNAISSSTQQQVRASTTTTETTETTNPVSFPPKMTRSTQAMSSPVPNTMPRPTRYTRTSGTMSTPGGHTMHSPPRFTRASAAMSSPGANPHHSPPRFTRASAAMSSPSANPHHSTPAATAIVSQQPTPTTSVNKTVPTDNSPGGHSSRQSNAINESAEQFDAATSEGNPNEGEPVGDLVPGPKKNVRKKTMGYGLEKMLNRGNRLAIHVAEGKKRPEVPLQVAKLASETGVALRDNLPIYKSWKLYDNSVGQAEVGKVLDKVTVRQLFNSS

SEQ ID NO: 192446 - protein, 244 aa, Zea Mays
MYLTNHHGTILTDVSDTFISSLNLPTHVELVTYSCPVYCSFFTRFLQVRPLYVIVYALQTLKSLCCHCLALFHHLICATERRNDRRFARSAPHLQVGESVEEIDRRVPPVVKEAPTLARSAAKEVRQAGLVGTATGLAKSAIARAEPKARELYTRYEPVAERRAAEAWVALNRLPLVPSVTRAVLPTAAQLSARYNSAVRDGAKRGNAVATYLPLVPTERLARVFRYPVADVAAAPEMQPIPSQ

SEQ ID NO: 192447 - protein, 521 aa, Zea Mays
MIKAEECLKREKERVGHYLHISSEQKLLEKVQNELLAQYATPLLEKEHSGCSALLRDDKVEDLSRMYRLFSKISRGLEPISNMFKTHVTNEGTALVKQAEDSASNKKPEKKDIVGMQEQVFVWKIIELHDKYVAYVTECFQGHTLFHKALKEAFEVFCNKGVSGSSSAELLATFCDNILKKGCSEKLSDEAIEDALEKVVRMLAYISDKDLFAEFYRKKLARRLLFDKSANDEHERSILTKLKQQCGGQFTSKMEGMVTDLTVARDHQTKFEEFVAGHPELNPGIDLAVTVLTTGFWPSYKTFDINLPAEMVKCVEVFKEFYQTRTKHRKLTWIYSLGTCNINAKFDAKPIELIVTTYQAALLLLFNGSDRLSYSEIVTQLNLSDDDVVRLLHSLSCAKYKILNKEPASRSISPNDVFEFNSKFTDRMRRIKVPLPPVDEKKKVVEDVDKDRRYAIDASIVRIMKSRKVMGHQQLVAECVEQLSRMFKPDFKAIKKRIEDLITRDYLERDKDNANTYKYLA

SEQ ID NO: 192448 - protein, 140 aa, Zea Mays
MVESVDDEKIANRLDRVVADLGRKPLKVLVQVNTSGEESKFGVDPSGCMELAKHVKLNCPNLVFSGLMTIGMLDYSSTPENFKALANCREEVCKELGIPEEQCELSMGMSADFEQAIEMGSTNVRVGSTIFGAREYPKKN

SEQ ID NO: 192449 - protein, 163 aa, Zea Mays
MSCNYGLWQVPITFELYLTLAKGGEFLRLCALESEEEVTDVEQAENWFSLTSAQRICDMFLALDKDTNSTLSKQELKEYADGTLTEIFIERVFDEHVRRSKVGGGNSREMDFESFLDFVLALENKDTPEGLTYLFRCLDLNGRGFLTTADIHTLFSCNLVEGQ

SEQ ID NO: 192450 - protein, 202 aa, Zea Mays
MSCNYGLWQVPITFELYLTLAKGGEFLRLCALESEEEVTDVEQAENWFSLTSAQRICDMFLALDKDTNSTLSKQELKEYADGTLTEIFIERVFDEHVRRSKVGGGNSREMDFESFLDFVLALENKDTPEGLTYLFRCLDLNGRGFLTTADIHTLFRGGGLPRFILSGIPLVGISGIGSSRPVAILLGSGGAPVMANYGLSHT

SEQ ID NO: 192451 - protein, 205 aa, Zea Mays
MSCNYGLWQVPITFELYLTLAKGGEFLRLCALESEEEVTDVEQAENWFSLTSAQRICDMFLALDKDTNSTLSKQELKEYADGTLTEIFIERVFDEHVRRSKVGGGNSREMDFESFLDFVLALENKDTPEGLTYLFRCLDLNGRGFLTTADIHTLFRPGALVRAISRVRSSLSAFAGGEAYLGLSFLVSHSWESPALGLPDQLQSC

SEQ ID NO: 192452 - protein, 192 aa, Zea Mays
MSCNYGLWQVPITFELYLTLAKGGEFLRLCALESEEEVTDVEQAENWFSLTSAQRICDMFLALDKDTNSTLSKQELKEYADGTLTEIFIERVFDEHVRRSKVGGGNSREMDFESFLDFVLALENKDTPEGLTYLFRCLDLNGRGFLTTADIHTLFSSLSAFAGGEAYLGLSFLVSHSWESPALGLPDQLQSC

SEQ ID NO: 192453 - protein, 229 aa, Zea Mays
MSCNYGLWQVPITFELYLTLAKGGEFLRLCALESEEEVTDVEQAENWFSLTSAQRICDKDTNSTLSKQELKEYADGTLTEIFIERVFDEHVRRSKVGGGNSREMDFESFLDFVLALENKDTPEGLTYLFRCLDLNGRGFLTTADIHTLFRDVHQKWIEGGNYELCIEDVRDEIWDMVKPADPLRISLSDLLSCKQGGTIASMLVDVRGFWAHDNRENLLQEEEEQVEET

SEQ ID NO: 192454 - protein, 162 aa, Zea Mays
MPGLGNSSDTELETKRILLEIFKERQRKSAEAGSIPSFYKKKPEEGSISSRVQRLAKYRFLKKQSEMLLNADDLDAMWVCLRENCVIDDATGAEKMNYEDFCHIATVCTEQIGQKCKRFFSPSNFMKFEKDDSGRIAILPFYLYVMRTVSYFLRERAVKLAS

SEQ ID NO: 192455 - protein, 909 aa, Zea Mays
MEPDAAGCDVSADGLIAELLDMGFEFDAISAAVGAVGPRRAEVLEVLLGGSDARAGQARRGGGVPGRPALSTAQPRPAGRGMKLSNPRGRLRQSSITDHVASATGGGKESGREANISFPCSSAPGGPRVMPVAVDFCSEPGPQSQSLVENSTVESDQMDRISAVLQKHFGFSCLKAFQKEVLDAWSAHRDCIVLAATGSGKSLCFQIPALLTTKVVVVISPLISLMHDQCLKLANHGVSACFLGSGQPDSRVEGKAMAGMYKIVYVCPETILRLMEPLKKLAEKPGIALFAIDEVHCVSKWGHDFRPDYRRLSALRENFSSSKLKFLKHDIPLMALTATATIPVREDITKSLKMSKDTAIVLTSFFRPNLRFSVKHSKTSASSYGKDFQELIGAYKASREGQQILHGIDTDSESSSYESLNDSASDDEDANVISANHGDKNVGKTKTSMTLVEENIENELDLYQGVDNFDVSCGEFLECSQPESSKSPAQSNQTSSSDCGVQGSTIVYVPTRKQTVELANFLCKSGLRAAAYNAKMPKSHLRQVHQQFHCNDLEVVVATIAFGMGIDKSNVRRIIHYGLPQSLEAYYQEAGRAGRDGKLSDCTLYYNFLRTPTLLPNKRSEEQAKAAYRMLRDCFHYSLNTSTCRAKILVKYFGEDFGPDGCRMCDICTNGPPQMHDFKEEAIVFMNVLQGRSGGETDEMIYSRVPHYSSGRRGFGEAPNFRMVVSHIREKLPRFAATDKIWWQGLSRILEGLRYVEEAAETPRVSMQYPELTEDGLKFLSSSQSEAPLYAYPDAAMLLAMKEPRPFSGFSDWGRGWADPETRRQRLAGKKAGRRKRKWRSRGRQQQPGGFTTARERLTAILAKKKKSCHLLLLWLQEALMIAGQTKRMAPVAASVRVRCVTPRHRSVG

SEQ ID NO: 192456 - protein, 402 aa, Zea Mays
MALTATATIPVREDITKSLKMSKDTAIVLTSFFRPNLRFSVKHSKTSASSYGKDFQELIGAYKASREGQQILHGIDTDSESSSYESLNDSASDDEDANVISANHGDKNVGKTKTSMTLVEENIENELDLYQGVDNFDVSCGEFLECSQPESSKSPAQSNQTSSSDCGVQGSTIVYVPTRKQTVELANFLCKSGLRAAAYNAKMPKSHLRQVHQQFHCNDLEVVVATIAFGMGIDKSNVRRIIHYGLPQSLEAYYQEAGRAGRDGKLSDCTLYYNFLRTPTLLPNKRSEEQAKAAYRMLRDCFHYSLNTSTCRAKILVKYFGEDFGPDGCRMCDICTNGPPQMHDFKEEAIVFMNVLQGRSGGETDEMIYSRVPHYSSGRRGFGEAPNFRMVVSHIREKVWIW

SEQ ID NO: 192457 - protein, 319 aa, Zea Mays
MEPDAAGCDVSADGLIAELLDMGFEFDAISAAVGAVGPRRAEVLEVLLGGSDARAGQARRGGGVPGRPALSTAQPRPAGRGMKLSNPRGRLRQSSITDHVASATGGGKESGREANISFPCSSAPGGPRVMPVAVDFCSEPGPQSQSLVENSTVESDQMDRISAVLQKHFGFSCLKAFQKEVLDAWSAHRDCIVLAATGSGKSLCFQIPALLTTKVVVVISPLISLMHDQCLKLANHGVSACFLGSGQPDSRVEGKAMAGMYKIVYVCPETILRLMEPLKKLAEKPGIALFAIDEVHCVSKWGHDFRPDYRSALVFDILC

SEQ ID NO: 192458 - protein, 633 aa, Zea Mays
MEPLKKLAEKPGIALFAIDEVHCVSKWGHDFRPDYRRLSALRENFSSSKLKFLKHDIPLMALTATATIPVREDITKSLKMSKDTAIVLTSFFRPNLRFSHSKTSASSYGKDFQELIGAYKASREGQQILHGIDTDSESSSYESLNDSASDDEDANVISANHGDKNVGKTKTSMTLVEENIENELDLYQGVDNFDVSCGEFLECSQPESSKSPAQSNQTSSSDCGVQGSTIVYVPTRKQTVELANFLCKSGLRAAAYNAKMPKSHLRQVHQQFHCNDLEVVVATIAFGMGIDKSNVRRIIHYGLPQSLEAYYQEAGRAGRDGKLSDCTLYYNFLRTPTLLPNKRSEEQAKAAYRMLRDCFHYSLNTSTCRAKILVKYFGEDFGPDGCRMCDICTNGPPQMHDFKEEAIVFMNVLQGRSGGETDEMIYSRVPHYSSGRRGFGEAPNFRMVVSHIREKLPRFAATDKIWWQGLSRILEGLRYVEEAAETPRVSMQYPELTEDGLKFLSSSQSEAPLYAYPDAAMLLAMKEPRPFSGFSDWGRGWADPETRRQRLAGKKAGRRKRKWRSRGRQQQPGGFTTARERLTAILAKKKKSCHLLLLWLQEALMIAGQTKRMAPVAASVRVRCVTPRHRSVG

SEQ ID NO: 192459 - protein, 300 aa, Zea Mays
MAQIIDGKAIAADVRREVAADVAALSSAHGLVPGLAVVIVGSRKDSQTYVNMKRKACAEVGICSIDVDLPEDISETALVAEVHRLNADPAVHVSAGLQACGPVDLLPLPKHINEEKILSEISIEKDVDGFHPLNIGKLAMKGREPLFVPCTPKGCMELLSRSGVTVKGKRAVVVGRSNIVGLPVSLLLLKADATVSVVHSRTPDPESIVREADIVIAAAGQAMMIKGDWIKPGAAVIDVGTNSVDDPTRKSGYRLVGDVDFAAASKVAGYLTPVPGGVGPMTVAMLLKNTVDGAKRGIVE

SEQ ID NO: 192460 - protein, 287 aa, Zea Mays
MVASYAIVSDMSAAGLGLNKFCYAGLITAFKNKTPTAEETMAKILDFVGQSKGWQYVERVSKDIAENIMMNVSEEELYNLPTAEYVNRRGGFVFKQHTVYHVALQACAELRSKETLEALLEMFNKDNRDGSTYDAYMVMQAMRCYLRCGDIDSAVKMFEEYSSSRSPPAELYATLAEGAMIGYTPRGMQLAQETIEKMTSRNFFLNAKMGTDLLLAAAGETAGGYTTANYVWDLLQSRKITPTLPAVEAYHKGLTAREIPSDDPRLLNVTRVLDNLKLRFGPRRNTQ

SEQ ID NO: 192461 - protein, 313 aa, Zea Mays
MQGRMRGARRSARGESSRKAAGREVEPFTLCGEMSHLTRATSEPCRRARGAAFARRARPFSAYELVSAREAGRAGGAGFSAADRAYLGRQHIPTKGPWGVDDVESEAYVSQFSADGSLLIAGFRGSRIRVYDAEKGWKIHKDISCRSVHWTVSDIALSPDQRFLAYASLTPIVHIVNVQNAGKESHANITEIHEGLDLTGGDEDEDFGIFSVKFSKDGKEVVVGNNEKSIYVYDLSANKVSARIRAHKADVNAVTFADETGNVLYSGSDDSLCKVWDRRCLSGEKSAENQTLGHQENVFRREISPSESSGLGL

SEQ ID NO: 192462 - protein, 332 aa, Zea Mays
MQGRMRGARRSARGESSRKAAGREVEPFTLCGEMSHLTRATSEPCRRARGAAFARRARPFSAYELVSAREAGRAGGAGFSAADRAYLGRQHIPTKGPWGVDDVESEAYVSQFSADGSLLIAGFRGSRIRVYDAEKGWKIHKDISCRSVHWTVSDIALSPDQRFLAYASLTPIVHIVNVQNAGKESHANITEIHEGLDLTGGDEDEDFGIFSVKFSKDGKEVVVGNNEKSIYVYDLSANKVSARIRAHKADVNAVTFADETGNVLYSGSDDSLCKVWDRRCLSGEKSAGILTGHLDGVTFIDSRGDGRYFISNCKDQRIKLWDIRKMSSVVRS

SEQ ID NO: 192463 - protein, 194 aa, Zea Mays
MVPLVQGTKSAASFCNCLFFFAVFSVEGHLLQRFSAGSCWTGLIPPCWCRRACKEGCEARGGARAGNRPGRRRAARWSHSRCAARCPISPGPRQSRAAGLAAPPSPAGRGPSRRTSWCRRGRPAARAAPGSPRPIEPTSAGSTSPPRGRGASTTWKARPTSRSSPPMARCSSRGFGEAASESTTPRKGGRSTRI

SEQ ID NO: 192464 - protein, 406 aa, Zea Mays
MQGRMRGARRSARGESSRKAAGREVEPFTLCGEMSHLTRATSEPCRRARGAAFARRARPFSAYELVSAREAGRAGGAGFSAADRAYLGRQHIPTKGPWGVDDVESEAYVSQFSADGSLLIAGFRGSRIRVYDAEKGWKIHKDISCRSVHWTVSDIALSPDQRFLAYASLTPIVHIVNVQNAGKESHANITEIHEGLDLTGGDEDEDFGIFSVKFSKDGKEVVVGNNEKSIYVYDLSANKVSARIRAHKADVNAVTFADETGNVLYSGSDDSLCKVWDRRCLSGEKSAGDQSVATYRGHSVLRTLIRCYFSPVHSTGQRYIYTGSSDKSVHIYDVVTGEAVKRLSWHGSIIRDCTWHPYYPTLVSSSWDGFVARWEASGDDDDHSVLVADEMRGSPYYRRYGDPLVM

SEQ ID NO: 192465 - protein, 109 aa, Zea Mays
MIMAEYITKMKSFAYELTFAKTNVDDEELVQTTQHLKVLQIMSLMRLITMLLQHRAFGPSSSEKAVQWNLHMTCIIRVLGFIKTCNSITSMTSCSHCLHRSASSDKITR

SEQ ID NO: 192466 - protein, 760 aa, Zea Mays
MGPRRASSKRNVESDDAVQVDHTNSVDLCEGGKRKMHLEVGKGNDTTNQQVDEIQSRAVKNKAKYTGVDKLEDGSSLMNWLKSTNKKVRTKKKDSEHKNLDSSSISRSYPDIVASNDMHHDFLPSVGDVGQANVPSTTSAKHGNGNAQNDKLEQNMQKMDGLCENESRNLKQRFFSNEKSTILLKRKLLSTSVVHDENIENSNIKRDMLRSDDLPQMEPEGSVQRCLAKVSLGKQKIQNVSGLHKKNIPKNKKGKQKVHKKQNVIDDFPMDIVELLARNQHERQLMTDTNSLENCHTQPKVAQVDCAAFAAKGCPTNASNEFNTNFQKSLASESKQKSLQDQASPSTEAANVNPQDLHTQKSSQCHAASSTSTEVPNGQPPESQMQNSLQVHVLPIKRSFIVYPSKLPVLDDILECTQEQQTQFHRDGGVTIACTSPMFSHHQHIAEVPARSWRNNGEKKLMWDSFKTASRNSPTSSYGFQFGNRLQEVHSSPSHAYGASSNYAAHQPVIVAVDQPRSVPSTTSTMEAGRLYDRRIPGQSGLYPKEPMPATHLLRLMDSSTAPDFTNYQRANRRQMEHQTQTLDSQYTQHDQYNGSLSTSYGRHITGKVPPTLQDLSRRQVQQNLHRPLRPHPRVGVLGSLLQQDIANWYENCGPPQSGYRLGVSKGTASLDMNRHGNYETLNSGVFTAGWNALQLGSVSSLADPEYRLPRYGTGQPCTGGNGRTVHPLDKLVRKDICVTNRNPADFTVISDMNEYMRSL

SEQ ID NO: 192467 - protein, 491 aa, Zea Mays
MDIVELLARNQHERQLMTDTNSLENCHTQPKVAQVDCAAFAAKGCPTNASNEFNTNFQKSLASESKQKSLQDQASPSTEAANVNPQDLHTQKSSQCHAASSTSTEVPNGQPPESQMQNSLQVHVLPIKRSFIVYPSKLPVLDDILECTQEQQTQFHRDGGVTIACTSPMFSHHQHIAEVPARSWRNNGEKKLMWDSFKTASRNSPTSSYGFQFGNRLQEVHSSPSHAYGASSNYAAHQPVIVAVDQPRSVPSTTSTMEAGRLYDRRIPGQSGLYPKEPMPATHLLRLMDSSTAPDFTNYQRANRRQMEHQTQTLDSQYTQHDQYNGSLSTSYGRHITGKVPPTLQDLSRRQVQQNLHRPLRPHPRVGVLGSLLQQDIANWYENCGPPQSGYRLGVSKGTASLDMNRHGNYETLNSGVFTAGWNALQLGSVSSLADPEYRLPRYGTGQPCTGGNGRTVHPLDKLVRKDICVTNRNPADFTVISDMNEYMRSL

SEQ ID NO: 192468 - protein, 80 aa, Zea Mays
MCFLCMLSWSLLHNAMIFPRPQLDLLQLHRAPRVRCGTFADMDDDDDDDDDDTKDEGDEDVVAARHDIIGSSQLQDASTT

SEQ ID NO: 192469 - protein, 86 aa, Zea Mays
MLASLLSTKVGKSHPSHLPAPPSHHLLLKKPGEVAIAWHDTQLCPSLLLWHPASVTWTSYRRVEPRKNGVSFSYATVTALNPPQSQ

SEQ ID NO: 192470 - protein, 299 aa, Zea Mays
MTRQHQPQCARRLPKRIILVRHGESQGNLDMSAYTTTPDYRIPLTALGAEQARAAGQRIRDVVAGSGNWKVYFYVSPYARTRATLREIGRAFPRDRVIGAREECRVREQDFGNFQVEERMRAVKETRQRFGRFFFRFPEGESAADVFDRVASFLESLWRDIDMGRLDQDPSCETNLVIVSHGLTSRVFLMKWFKWTVAQFERLNNFDNCEFRVMQLGPGGEYSLLVHHTQEELQQWGMSPEMIADQQWRASANRRCWAEECSSFIDTFFEEPYGSSETSSSDEDEAEDKEEETKLLEQL

SEQ ID NO: 192471 - protein, 251 aa, Zea Mays
MKTVSLGASRPSTVNFRMPTRDNLVPIRVDVEVDGQRYRDAFTWNPRDPDSEIISFAKRTAKDLKLPANFVPQMLQSIQGQLAEFRSYEGQEMQIKEKIVPLKIDLRVNNTVIRDQFLWDIGNLDSDPEEFARTLCDDLNITDPEVGPAIAVSIREQLYESVSVMREKQMSKKGRRAPEFSSNSKAVNNAVDLFKYFGSKGSVIRKRKEWYLYEPVVDVVANDEDGKEEANNSSRPKKRADEEKAASLQSL

SEQ ID NO: 192472 - protein, 417 aa, Zea Mays
MAPTPEPRRPYKRPAISDQQRRRELALQAQSARRADAQARARALATSLLTTRAPTAATSRDEEEEEYEHEEEEEERELTASGVAAAAAASRLRGSEARRWFARQVMLPEWMVDAPPHLATDWHVFARPSGKRCLVVSSNGMTISRVRNGSILHRFPSALPNGSKRDISGPASSYSILDCIFHEPDETYYIIDMICWRGYSLYDCTAEFRFFWVNSKIAETSAGDPPSTYHRYRFSALPVYECTLEGLQAAYSGSMPYVKDGLVFYNKHAHYQAGITPLALVWKDETCSQYVIDTNNKGEIPSEQHLVLELLEDGKVVTSDDPHVVFGSLDSAFIQTSNLRPGNLLRFAVRDESVKLMDGKMHIGQLQFVGKPNRARAFADSHSKYAARHVPLRIEDLVASIQSNNMEVESTDVEMQD

SEQ ID NO: 192473 - protein, 645 aa, Zea Mays
MSPPAPAAAAAAAPRTVASAVLRVQMALLDGAAVSSEALIHAAASALLSRADYDDVVTERTISDVCGNPACPNPLSSSSAAATGPRFHIALSEHRVYDLEEARKFCSERCLVASKALAASLPHDRPYGVPLDRLAAVVALVEGAAAGDGSGLGFQGLDGNGKVEDGGRKVEIKEKQVAGAGEVLLQDWVGPSDAIEGYVPRHDRSAHGQKPQVQQNEGAGPELSRTENVDYGAAAPGEDGMTSSPSLVKTHVSSEVIVERMGSLVLGENTRTPRKKKTKTPSKMLEQEEDNSMLSSCISDSIAKQLEDVVLEERKGSQKNKMSKASSRAQKGKSTKRPASTNMEENAMNQYNYLSSSVLVDNHPSSSQSSEKDSTQAYSEQLCEEFSEAVNIGNDETSDEKMRPAWKSSLKVAGSKSSRQSVTWADENGSVLETSKAYESPSSSIKRPEEGIDNSLRRASAEACAAALVEAAEAISSGTAEAEDAVSNAGIIILPDMLNQQEHDNGKNSGGDDDPEIDRDVIKWPKKPVLLDTDLFEVDDSWHDMPPEGFSLTLSAFGTMWAALFGWISSSSLAYVYGLERGSVEELLIANGRECPEKTVLKDGLSLEIRRALDSCVCNAVPVLISNLRLQIPVSKLEITLLYRR

SEQ ID NO: 192474 - protein, 565 aa, Zea Mays
MGMGRWRTGEGRWRSRRSRSPGLARSCCRTGLGPPMPLRVMCRAMTAVLMPQVQQNEGAGPELSRTENVDYGAAAPGEDGMTSSPSLVKTHVSSEVIVERMGSLVLGENTRTPRKKKTKTPSKMLEQEEDNSMLSSCISDSIAKQLEDVVLEERKGSQKNKMSKASSRAQKGKSTKRPASTNMEENAMNQYNYLSSSVLVDNHPSSSQSSEKDSTQAYSEQLCEEFSEAVNIGNDETSDEKMRPAWKSSLKVAGSKSSRQSVTWADENGSVLETSKAYESPSSSIKRPEEGIDNSLRRASAEACAAALVEAAEAISSGTAEAEDAVSNAGIIILPDMLNQQEHDNGKNSGGDDDPEIDRDVIKWPKKPVLLDTDLFEVDDSWHDMPPEGFSLTLSAFGTMWAALFGWISSSSLAYVYGLERGSVEELLIANGRECPEKTVLKDGLSLEIRRALDSCVCNAVPVLISNLRLQIPVSKLEITLGYLIDTMSFVDALPSLRSRQWQAVVLVMLDALSVHQLPALAPVFSNSKLVQKMLNAAQVSREEYDSMVDLFLPFGRSVQAITPM

SEQ ID NO: 192475 - protein, 632 aa, Zea Mays
MLLPPPAPSPPPHPLFLHGGGEHYTPAEELCGGSSLRSGAASRAGHRGRGESPRGGRQAAGGGGRRGWRAAGAAGDAAEGSPVHRGCPRRRRRRLRSRGGARPRAQDVLPRRARPWLRAPPPSRGSTTTSSTRCCGENMVGAVVLVYDNMRKDGVHPNVFTYNLLVRALCQNNRVGAARKMLDEMARKGCPPDDVTYATIVSVLCKLDRLDEATEVLAAMPPVAASYNAIVLALCREFRMQEVFSVVSDMVGRGLQPNVITYTTIVDAFCKAGELRMACAILARMVITGCTPNVVTFTALVRGLFDDGRVHDALDMWRWMVAEGWAPSTVSYNILIRGLCSVGDLKGASSILNSMEQHGCFPNVRTYSTLIDGFSKAGDLGGAISIWNDMSRSGCKPNVVVYTNMVDVFCKKLMFNQAKSLIDKMLLENCPPNTVTFNTLIRSLCDCRRVGRALGVFHEMRRHGCVPNGRTYNELIHGLFREGNCGDALHMVTEMQSHGIELSLVTYNTVVSGLCQTRMSREAMVFVGKMIVQGIQPNAFTFSAIIHAYCKEGEVRMAAWMLGAMNVVNCHRNILVYTILMAELCNQDKLVDAMTYLLKMLYEACEIWHRSSVPPVFCILCQSQTACKKTLD

SEQ ID NO: 192476 - protein, 373 aa, Zea Mays
MKYSSYLNDEPMPDATSEKEQGNEYFKQKKFTDAIECYSRSIGLSPTAVTFANRAMAYLKLRRFKEAEDDCTEALNLDDRYIKAYSRRITARKELGKLKEAMDDAEFAISLDPNNSELRKQYSEIKALHMEKMAKKVPVPAKRAVSGIDKTADVTSHPPTISQKDTIMEVDLPVRDAMKIKESASVKSNGGPGVIINGNNVQLQGRDANQKTGPEVSVQDLAARAASRYMAGTVKSIKTPKTAYDFEVSWRALSDDTAQQIQLLKSIPPASLPEIFKNALSAPFLIDIVKCAASIFRDAEALAVSILDNLARVPRFDLIIMCLSSMHKFELRKIWDQVFLAEKALADDQMEALRQLRGRYIPGGWQDSMLTSS

SEQ ID NO: 192477 - protein, 370 aa, Zea Mays
MEYKARSTGTSGTSSKSFRDLYNMKYSSYLNDEPMPDATSEKEQGNEYFKQKKFTDAIECYSRSIGLSPTAVTFANRAMAYLKLRRFKEAEDDCTEALNLDDRYIKAYSRRITARKELGKLKEAMDDAEFAISLDPNNSELRKQYSEIKALHMEKMAKKVPVPAKRAVSGIDKTADVTSHPPTISQKDTIMEVDLPVRDAMKIKESASVKSNGGPGVIINGNNVQLQGRDANQKTGPEVSVQDLAARAASRYMAGTVKSIKTPKTAYDFEVSWRALSDDTAQQIQLLKSIPPASLPEIFKNALSAPFLIDIVKCAASIFRDAEALAVSILDNLARVPRFDLIIMCLSSMHKFDGSSEAAARQIHSGRMAG

SEQ ID NO: 192478 - protein, 374 aa, Zea Mays
MKYSSYLNDEPMPDATSEKEQGNEYFKQKKFTDAIECYSRSIGLSPTAVTFANRAMAYLKLRRFKEAEDDCTEALNLDDRYIKAYSRRITARKELGKLKEAMDDAEFAISLDPNNSELRKQYSEIKALHMEKMAKKVPVPAKRAVSGIDKTADVTSHPPTISQKDTIMEVDLPVRDAMKIKESASVKSNGGPGVIINGNNVQQLQGRDANQKTGPEVSVQDLAARAASRYMAGTVKSIKTPKTAYDFEVSWRALSDDTAQQIQLLKSIPPASLPEIFKNALSAPFLIDIVKCAASIFRDAEALAVSILDNLARVPRFDLIIMCLSSMHKFELRKIWDQVFLAEKALADDQMEALRQLRGRYIPGGWQDSMLTSS

SEQ ID NO: 192479 - protein, 371 aa, Zea Mays
MEYKARSTGTSGTSSKSFRDLYNMKYSSYLNDEPMPDATSEKEQGNEYFKQKKFTDAIECYSRSIGLSPTAVTFANRAMAYLKLRRFKEAEDDCTEALNLDDRYIKAYSRRITARKELGKLKEAMDDAEFAISLDPNNSELRKQYSEIKALHMEKMAKKVPVPAKRAVSGIDKTADVTSHPPTISQKDTIMEVDLPVRDAMKIKESASVKSNGGPGVIINGNNVQQLQGRDANQKTGPEVSVQDLAARAASRYMAGTVKSIKTPKTAYDFEVSWRALSDDTAQQIQLLKSIPPASLPEIFKNALSAPFLIDIVKCAASIFRDAEALAVSILDNLARVPRFDLIIMCLSSMHKFDGSSEAAARQIHSGRMAG

SEQ ID NO: 192480 - protein, 326 aa, Zea Mays
MEYKARSTGTSGTSSKSFRDLYNMKYSSYLNDEPMPDATSEKEQGNEYFKQKKFTDAIECYSRSIGLSPTAVTFANRAMAYLKLRRFKEAEDDCTEALNLDDRYIKAYSRRITARKELGKLKEAMDDAEFAISLDPNNSELRKQYSEIKALHMEKMAKKVPVPAKRAVSGIDKTADVTSHPPTISQKDTIMEVDLPVRDAMKIKESASVKSNGGPGVIINGNNVQQLQGRDANQKTGPEVSVQDLAARAASRYMAGTVKSIKTPKTAYDFEVSWRALSDDTAQQIQLLKSIPPASLPEIFKNALSAPFLIDIVKCAASIFRCQYFG

SEQ ID NO: 192481 - protein, 119 aa, Zea Mays
MVGSSEEDEACSGGDTEATEPGQQEHSSRLADRELKEMLLKKYSGCLSRLRSEFLKKRKKGKLPKDARSALMDWWNTHYRWPYPTVTMHASWQTRSSSIARWNGRSVTSISRRCRRRTR

SEQ ID NO: 192482 - protein, 149 aa, Zea Mays
MVGSSEEDEACSGGDTEATEPGQQEHSSRLADRELKEMLLKKYSGCLSRLRSEFLKKRKKGKLPKDARSALMDWWNTHYRWPYPTEEDKVRLAAATGLDPKQINNWFINQRKRHWKPSEDMRFALMEGVTGGGPSSGTTLYFDTGTIGP

SEQ ID NO: 192483 - protein, 325 aa, Zea Mays
MAVASRLAVTRVSPADGARPAAAAGRRSGLAVVRLPPTDSRGRRRRRGGAVAASPPTEEVVQMTEPLTKEDLVAYLVSGCKPKENWRIGTEHEKFGFEVDTLRPIKYDQIRDILNGLAERFDWEKIMEGNIVIGLKQGKQSISLEPGGQFELSGAPLETLHQTCAEVNSHLYQVKAVGEEMGIGFLGLGFQPKWALSDIPIMPKGRYKIMRNYMPKVGTLGLDMMFRTCTVQVNLDFSSEQDMIRKFRAGLALQPIATAIFANSPFKEGKPNGFLSLRSHIWTDTDNNRAGMLPFVFDNSFGILCKESSDKLLGSCLLLMIGRTI

SEQ ID NO: 192484 - protein, 213 aa, Zea Mays
MAVASRLAVTRVSPADGARPAAAAGRRSGLAVVRLPPTDSRGRRRRRGGAVAASPPTEEVVQMTEPLTKEDLVAYLVSGCKPKENWRIGTEHEKFGFEVDTLRPIKYDQIRDILNGLAERFDWEKIMEGNIVIGLKQGKQSISLEPGGQFELSGAPLETLHQTCAEVNSHLYQVKAVGEEMGIGFLGLGFQPKWALSDIPIMPKIQNNEELHA

SEQ ID NO: 192485 - protein, 320 aa, Zea Mays
MGIGFLGLGFQPKWALSDIPIMPKGRYKIMRNYMPKVGTLGLDMMFRTCTVQVNLDFSSEQDMIRKFRAGLALQPIATAIFANSPFKEGKPNGFLSLRSHIWTDTDNNRAGMLPFVFDNSFGFEQYVDYALDVPMYFVYRNNKYIDCTGMSFRDFMQGKLRQAPGELPTLNDWENHLTTIFPEVRLKRYLEMRGADGGPWRRLCALPAFWVGLLYDEESLQSILDMTFDWTQEEREMLRHKVPLTGLKTPFRDGYVRDLAEEVLKLAKNGLERRGYKEVGFLREVDEVVRTGVTPAERLLHLYETKWQRNVDHVFEHLLY

SEQ ID NO: 192486 - protein, 473 aa, Zea Mays
MAVASRLAVTRVSPADGARPAAAAGRRSGLAVVRLPPTDSRGRRRRRGGAVAASPPTEEVVQMTEPLTKEDLVAYLVSGCKPKENWRIGTEHEKFGFEVDTLRPIKYDQIRDILNGLAERFDWEKIMEGNIVIGLKQGKQSISLEPGGQFELSGAPLETLHQTCAEVNSHLYQVKAVGEEMGIGFLGLGFQPKWALSDIPIMPKGRYKIMRNYMPKVGTLGLDMMFRTCTVQVNLDFSSEQDMIRKFRAGLALQPIATAIFANSPFKEGKPNGFLSLRSHIWTDTDNNRAGMLPFVFDNSFGFEQYVDYALDVPMYFVYRNNKYIDCTGMSFRDFMQGKLRQAPGELPTLNDWENHLTTIFPEVRLKRYLEMRGADGGPWRRLCALPAFWVGLLYDEESLQSILDMTFDWTQEEREMLRHKNGLERRGYKEVGFLREVDEVVRTGVTPAERLLHLYETKWQRNVDHVFEHLLY

SEQ ID NO: 192487 - protein, 54 aa, Zea Mays
MGSYMEKRVVYLFLSQMIVTMTEQIYKKISPLPVQCRENEFITVCTTNMLWTVI

SEQ ID NO: 192488 - protein, 108 aa, Zea Mays
MALCQLPIGSHMRTQLVAANICADAVAPNRHDFSFSRALLLPSHLYRSIWCACCGGEPATSAACRYAILHCDMNPRNSASLTDGTRSPTTGNHSAADGDVEPDNMEIC

SEQ ID NO: 192489 - protein, 120 aa, Zea Mays
MALCQLPIGSHMRTQLVAANICADAVAPNRHDFSFSRALLLPSHLYRSIWCACCGGEPATSAACRYAILHCDMNPRNSASLTDGTRSPTTGNHSAADGDVEVQEFLEFCDSQQPDNMEIC

SEQ ID NO: 192490 - protein, 74 aa, Zea Mays
MTEGDKIIDRVRNFRLQDLGLVSCFSVKSAISGLPAMGGADPMHRMINRTTSAWFGNTESRVLYLRCWKVVAIV

SEQ ID NO: 192491 - protein, 1020 aa, Zea Mays
MMPNAVTNSTKDVLEADDTTFNNEFLIKLDQLGDDPVISLGNMLVELIQHEDSCSGDSNGPTSTYKLLLLKESISKEIEKTELEIDSLEGELKSVNTEAATTLEGSPTGVTHTENLSPSSGTSKVPGSVEICDTSDMIKEPGELIGSPKVPVVQYDDVKSADMMEIETAPVHNAKTVPSEAGAISPVVAEGKACAAADLSSLKASEEAGSQNDIDNGRLETSSRQANADSMKIEISDDLPVKKWTYHDHKSDLLSSVTSANSAIAKEINEVLFKSLPADTPRLDLFASSHLLSQRKSDLIVKERLGVCKTRLRLKEQMLTMKFKAYCHLWKDVQLFSANKQRSKSNKRTDQSNRTSQIGSQRQRSSNRSRLTMPAGNLSTFSTPEMSDVAMRLFSEFKIKRCRNYLKMPALIIDEKEKEWLKLMNKNGLVEDPVLVEKERVMINPWTQEEKKIFMELLAKFGKDFSKIASFITHKSTADCVEFYYKHHKSDSFREVKKLLDLRQQQPTSNFLGAKSGHKWNPESNAASLDMLGVASVVAAHGLEYAKQVEKISAKSLIRTAYGPNVTSVANKSSDKECIDHVPLHERESVAADVLAGICGTLSPDGMGSCITSSADPGQKISMKRVEHVLSQENDKTVEEEDTLSDQECEVDPVDWNDDEKSIFIEAMNNYGKDFARISSCVKSKSYEQCKVFFSKARKSLGLDLIHQGAADVSMPASDTNGGKSDTDEACAVEMDSAICSTQSCSKIAMDVCPTEGAIGGPNSVIISKQAEAYISNGCNADVKIEEDEKVADKNCSIVDAKRSSDATHEAGPIDINCPGSTDKLQGTDDVVDLVNMHSNSGISSSAKHAVAIHSEMRSTLHSVEVLQTDKGEGTGTDLSWVEECSHHALDNTPMKNGNSGAPAFLASDSGIKDNVRISNITAASTVSPAFTSSYQHSVPGDMPLPKPKPLVTPLTPKDLMPVQFSSVLPDPTAIRFEGIASITTPNFEDTGNRVSGALGAKEMSKYPAFRDPSELRVAL

SEQ ID NO: 192492 - protein, 151 aa, Zea Mays
MQRKHKLLAHRSHCCRKQIGAASRRRVLLASLLPSDSRRLLLASLLPHQIPAPPPRPLNSDPSLRDRPIRSHTTGARRGSAAAGSAQASRMAALTASRGQPAARIVGLAGGIVVGGDGWRPPGSRLPLVVRVNYGICHLDLMGLDWRLAFP

SEQ ID NO: 192493 - protein, 1530 aa, Zea Mays
MRGSYRRSPYRGGYGSDFSRNHPEQPPPPPPRRSPLRSVAVPICYDSPGNRVDRGDRDNLPRVTPWRRRESRSEPADAVGLLSVGQTTRLSASGKEASAQPLSVSGPHGTEDEAPRKKARLGWGQGLAKYEKQKVQGPVDPAEAVADGSPADGELKTTSPVPVPVHPVPVPVPYVAPAPPAAPVLAPAPAPSAAPALLSAPMQCSSPVTGPPYCSSDKSCEMMPNAVTNSTKDVLEADDTTFNNEFLIKLDQLGDDPVISLGNMLVELIQHEDSCSGDSNGPTSTYKLLLLKESISKEIEKTELEIDSLEGELKSVNTEAATTLEGSPTGVTHTENLSPSSGTSKVPGSVEICDTSDMIKEPGELIGSPKVPVVQYDDVKSADMMEIETAPVHNAKTVPSEAGAISPVVAEGKACAAADLSSLKASEEAGSQNDIDNGRLETSSRQANADSMKIEISDDLPVKKWTYHDHKSDLLSSVTSANSAIAKEINEVLFKSLPADTPRLDLFASSHLLSQRKSDLIVKERLGVCKTRLRLKEQMLTMKFKAYCHLWKDVQLFSANKQRSKSNKRTDQSNRTSQIGSQRQRSSNRSRLTMPAGNLSTFSTPEMSDVAMRLFSEFKIKRCRNYLKMPALIIDEKEKEWLKLMNKNGLVEDPVLVEKERVMINPWTQEEKKIFMELLAKFGKDFSKIASFITHKSTADCVEFYYKHHKSDSFREVKKLLDLRQQQPTSNFLGAKSGHKWNPESNAASLDMLGVASVVAAHGLEYAKQVEKISAKSLIRTAYGPNVTSVANKSSDKECIDHVPLHERESVAADVLAGICGTLSPDGMGSCITSSADPGQKISMKRVEHVLSQENDKTVEEEDTLSDQECEVDPVDWNDDEKSIFIEAMNNYGKDFARISSCVKSKSYEQCKVFFSKARKSLGLDLIHQGAADVSMPASDTNGGKSDTDEACAVEMDSAICSTQSCSKIAMDVCPTEGAIGGPNSVIISKQAEAYISNGCNADVKIEEDEKVADKNCSIVDAKRSSDATHEAGPIDINCPGSTDKLQGTDDVVDLVNMHSNSGISSSAKHAVAIHSEMRSTLHSVEVLQTDKGEGTGTDLSWVEECSHHALDNTPMKNGNSGAPAFLASDSGIKDNVRISNITAASTVSPAFTSSYQHSVPGDMPLPKPKPLVTPLTPKDLMPVQFSSVLPDPTAIRFEGIASITTPNFEDTGNRVSGALGAKEMSKYPAFRDPSGNQQSTLFCNIDGYMNHRLTTELPFFSERTASGTVNTSQADRLTQTKLQNGRSSSLCLQNNSDGIQWPRDHEGGLEGSLRPCSRNTSSEGDEQQKRPGDVKLFGQILSHQSTLQSSGLSCNGNKSKPPSPKIDTSVRSMNNPMDRVVCSSRPGTTPHLGLEERLARCYGHLDGSTAQPEPLLVMAKRQRSLAGVQFYSAKNGTLGVLPDYQQPSTQPQQSDPKRVERLSDPQKRNVLELISGFQQPGRVARFGGAGILVSGNVSDPVAAALKAQYGPGSKIMGSDVDPWTDIGSR

SEQ ID NO: 192494 - protein, 1556 aa, Zea Mays
MRGSYRRSPYRGGYGSDFSRNHPEQPPPPPPRRSPLRSVAVPICYDSPGNRVDRGDRDNLPRVTPWRRRESRSEPADAVGLLSVGQTTRLSASGKEASAQPLSVSGPHGTEDEAPRKKARLGWGQGLAKYEKQKVQGPVDPAEAVADGSPADGELKTTSPVPVPVHPVPVPVPYVAPAPPAAPVLAPAPAPSAAPALLSAPMQCSSPVTGPPYCSSAPEDKSCEMMPNAVTNSTKDVLEADDTTFNNEFLIKLDQLGDDPVISLGNMLVELIQHEDSCSGDSNGPTSTYKLLLLKESISKEIEKTELEIDSLEGELKSVNTEAATTLEGSPTGVTHTENLSPSSGTSKVPGSVEICDTSDMIKEPGELIGSPKVPVVQYDDVKSADMMEIETAPVHNAKTVPSEAGAISPVVAEGKACAAADLSSLKASEEAGSQNDIDNGRLETSSRQANADSMKIEISDDLPVKKWTYHDHKSDLLSSVTSANSAIAKEINEVLFKSLPADTPRLDLFASSHLLSQRKSDLIVKERLGVCKTRLRLKEQMLTMKFKAYCHLWKDVQLFSANKQRSKSNKRTDQSNRTSQIGSQRQRSSNRSRLTMPAGNLSTFSTPEMSDVAMRLFSEFKIKRCRNYLKMPALIIDEKEKEWLKLMNKNGLVEDPVLVEKERVMINPWTQEEKKIFMELLAKFGKDFSKIASFITHKSTADCVEFYYKHHKSDSFREVKKLLDLRQQQPTSNFLGAKSGHKWNPESNAASLDMLGVASVVAAHGLEYAKQVEKISAKSLIRTAYGPNVTSVANKSSDKECIDHVPLHERESVAADVLAGICGTLSPDGMGSCITSSADPGQKISMKRVEHVLSQENDKTVEEEDTLSDQECEVDPVDWNDDEKSIFIEAMNNYGKDFARISSCVKSKSYEQCKVFFSKARKSLGLDLIHQGAADVSMPASDTNGGKSDTDEACAVEMDSAICSTQSCSKIAMDVCPTEGAIGGPNSVIISKQAEAYISNGCNADVKIEEDEKVADKNCSIVDAKRSSDATHEAGPIDINCPGSTDKLQGTDDVVDLVNMHSNSGISSSAKHAVAIHSEMRSTLHSVEVLQTDKGEGTGTDLSWVEECSHHALDNTPMKNGNSGAPAFLASDSGIKDNVRISNITAASTVSPAFTSSYQHSVPGDMPLPKPKPLVTPLTPKDLMPVQFSSVLPDPTAIRFEGIASITTPNFEDTGNRVSGALGAKEMSKYPAFRDPSGNQQSTLFCNIDGYMNHRLTTELPFFSERTASGTVNTSQADRLTQTKLQNGRSSSLCLQNNSDGIQWPRDHEGGLEGSLRPCSRNTSSEGDEQQKRPGDVKLFGQILSHQSTLQSSGLSCNGNKSKPPSPKIDTSVRSMNNPMDRVVCSSRPGTTPHLGLEERLARCYGHLDGSTAQPEPLLVMAKRQRSLAGVQFYSAKNGTLGVLPDYQQPSTQPQQSDPKRVERLSDPQKRNVLELISGFQQPGRVARFGGAGILVSGNVSDPVAAALKAQYGPGSKIMGSDVDPWTDIGSSSIPFWYSLTCQQWHSAVGSLEVN

SEQ ID NO: 192495 - protein, 98 aa, Zea Mays
MALLRALPAAVLPRRAPHPLPHPPRLTFGSWTRSGSAPSSPPPPPPPTRRHRPWGPPSSAGSRSPGSRSAGRASPTAGRGPACAPKVRRGRVSPASRF

SEQ ID NO: 192496 - protein, 138 aa, Zea Mays
MKTWDDITDPSSRRQAHGTATCWDRSSSPNDLCLRTWTTRTPMLPCVACSITVASVAQEACARARGRGVRVTAAPASARDSRTRLVTCTHHRRPPWMSKQCRRCPLARDGKRMLSLACATATKLILLSYPFPSAQVDR

SEQ ID NO: 192497 - protein, 363 aa, Zea Mays
MANMLVSEMRLPLYLAHLLAARRLDTAKDVLSLPEVELMAILDAGLPTARAAIAHVSEAACPPCQTALSLLEERVRLGGGGRLATMLCGLDEALGGGIPTGKLTEVVGPSGIGKTQFCLKLALLAALPEYYGGLDGRVVYIDTEFKFSPRRMIEIGQKSFPQIFRQEGLAQKMAGRILVMRPTSLADFTKSLEEMKVTLLQHDVKLLIVDSVAALMSMENEKATAGFRQHPLRWSLSFLKSIAEFSRIPVVVTNQVRSQSNDDGYHFSFEVDRKDGSNCAERFDSHLVAALGIQWAHAVTVRLVFESHSGHRFIKVAKSPMSPAVAFPFAVESSGITLLSDESIDVTGPDITSIRCQGQNVLA

SEQ ID NO: 192498 - protein, 408 aa, Zea Mays
MANMLVSEMRLPLYLAHLLAARRLDTAKDVLSLPEVELMAILDAGLPTARAAIAHVSEAACPPCQTALSLLEERVRLGGGGRLATMLCGLDEALGGGIPTGKLTEVVGPSGIGKTQFCLKLALLAALPEYYGGLDGRVVYIDTEFKFSPRRMIEIGQKSFPQIFRQEGLAQKMAGRILVMRPTSLADFTKSLEEMKVTLLQHDVKLLIVDSVAALMSMENEKATAGFRQHPLRWSLSFLKSIAEFSRIPVVVTNQVRSQSNDDGYHFSFEVDRKDGSNCAERFDSHLVAALGIQWAHAVTVRLVFESHSGHRFIKVAKSPMSPAVAFPFAVESSGITLLSDESIDVTGPDITSIRCQGFFALSVLDDDTCRFRLPQQNTRVAAPQESVLFNQSFGETVWASNLSVVPW

SEQ ID NO: 192499 - protein, 322 aa, Zea Mays
MANMLVSEMRLPLYLAHLLAARRLDTAKDVLSLPEVELMAILDAGLPTARAAIAHVSEAACPPCQTALSLLEERVRLGGGGRLATMLCGLDEALGGGIPTGKLTEVVGPSGIGKTQFCLKLALLAALPEYYGGLDGRVVYIDTEFKFSPRRMIEIGQKSFPQIFRQEGLAQKMAGRILVMRPTSLADFTKSLEEMKVTLLQHDVKLLIVDSVAALMSMENEKATAGFRQHPLRWSLSFLKSIAEFSRIPVVVTNQVRSQSNDDGYHFSFEVDRKDGSNCAERFDSHLVAALGIQWAHAVTVRLVFESHSGSLRWQNHLCLRQ

SEQ ID NO: 192500 - protein, 307 aa, Zea Mays
MANMLVSEMRLPLYLAHLLAARRLDTAKDVLSLPEVELMAILDAGLPTARAAIAHVSEAACPPCQTALSLLEERVRLGGGGRLATMLCGLDEALGGGIPTGKLTEVVGPSGIGKTQMAGRILVMRPTSLADFTKSLEEMKVTLLQHDVKLLIVDSVAALMSMENEKATAGFRQHPLRWSLSFLKSIAEFSRIPVVVTNQVRSQSNDDGYHFSFEVDRKDGSNCAERFDSHLVAALGIQWAHAVTVRLVFESHSGHRFIKVAKSPMSPAVAFPFAVESSGITLLSDESIDVTGPDITSIRCQGQNVLA

SEQ ID NO: 192501 - protein, 307 aa, Zea Mays
MQLDLNVAEAPPPVEMEASDSGSSVLNASEAASAGGAPAPAEEGSSSTPAVLEFSILIRSDSDAAGADEDEDATPSPPPRHRHQHQQQLVTRELFPAGAGPPAPTPRHWAELGFFRADLQQQQAPGPRIVPHPHAAPPPAKKSRRGPRSRSSQYRGVTFYRRTGRWESHIWDCGKQVYLVVVRLLADIRRWIRHRSRRCKGVRPGGDQVPRRRRRHQLQPQRLRGRHEADGEPVQGGVRARPAPSEHRLLERQLQVQRRHPAQVRPLGGAHGAVPRQESLRQGRHQMQWQRGRDELRAEHVSRGAAD

SEQ ID NO: 192502 - protein, 295 aa, Zea Mays
MQLDLNVAEAPPPVEMEASDSGSSVLNASEAASAGGAPAPAEEGSSSTPAVLEFSILIRSDSDAAGADEDEDATPSPPPRHRHQHQQQLVTRELFPAGAGPPAPTPRHWAELGFFRADLQQQQAPGPRIVPHPHAAPPPAKKSRRGPRSRSSQYRGVTFYRRTGRWESHIWDCGKQVYLVVVRLLADIRRWIRHRSRRCKGVRPGGDQVPRRRRRHQLQPQRLRGRHEADGEPVQGGVRARPAPSEHRLLERQLQVQRRHPAQVRPLGGAHGAVPRQEVRTNQRFFSFSFFYSMQ

SEQ ID NO: 192503 - protein, 268 aa, Zea Mays
MQLDLNVAEAPPPVEMEASDSGSSVLNASEAASAGGAPAPAEEGSSSTPAVLEFSILIRSDSDAAGADEDEDATPSPPPRHRHQHQQQLVTRELFPAGAGPPAPTPRHWAELGFFRADLQQQQAPGPRIVPHPHAAPPPAKKSRRGPRSRSSQYRGVTFYRRTGRWESHIWDCGKQVYLGGFDTAHAAARAYDRAAIKFRGVDADINFNLSDYEDDMKQMGSLSKEEFVHVLRRQSTGFSRGSSRYRGVTLHKCGRWEARMGQFLGKK

SEQ ID NO: 192504 - protein, 58 aa, Zea Mays
MKFNVNRVDNMVIQAIFLLDMLNKDINSFSMRVSPSNQLWNPNGQAFGWKVQQRWLRD

SEQ ID NO: 192505 - protein, 86 aa, Zea Mays
MWASCVGARPSRGERDSTIENTSKNKNVELEFSDEERDQELPDFSSFIPFLPPLSAANLKVYYATCFTIIVGIMVFGGFLAPILMC

SEQ ID NO: 192506 - protein, 359 aa, Zea Mays
MAAVEVCVKAAAGNPDTLGDCPFSQRVLLTLEEKKVPYEVKLVDLGNKPEWFLNISPEGKVPLFNGGDGKCIADSDVITQVIEEKFPTPSLVTPPEYASVGSKIFPAFVKFLKSKDASDGSEKALLDELQALDDHLKAHGPYINGENVSATDLSLGPKLFHLQIALEHFKGWKIPENLTNVHAYTKALFSRESFVKTKPSEEHVIAGWAPKTFFRFLKISPEGKVPVYNSGDGKWIANSDVITQVIEEKYPAPSLATPPEYASVGSKIFPSFVKFLMSKDASDDGSEEALVRELQALEEHLKAHGRPYISGERVTAADLSLAPKLFHLVVALEHFKGWKVPESMSSVHAYTQPRIFHQD

SEQ ID NO: 192507 - protein, 117 aa, Zea Mays
MLPCWLGTLEVLPMSGKWDVTLVVGDKHTKYEVCPCTALQLAQTYFNNIYKLHGLPQAIVSDRETGSSQSNLWPSDTKFLMSWSYDPQTDGQTEHVDQCLKTREWSMWLPSLSRILV

SEQ ID NO: 192508 - protein, 87 aa, Zea Mays
MIEMSCYGMKRIASVAGPQAIGLRLPLSTAHSSRNPSRPPRPRGASTRGDRRRLQFQSPPSVPHLTRSEAGGGRKEIASSRSRRPRG

SEQ ID NO: 192509 - protein, 85 aa, Zea Mays
MLLISFQHLFHLSCVYCLALHPTIDILLTGGRDSICRAQNICNLFFDKSSKICPTMWQPLIHAQNVPATGVLIPTLDQHASRNEA

SEQ ID NO: 192510 - protein, 76 aa, Zea Mays
MGTGNLSCNGVVTVAFSFSSTVQTFKRKGSDLDPRSYISGKQALQISNLLYINVVNQLPAFVSFELCLLPSSPSNN

SEQ ID NO: 192511 - protein, 397 aa, Zea Mays
MGHGVSCARTGDEHNYFRAAQVGDLDALDALLAADPSLARRATLYDRLSALHITAANGHLEVMSMILDHGVPPDAVNRHKQTPLMLAAMHGKIDCARKLLEAGANILMFDSLHGRTCLHHASYFGHVDCLRAILAAARTTPVADSWGFARFVNVRDDRGATPLHLAARQGRSACVQVLLENGAIVSALTGSYGFPGSTSLHLAARSGNLDCIRKLLAWGADRLQRDSAGRIPYAVALKRNHAACAALLNPSAAEPMVWPSPLKFISELDPEAKALLEAALMDANREREEKILKGITKYSQPSPTSPCEHDAIDEASLEASDGELCCICFEQACSIEVQDCGHQMCAACTLALCCHSKPNPATPPPPRPRSSSGGGRTTSDGRRRRRGQARARPVIGI

SEQ ID NO: 192512 - protein, 157 aa, Zea Mays
MHAQLAVEGSAVTGVYKPRPRASDHIYCPVGPSVPVPLLLSSLNSTMEESCDKRSEKQVVAAAKKKKLAKSGHGRRWSSSTDLQDIETATRTAAVDGGMKQQRQQAAREGQGEAVEQRRRCGGAGARLSRKIKEHRARFYIVRRCVAMLVCWRDADD

SEQ ID NO: 192513 - protein, 159 aa, Zea Mays
MGYWRSGRSSILAGPGSAHFLRKFVVGNQWNPTIHFSCGWSCRWGQENSLEFGTDKIEMHVGAVQANDRALVVDDLIATRVQLSNLSEMDDEALDQGDGGWIKEMEEVAATATTSRSIMPFRAIQKGKPLSVSLASRRSPPLSSRTPVHRLMIIRTRLQ

SEQ ID NO: 192514 - protein, 218 aa, Zea Mays
MAELTSTLQGQQTSELELRLLVETWLSNYERLFRIKATAANADVFYVMSGLWKTPAKRFFLWIGGFRPSDVLKDVALSRGGSPGVMTWGWVWELFSNLGVLGFGSASHFVFNEKKQTTNYSEGSSRPPLLGGSPPRNQPSQRQGDYSYLNRVFRDLFIQEGERTSGAAGPSMNKMEKAPGEAFGRRNPSGPMNQTDSYAQQPHETVSMSLKKIMHSID

SEQ ID NO: 192515 - protein, 174 aa, Zea Mays
MTIVIDKILEKGTVEYLIVHTAILDYFTIADKTSASDAICQLIPLLTQGALIIDGDEPTNAPELPKKAKAKKKRSKEPLIVRIMQTREGLKLGISCLKYGSAKVYLHKLLYFNFRSNTSFATIHWCFIQCCFSFVNFCGACISLQIELCTTPYQVHLYCSRGYCRWPWDVFLPP

SEQ ID NO: 192516 - protein, 282 aa, Zea Mays
MNKMEKAPGEAFGRRNPSGPMNQTDSYAQQPHETVSMSLKKITCVKWCSESERDAIFDVLQPHLLTLSCKKYAIFLVKKLIELASKKQFARFISSLHGRVANLLHHTIGAAFVDYAFQRGTQRQKRQLLVELYSPELQLFKDLTVQSSSCLIDTISKLGLQISSVLLHMTIVIDKILEKGTVEYLIVHTAILDYFTIADKTSASDAICQLIPLLTQGALIIDGDEPTNAPELPKKAKAKKKRSKEPLIVRIMQTREGLKLGISCLKYGSAKISFGRYTIGQA

SEQ ID NO: 192517 - protein, 172 aa, Zea Mays
MAELTSTLQGQQTSELELRLLVETWLSNYERLFRIKATAANADVFYVMSGLWKTPAKRFFLWIGGFRPSDVLKDVALSRGGSPGVMTWGWVWELFSNLGVLGFGSASHFVFNEKKQTTNYSEGSSRPPLLGGSPPRNQPSQRQGDYSYLNRVFRDLFIQEDTSSTMCLTGPF

SEQ ID NO: 192518 - protein, 152 aa, Zea Mays
MGYWRSGRSSILAGPGSAHFLRKFVVGNQWNPTIHFSCGWSCRWGQENSLEFGTDKIEMHVGAVQANDRALVVDDLIATRVQLSNLSEMDDEALDQGDGGWIKEMEEVAATATTSRSIMPFRAIQKGKPLSVSLASRRSPPLSSRTPDFETC

SEQ ID NO: 192519 - protein, 68 aa, Zea Mays
MILLPPVCSCQTYRRWTMKRWIKEMEVGSRRWRRWPPRPPLPGRLCPLGPSRRASRCRCPWHREEVHP

SEQ ID NO: 192520 - protein, 55 aa, Zea Mays
MKYYCVPSQHMISKCASKLTTTSTSLAPWSLCCSTSSTYPSGEVWGCQTPPVRLT

SEQ ID NO: 192521 - protein, 173 aa, Zea Mays
MALLVVRSHKGKVMGYTSPFFLLAFTTQFQLTRKIEGQLIFILSGGCNQNQDASACVTGFEIDYSHWVDEQKRHMAELTSTLQGQQTSELELRLLVETWLSNYERLFRIKATAANADVFYVMSGLWKTPAKRFFLWIGGFRPSDVLKDVSNLMHLLLLARFIPHKYKIKDSKA

SEQ ID NO: 192522 - protein, 320 aa, Zea Mays
MAELTSTLQGQQTSELELRLLVETWLSNYERLFRIKATAANADVFYVMSGLWKTPAKRFFLWIGGFRPSDVLKDVALSRGGSPGVMTWGWVWELFSNLGVLGFGSASHFVFNEKKQTTNYSEGSSRPPLLGGSPPRNQPSQRQGDYSYLNRVFRDLFIQEGERTSGAAGPSMNKMEKAPGEAFGRRNPSGPMNQTDSYAQQPHETVSMSLKKITCVKWCSESERDAIFDVLQPHLLTLSCKKYAIFLVKKLIELASKKQFARFISSLHGRVANLLHHTIGAAFVDYAFQRGTQRQKRQLLVELYSPELQLFKDLTVQSSS

SEQ ID NO: 192523 - protein, 246 aa, Zea Mays
MALLVVRSHKGKVMGYTSPFFLLAFTTQFQLTRKIEGQLIFILSGGCNQNQDASACVTGFEIDYSHWVDEQKRHMAELTSTLQGQQTSELELRLLVETWLSNYERLFRIKATAANADVFYVMSGLWKTPAKRFFLWIGGFRPSDVLKDVALSRGGSPGVMTWGWVWELFSNLGVLGFGSASHFVFNEKKQTTNYSEGSSRPPLLGGSPPRNQPSQRQGDYSYLNRVFRDLFIQEDTSSTMCLTGPF

SEQ ID NO: 192524 - protein, 453 aa, Zea Mays
MAELTSTLQGQQTSELELRLLVETWLSNYERLFRIKATAANADVFYVMSGLWKTPAKRFFLWIGGFRPSDVLKDVALSRGGSPGVMTWGWVWELFSNLGVLGFGSASHFVFNEKKQTTNYSEGSSRPPLLGGSPPRNQPSQRQGDYSYLNRVFRDLFIQEGERTSGAAGPSMNKMEKAPGEAFGRRNPSGPMNQTDSYAQQPHETVSMSLKKITCVKWCSESERDAIFDVLQPHLLTLSCKKYAIFLVKKLIELASKKQFARFISSLHGRVANLLHHTIGAAFVDYAFQRGTQRQKRQLLVELYSPELQLFKDLTVQSSSCLIDTISKLGLQISSVLLHMTIVIDKILEKGTVEYLIVHTAILDYFTIADKTSASDAICQLIPLLTQGALIIDGDEPTNAPELPKKAKAKKKRSKEPLIVRIMQTREGLKLGISCLKYGSAKISFGRYTIGQA

SEQ ID NO: 192525 - protein, 368 aa, Zea Mays
MTWGWVWELFSNLGVLGFGSASHFVFNEKKQTTNYSEGSSRPPLLGGSPPRNQPSQRQGDYSYLNRVFRDLFIQEGERTSGAAGPSMNKMEKAPGEAFGRRNPSGPMNQTDSYAQQPHETVSMSLKKITCVKWCSESERDAIFDVLQPHLLTLSCKKYAIFLVKKLIELASKKQFARFISSLHGRVANLLHHTIGAAFVDYAFQRGTQRQKRQLLVELYSPELQLFKDLTVQSSSCLIDTISKLGLQISSVLLHMTIVIDKILEKGTVEYLIVHTAILDYFTIADKTSASDAICQLIPLLTQGALIIDGDEPTNAPELPKKAKAKKKRSKEPLIVRIMQTREGLKLGISCLKYGSAKISFGRYTIGQA

SEQ ID NO: 192526 - protein, 179 aa, Zea Mays
MISIVDYAFQRGTQRQKRQLLVELYSPELQLFKDLTVQSSSCLIDTISKLGLQISSVLLHMTIVIDKILEKGTVEYLIVHTAILDYFTIADKTSASDAICQLIPLLTQGALIIDGDEPTNAPELPKKAKAKKKRSKEPLIVRIMQTREGLKLGISCLKYGSAKLWKIHDWPSLSMDENS

SEQ ID NO: 192527 - protein, 114 aa, Zea Mays
MTIVIDKILEKGTVEYLIVHTAILDYFTIADKTSASDAICQLIPLLTQGALIIDGDEPTNAPELPKKAKAKKKRSKEPLIVRIMQTREGLKLGISCLKYGSAKISFGRYTIGQA

SEQ ID NO: 192528 - protein, 174 aa, Zea Mays
MISIVDYAFQRGTQRQKRQLLVELYSPELQLFKDLTVQSSSCLIDTISKLGLQISSVLLHMTIVIDKILEKGTVEYLIVHTAILDYFTIADKTSASDAICQLIPLLTQGALIIDGDEPTNAPELPKKAKAKKKRSKEPLIVRIMQTREGLKLGISCLKYGSAKISFGRYTIGQA

SEQ ID NO: 192529 - protein, 98 aa, Zea Mays
MIAKIVVVCNDAIIGHSEHQYVATGMPTKAALKDNASTSAAVEAEARGWASVGAGQRDAKRASHSCCRPPPSSTIGSPAPSLDADSSRPSATVLSKRR

SEQ ID NO: 192530 - protein, 379 aa, Zea Mays
MVTEMAARGGEAAAFGAETDRGDFEVFRSGSAPPTVEGALGAAGADGGLLVDDDLRADPAYQSYYYSSAHLNPRLPPPLLSKEDWRSSHHRLRSAGFGGIGDGRRQQQQASAAEGTVGLPGIDLGRQRSFSTIFQAIEVVDLELQTKMVAELEGHVMRCVRDQNGNHVIQKCIECIPQHAIEFIISTFYGQVVMLSTHPYGCRVIQRVLEHCDDPKTQQIMMDEILQSVCLLAQDQYGNYVVQHVLEHGKPHERSAIIEKLIGQIVQMSQQKFASNVIEKCLVFGNPVERQVLIGEMLGSTSESEPLEVMMKDQFGNYVVQKVLETCDDQQREMILTRIKTHLNTLKKYTYGKHIVARVEKLVAAGEKRLGLQPACTAA

SEQ ID NO: 192531 - protein, 1046 aa, Zea Mays
MAGSFREGAGPGDTHAPPPPPTPPFLQFLALDALASWGSDPKQPHWRHPELRRALASNDQTDELRRIRASVQDSAVKAKEKVRSLHEAIQKLDKYKNIVTRKRQRATEASSSPDKLGAAGACSSSTGALRMGAQNNSAVLSKRVRSSLADARVEGRGSVPTRQGPLVSNEKNSPVEKEKNSTRISAIVSGLSDEKLRGLSTGSEGWEKKMKRRRSVGTMLSRGSDADRDVKSMGQHRPANEARPRSSDGLGYRHGVSAGALAGNKLDGTSQQNNIVSCILPKSDVDYVAQPNERRERHAGVEKERTTVKGNKVNTSDDMQNGSLSPLPKAKACRAPRTSSLAINSCSNFQRSTGGNDEWEEAPYPNKVSPLAGMTNRKRSTHSNASSPPIAWVGQRPQKMSRTRRANVVSPVSNFDEVLSEGSPLDTATRSAPIESGSVLLTKNTSTTKMDSIPSPAGLSESEGSAVAESKSKEKTMHSGEVGNEGANTAHNAMGLIFLSNKNRIPLKEELEDGGVRRQGRSGRGAMHVKGCSLMPKEKLVTAETRKPIKGGRPGSEKNESKLGRPPMKKGSDRKASSWHSQALNSDLTDITGEPEDDQEELLAAVNAARSAIVSAYSGPFWKKVEPMLTFMSSENFSFLKNQINLVEELEMSMSCMYDSEHDIIASVDHRIMSKMEEHSSQGLALSNFPPSSQQSKTNGVGAKGLIGCFSHGDKIHTGPQKLEADKWFNEMAPMAHRLLSALIMEDDLPDTNGVQSDILVEFPNSHNPYTVNGYMENELQASTITSNFGLSVDFVHSNSTSVVHQSMCNGFTSNFNNSNSENSVHSEDLSDGLNFTVYTESGPLHDLIPPIPQQCQNPGKNFPLSPYEYQYGQMSVEDKILIELQSIGICPETVPKLDDGEDDNINKMISELRKRLHDQVNQKKCRLHKLDKSIQDTKNIEERSLEQHAMNKLVERAYRKLKGGRIGSSHKAGVSKSANKAAKQLALAFAKRTLVRCHKFDETGKSCFSEPSLWSVLSAPLPSSDARFTEGVERLKHQKLDRTPF

SEQ ID NO: 192532 - protein, 946 aa, Zea Mays
MAGSFREGAGPGDTHAPPPPPTPPFLQFLALDALASWGSDPKQPHWRHPELRRALASNDQTDELRRIRASVQDSAVKAKEKVRSLHEAIQKLDKYKNIVTRKRQRATEASSSPDKLGAAGACSSSTGALRMGAQNNSAVLSKRVRSSLADARVEGRGSVPTRQGPLVSNEKNSPVEKEKNSTRISAIVSGLSDEKLRGLSTGSEGWEKKMKRRRSVGTMLSRGSDADRDVKSMGQHRPANEARPRSSDGLGYRHGVSAGALAGNKLDGTSQQNNIVSCILPKSDVDYVAQPNERRERHAGVEKERTTVKGNKVNTSDDMQNGSLSPLPKAKACRAPRTSSLAINSCSNFQRSTGGNDEWEEAPYPNKVSPLAGMTNRKRSTHSNASSPPIAWVGQRPQKMSRTRRANVVSPVSNFDEVLSEGSPLDTATRSAPIESGSVLLTKNTSTTKMDSIPSPAGLSESEGSAVAESKSKEKTMHSGEVGNEGANTAHNAMGLIFLSNKNRIPLKEELEDGGVRRQGRSGRGAMHVKGCSLMPKEKLVTAETRKPIKGGRPGSEKNESKLGRPPMKKGSDRKASSWHSQALNSDLTDITGEPEDDQEELLAAVNAARSAIVSAYSGPFWKKVEPMLTFMSSENFSFLKNQINLVEELEMSMSCMYDSEHDIIASVDHRIMSKMEEHSSQGLALSNFPPSSQQSKTNGVGAKGLIGCFSHGDKIHTGPQKLEADKWFNEMAPMAHRLLSALIMEDDLPDTNGVQSDILVEFPNSHNPYTVNGYMENELQASTITSNFGLSVDFVHSNSTSVVHQSMCNGFTSNFNNSNSENSVHSEDLSDGLNFTVYTESGPLHDLIPPIPQQCQNPGKNFPLSPYEYQYGQMSVEDKILIELQSIGICPETVPKLDDGEDDNINKMISELRKRLHDQVNQKKCRLHKLDKSIQDTKNIEERIT

SEQ ID NO: 192533 - protein, 188 aa, Zea Mays
MSCRRPSPSPAPLEPASSALISFPDAALSPSVLCWSASSPCPTFLAPWPPRLGSPAPLRRSAHLPAAALPWRVPASCFSSLCHLPWRPSPNAELPTRSRPRWLNSPSFLFYRSSSPIRRPHLKPVQPLYSPLSSIPLLLEHGELTPCASRVRHSLSSTSLHGCHVADLCSSYLSGKSQDLVEKKHSSI

SEQ ID NO: 192534 - protein, 487 aa, Zea Mays
MVRKKRTGPGESSGESSGAPGHGSSQRPQATQQGTRGGGQHQGRGGYLGPGVPPSQHPGGGPPEYHQPLDYQGRGGYQGRGGPPSQHPGGGTPPGSQPRGYQGHGGYQGRGGPPSQYPGGGTPPGSQPRDYHGRGGPRPRGGMPQSYRGGHVGGSVVPSVPSGPSRPVPELHQAPDVQHQAPVVATPSSPGAGSSSQPGKAEVSAGQVQQQFQQLAIRNQSLASQAGQMAPASSKSVRFPLRPGKGTHGSRCIVKANHFFAELPNKDLHQYDVSITPEVTSRGVNRAVMAELVKLYRHSHLDGRLPAYDGRKSLYTAGALPFASKTFEITLQDEEDSLGGGQRRQRVFRVTIKFAARADLHHLAMFLAGRQPDAPQEALQVLDIVLREMPTAKYCPVGRSFYSPKLGRPQQLGEDMSSTAFFEALPVIDFVSQLLNRDISVRPLSDSDRVKIKKALRGVKVEVTHRGNMRRKYRISGLTPQATRELS

SEQ ID NO: 192535 - protein, 510 aa, Zea Mays
MVRKKRTGPGESSGESSGAPGHGSSQRPQATQQGTRGGGQHQGRGGYLGPGVPPSQHPGGGPPEYHQPLDYQGRGGYQGRGGPPSQHPGGGTPPGSQPRGYQGHGGYQGRGGPPSQYPGGGTPPGSQPRDYHGRGGPRPRGGMPQSYRGGHVGGSVVPSVPSGPSRPVPELHQAPDVQHQAPVVATPSSPGAGSSSQPGKAEVSAGQVQQQFQQLAIRNQSLASQAGQMAPASSKSVRFPLRPGKGTHGSRCIVKANHFFAELPNKDLHQYDVSITPEVTSRGVNRAVMAELVKLYRHSHLDGRLPAYDGRKSLYTAGALPFASKTFEITLQDEEDSLGGGQRRQRVFRVTIKFAARADLHHLAMFLAGRQPDAPQEALQVLDIVLREMPTAKYCPVGRSFYSPKLGRPQQLGEGLETWRGFYQSIRPTQMGLSLNIDMSSTAFFEALPVIDFVSQLLNRDISVRPLSDSDRVKIKKALRGVKVEVTHRGNMRRKYRISGLTPQATRELS

SEQ ID NO: 192536 - protein, 413 aa, Zea Mays
MVRKKRTGPGESSGESSGAPGHGSSQRPQATQQGTRGGGQHQGRGGYLGPGVPPSQHPGGGPPEYHQPLDYQGRGGYQGRGGPPSQHPGGGTPPGSQPRGYQGHGGYQGRGGPPSQYPGGGTPPGSQPRDYHGRGGPRPRGGMPQSYRGGHVGGSVVPSVPSGPSRPVPELHQAPDVQHQAPVVATPSSPGAGSSSQPGKAEVSAGQVQQQFQQLAIRNQSLASQAGQMAPASSKSVRFPLRPGKGTHGSRCIVKANHFFAELPNKDLHQYDVSITPEVTSRGVNRAVMAELVKLYRHSHLDGRLPAYDGRKSLYTAGALPFASKTFEITLQDEEDSLGGGQRRQRVFRVTIKFAARADLHHLAMFLAGRQPDAPQEALQVLDIVLLEVTHRGNMRRKYRISGLTPQATRELS

SEQ ID NO: 192537 - protein, 347 aa, Zea Mays
MVRKKRTGPGESSGESSGAPGHGSSQRPQATQQGTRGGGQHQGRGGYLGPGVPPSQHPGGGPPEYHQPLDYQGRGGYQGRGGPPSQHPGGGTPPGSQPRGYQGHGGYQGRGGPPSQYPGGGTPPGSQPRDYHGRGGPRPRGGMPQSYRGGHVGGSVVPSVPSGPSRPVPELHQAPDVQHQAPVVATPSSPGAGSSSQPGKAEVSAGQVQQQFQQLAIRNQSLASQAGQMAPASSKSVRFPLRPGKGTHGSRCIVKANHFFAELPNKDLHQYDVSITPEVTSRGVNRAVMAELVKLYRHSHLDGRLPAYDGRKSLYTAGALPFASKTFEITLQDEEDSLGGGQRGYFG

SEQ ID NO: 192538 - protein, 551 aa, Zea Mays
MEVCKIVEGQRYSKRLNDKQITALLKVTCQRPQAREKDILETVYHNAYSKDPYAQEFGITIDERLASVEARVLPPPRLKYHDSGRERDVLPKIGQWNMMNKKMVNGGRVSSWACINFSRNVQDGAAGSFCHELALMCQVSGMDFVLEPVLSPCYARPELVERALKGRYQDAMNILGPQGRELDLLIVILPDNNGSLYGDVKRICETNLGLVSQCCLTKHVFKVNKQQYLANVALKINVKVGGRNTVLVDALARRIPLVSDIATIIFGADVTHPHPGEDSSPSIAAVVASQDWPEVTKYAGLVSAQAHRQELIQDLFKVWQDPERGTVSGGMIRELLISFWRATGQKPKRIIFYRDGVSEGQFYQVLLYELDAIRKACASLESDYQPPVTFVVVQKRHHTRLFANNHNDNRAVDKSGNILPGTVVDSKICHPTEFDFYLCSHAGIQGTSRPAHYHVLWDENNFTADGLQTLTNNLCYTCTRSVSIVPPAYYAHLAAFRARFYMEPDTSDSGSMASRGPPPGGRNTKAAGVGNVAVRPLPALKENVKRVMFYC

SEQ ID NO: 192539 - protein, 455 aa, Zea Mays
MEVCKIVEGQRYSKRLNDKQITALLKVTCQRPQAREKDILETVYHNAYSKDPYAQEFGITIDERLASVEARVLPPPRLKYHDSGRERDVLPKIGQWNMMNKKMVNGGRVSSWACINFSRNVQDGAAGSFCHELALMCQVSGMDFVLEPVLSPCYARPELVERALKGRYQDAMNILGPQGRELDLLIVILPDNNGSLYGDVKRICETNLGLVSQCCLTKHVFKVNKQQYLANVALKINVKVGGRNTVLVDALARRIPLVSDIATIIFGADVTHPHPGEDSSPSIAAVVASQDWPEVTKYAGLVSAQAHRQELIQDLFKVWQDPERGTVSGGMIRELLISFWRATGQKPKRIIFYRDGVSEGQFYQVLLYELDAIRKACASLESDYQPPVTFVVVQKRHHTRLFANNHNDNRAVDKSGNILPGTVVDSKICHPTEFDFYLCSHAGIQPPCPLPCSVG

SEQ ID NO: 192540 - protein, 515 aa, Zea Mays
MEVCKIVEGQRYSKRLNDKQITALLKVTCQRPQAREKDILETVYHNAYSKDPYAQEFGITIDERLASVEARVLPPPRLKYHDSGRERDVLPKIGQWNMMNKKMVNGGRVSSWACINFSRNVQDGAAGSFCHELALMCQVSGMDFVLEPVLSPCYARPELVERALKGRYQDAMNILGPQGRELDLLIVILPDNNGSLYGDVKRICETNLGLVSQCCLTKHVFKVNKQQYLANVALKINVKVGGRNTVLVDALARRIPLVSDIATIIFGADVTHPHPGEDSSPSIAAVVASQDWPEVTKYAGLVSAQAHRQELIQDLFKVWQDPERGTVSGGMIRELLISFWRATGQKPKRIIFYRPVRHWSLTTSLQLLLSWSRSVITPGCLLIITMIIVLSIKAGTYCLAPWWTRRSAIQLSLISTCAAMLAFREQAALPITMFCGMRTTLRLMGCKLSPTTCVTRMLGAHAQYRLFLLHTMLTWQPSELGSTWSQIRVTVDLWQAVALHQGGATPRLLVLGMLL

SEQ ID NO: 192541 - protein, 457 aa, Zea Mays
MMNKKMVNGGRVSSWACINFSRNVQDGAAGSFCHELALMCQVSGMDFVLEPVLSPCYARPELVERALKGRYQDAMNILGPQGRELDLLIVILPDNNGSLYGDVKRICETNLGLVSQCCLTKHVFKVNKQQYLANVALKINVKVGGRNTVLVDALARRIPLVSDIATIIFGADVTHPHPGEDSSPSIAAVVASQDWPEVTKYAGLVSAQAHRQELIQDLFKVWQDPERGTVSGGMIRELLISFWRATGQKPKRIIFYRDGVSEGQFYQVLLYELDAIRKACASLESDYQPPVTFVVVQKRHHTRLFANNHNDNRAVDKSGNILPGTVVDSKICHPTEFDFYLCSHAGIQGTSRPAHYHVLWDENNFTADGLQTLTNNLCYTYARCTRSVSIVPPAYYAHLAAFRARFYMEPDTSDSGSMASRGPPPGGRNTKAAGVGNVAVRPLPALKENVKRVMFYC

SEQ ID NO: 192542 - protein, 634 aa, Zea Mays
MGSVGVEADDDGSIVKEFLQRCEPSGDAAYGELRALLARLHDPATRRDARLFLAALHRHQQRSSSAAGGLTHEQFFRRFGFRMQELLLQDTATDITASSFIATKPAAAAGFQQMKKLTMMEIPSIFIPEDWSFTFYEGLNRHPDSIFRDKTVAELGCGNGWISIALAEKWCPSKVYGLDINPRAVKIAWINLYLNALDDDGLPIYDGEGKTLLDRVEFYESDLLSYCRDNKIELDRIVGCIPQILNPNPEAMSKIVTENSSEEFLYALSNYCALQGFVEDQFGLGLIARAVEEGISVIKPSGIMVFNMGGRPGQGVCERLFRRRGFRITKLWQTKIMQAADTDISALVEIEKNSRHRFEFFMDLVGDQPICARTAWAYMKSGGHISHALSVYSCQLRQPNQVKKIFEFLKDGFHEVSSSLDLSFDDDSVAEEKIPFLAYLASFLKENKSNPCEPPAGCLNFRKLVAGFMKSYHHIPLTPDNVVVFPSRSVAIENALQLFSPALAIVDEHLTRHLPKQWLTSLAIEGRADCNHADGTVTVIEAPRQSDLLIELIRKLQPQVVVTGMAQFEAITSAAFENLLNVTKDVGSRLFLDISEHLELSSLPSSNGVLKYLAGKTLPSHAAILCGLVKNQVL

SEQ ID NO: 192543 - protein, 648 aa, Zea Mays
MKSYHHIPLTPDNVVVFPSRSVAIENALQLFSPALAIVDEHLTRHLPKQWLTSLAIEGRADCNHADGTVTVIEAPRQSDLLIELIRKLQPQVVVTGMAQFEAITSAAFENLLNVTKDVGSRLFLDISEHLELSSLPSSNGVLKYLAGKTLPSHAAILCGLVKNQVYSDLEVAFAISEDAAVYKALSQTIELLEGHTSLISQHYYGCLFHELLAFQIADRHPQQERQPAEVIPQQMIGFSDPAVSTLKATEFFVPGSAESSIIHMDLDRSFLPVPSAVNASVFESFVRQNITDSETDVRSSIQQLVKDSYGLSAAGCAEIIYGNTSVALFNKLVLCCMQEQGTLLFPLGTNGHYVSAAKFVNASTVTIPTNPSSGFRIEPKVLADTLKNVSRPWVYVCGPTINPTGFLYSDSDIRELLSVCAEYGARVVIDTSFSGLEYETDGWRQWNLAGCLSSLKRSEPSFSVVLLGELSFALTAGGHDFGFVILGDSSLAETFHSFSSLSRPHTTLKYTFKKLLGLKNQKDQHFSDLIVEQKEELKNRANQLIQTLESCGWEAAIGCGGISMLAKPTAYMGKAFKAAGFDGELDASNIREAILRATGLCINSSSWTGIPGYCRFSFALERGEFERAMGCIARFKELVLGGAQMNGA

SEQ ID NO: 192544 - protein, 755 aa, Zea Mays
MDLVGDQPICARTAWAYMKSGGHISHALSVYSCQLRQPNQVKKIFEFLKDGFHEVSSSLDLSFDDDSVAEEKIPFLAYLASFLKENKSNPCEPPAGCLNFRKLVAGFMKSYHHIPLTPDNVVVFPSRSVAIENALQLFSPALAIVDEHLTRHLPKQWLTSLAIEGRADCNHADGTVTVIEAPRQSDLLIELIRKLQPQVVVTGMAQFEAITSAAFENLLNVTKDVGSRLFLDISEHLELSSLPSSNGVLKYLAGKTLPSHAAILCGLVKNQVYSDLEVAFAISEDAAVYKALSQTIELLEGHTSLISQHYYGCLFHELLAFQIADRHPQQERQPAEVIPQQMIGFSDPAVSTLKATEFFVPGSAESSIIHMDLDRSFLPVPSAVNASVFESFVRQNITDSETDVRSSIQQLVKDSYGLSAAGCAEIIYGNTSVALFNKLVLCCMQEQGTLLFPLGTNGHYVSAAKFVNASTVTIPTNPSSGFRIEPKVLADTLKNVSRPWVYVCGPTINPTGFLYSDSDIRELLSVCAEYGARVVIDTSFSGLEYETDGWRQWNLAGCLSSLKRSEPSFSVVLLGELSFALTAGGHDFGFVILGDSSLAETFHSFSSLSRPHTTLKYTFKKLLGLKNQKDQHFSDLIVEQKEELKNRANQLIQTLESCGWEAAIGCGGISMLAKPTAYMGKAFKAAGFDGELDASNIREAILRATGLCINSSSWTGIPGYCRFSFALERGEFERAMGCIARFKELVLGGAQMNGA

SEQ ID NO: 192545 - protein, 278 aa, Zea Mays
MATPPALLFPSPSSASSPPSSAQVEAVVLFNVCDSYVRRPDQADRVIGTLLGSLLPDGTVHVRNSYVVPHSESADQVAIDIDYHHNMYASHQKVNPKEVIVGWFSTGFGVSGGSTLIHEFYSREVQSPIHLTVDTGFTRGEASIKAYVSSNLSLGDRQLAAQFQEIPLDLRMIGAEKAGFEILKSTMVEKLPNDLEGMESSMEKLYILIDEIYKYVDDVVDAWHLITESEGWSLNLLLQCRNCPQLLSISFSMTRFRITLRWYTCQASQGHKSASPRS

SEQ ID NO: 192546 - protein, 192 aa, Zea Mays
MLPIYLCRFSTGFGVSGGSTLIHEFYSREVQSPIHLTVDTGFTRGEASIKAYVSSNLSLGDRQLAAQFQEIPLDLRMIGAEKAGFEILKSTMVEKLPNDLEGMESSMEKLYILIDEIYKYVDDVVEGRVAPDNRIGRLVSESVASMPKLSPAAFDKLFNDKIQDNLALVYLSSITRTQISIAEKLNTAAQAL

SEQ ID NO: 192547 - protein, 166 aa, Zea Mays
MKTVGQHSYVGNPVALVLDLAEGTPLPSREDLLSTFSRFGFVIDSETSITQDKNKHTARVVFATRAQAESALSCAATLGGAFAAPSVQDLPPITPLPKLPLTDIRNNLGKMILSLSSKAKSPQEANAKPAVDSLSLVGEMQHLLAKVDKVLQAQRASATDHHAIHH

SEQ ID NO: 192548 - protein, 66 aa, Zea Mays
MSSLWLFSIFFLVYGGDGSAIAKESKDKLGSPPNHTWGHGLTVSSCAELLISATLCDDLVFCTSLM

SEQ ID NO: 192549 - protein, 282 aa, Zea Mays
MVVPVPPPPLLASHVAVRAAASAISHGRRVLLNGDHPPQVAALGRGDWVKLICGASFEDAADVRNLSLVYTLAGVDCIDCAADASVVGAVNEGIEVAASIVPTVQRPWLMISVNDDCRDLHFRKAEFDPDDCPLDCSKPCEKVCPADAISLKHSMVDGERTLSDPLRGKYEGGVITERCYGCGRCLPVCPYDRIRAVSYVRDPTMTAELLKRDDVDAIEIHTTGKGTDMFNTLWDNLSGSINNVKLVAVGSTIGLLLYPHICIAGNVASDFLLKKKLPFHHY

SEQ ID NO: 192550 - protein, 199 aa, Zea Mays
MVVPVPPPPLLASHVAVRAAASAISHGRRVLLNGDHPPQVAALGRGDWVKLICGASFEDAADVRNLSLVYTLAGVDCIDCAADASVVGAVNEGIEVAASIVPTVQRPWLMISVNDDCRDLHFRKAEFDPDDCPLDCSKPCEKVCPADAISLKHSMVDGERTLSDPLRGKYEGGVITERCYGCGRCLPVCPYDRITASFA

SEQ ID NO: 192551 - protein, 222 aa, Zea Mays
MTAELLKRDDVDAIEIHTTGKGTDMFNTLWDNLSGSINNVKLVAVSLPDIGESTVDLMNTIYTIMEPHFKGYNLWQLDGRPMSGDIGRGATRETVSFAAHVASMSERPPGFYQLAGGTNSYTVDYLKKAGLFQSSNWNSGTATSEMASSHQALIGGIAYGGYARKIVGRVLRKIPEQFGRVHIEDHPDHLLEALQEAMSLVGPVKGYIPSHSKPFMKQVDRQ

SEQ ID NO: 192552 - protein, 192 aa, Zea Mays
MVVPVPPPPLLASHVAVRAAASAISHGRRVLLNGDHPPQVAALGRGDWVKLICGASFEDAADVRNLSLVYTLAGDASVVGAVNEGIEVAASIVPTVQRPWLMISVNDDCRDLHFRKAEFDPDDCPLDCSKPCEKVCPADAISLKHSMVDGERTLSDPLRGKYEGGVITERCYGCGRCLPVCPYDRIKAASFA

SEQ ID NO: 192553 - protein, 254 aa, Zea Mays
MVVPVPPPPLLASHVAVRAAASAISHGRRVLLNGDHPPQVAALGRGDWVKLICGASFEDAADVRNLSLVYTLAGVDCIDCAADASVVGAVNEGIEVAASIVPTVQRPWLMISVNDDCRDLHFRKAEFDPDDCPLDCSKPCEKVCPADAISLKHSMVDGERTLSDPLRGKYEGGVITERCYGCGRCLPVCPYDRIRAVSYVRDPTMTAELLKRDDVDAIEIHTTGKGTDMFNTLWDNLSGSINNVKLVAVGSTIG

SEQ ID NO: 192554 - protein, 193 aa, Zea Mays
MVVPVPPPPLLASHVAVRAAASAISHGRRVLLNGDHPPQVAALGRGDWVKLICGASFEDAADVRNLSLVYTLAGADASVVGAVNEGIEVAASIVPTVQRPWLMISVNDDCRDLHFRKAEFDPDDCPLDCSKPCEKVCPADAISLKHSMVDGERTLSDPLRGKYEGGVITERCYGCGRCLPVCPYDRIKAASFA

SEQ ID NO: 192555 - protein, 408 aa, Zea Mays
MSDGKDSLDLSALGAAIPNSAELSAEDKANLVASIKNTLEGLASRHTDVLESLEPKVRKRVEKLREIQGEHDELEAKFFEERAALEAKYQKLYEPLYSKRYEIVNGVVEVEGITVESAAETPAEQKTGDETSADQKEEKGVPAFWLNAMKNHEILAEEIQERDEEALKYLKNITWYRISEPKGFKLEFQFGTNPFFKNSVLTKTYHMIDEDEPILEKAIGTEIEWYPGKCLTQKVLKKKPRKGSKNTKPITKTEDCESFFNFFSPPQVPDDDEEIDEDIAEQLQNEMEQDYDIGSTIRDKIIPHAVSWFTGEAAQDEEFEVMDGEDDDDEDNDDEDEDDEDDDDDDDYDSKPTFQGPLRKEQTAPGLQGCLHFSIEASGSYRVVSTSLLRRLGPVPASTPFSCTCINI

SEQ ID NO: 192556 - protein, 266 aa, Zea Mays
MAAAAICVEDEAACAAAECAGIGNLDLAAAGAGAGGKRSVYLMDCAPVWGCASTRGRSTEMEDACAAAPRFADVPVRLLASRRDLDRLGLDADTLRLPAHLFGVFDGHGGAEVASYCRERLQVLLRQELRLLSKDLGETSEADMKEHWDELFTRCFQRLDDEVSGQASRLVGGVQETRPVAAENVGSTAVVAVVCSSHVVVANCGDSRVVLCRGKEPLELSIDHKPDRKDERARIEALGGKVIQWNGYRVSGILAMSRSIGFGKKR

SEQ ID NO: 192557 - protein, 81 aa, Zea Mays
MRQRTQMVTKEEIVTLSCLLSADGDLMLCMSQQLKIELINSITLHGTHVVCNWFSTNWFRYDCAYVFDLKHRLCGKESGLC

SEQ ID NO: 192558 - protein, 543 aa, Zea Mays
MGKSPAKWIKSVLFGKKSSSRSGSTKAKDLSKGASNKGAAAAGKEPVFSESSPVISEPVLVSAHNNETVREVAKGENSSVQEVPVTDVSQDLEKQGSVGSDTSNDAERVKEERAAVKAQAAFRGYLARRAFRALKGIIRLQALIRGHLVRRQAVSTLRATWLIVKFQALVRGRNLRLSEASIQATMELSQQNLAGAKPGSWKEKLSSNAFARKLLSSSIVVEALHFQYDEMDPNSAFNWLERWTISHVWKPASQPRRVSADAKPHTRKASYAMETESVKLKRNARRSSAGPFEPSQTNTAIEIEKTRRNPRKLSSTPAESVPDGQLTELEKVKRSLRKVTNSVAETSKASSPKTEIPNHQEVQCERPLRRAKQVPIHLENQEPDNVNLSDNAKMDILVPDIQPDVEVASDPVTITNEENVDEPPSVVAPVAEIMPLQDINNDENALVNDVEERSKEEHPSTESLKGSKRRSSFSAKPEYPENGSKNSPALPSYMAATQSAKAKLRGNSSPKLSSDSAEKNGFTRRHSLPSSNNERPLKAEWRR

SEQ ID NO: 192559 - protein, 2368 aa, Zea Mays
MGERDALPPLPLALGPPHLIPPAPTRDPRAIAFLPDLVGFHWVAYAAGSFLVVSHLPSPCRDDNNNDSCSPFFRQVIDLRAPVSAVAWCRRGSGEVAAATDNSIHIFQPAPASSPGSFGWLLRWSITETFAIVAVSWTGCGNGIVAVGAGVSMWARLESSWQLAWRSTPQVPQALVSTTCSMQGPVATVAALAPAEGSVPVLVFLNDARRGLEQAELVHPQPVCMIQWRSCSLYPHDLSEIRREILMTCCFDGTVRLWSKDEVSRSKKQRGLLISFSVIAVIEVNNTLNGVLGVDIIVRWSMESGSVVSRDEQGRFKLFSGDLRESQVGKCEWLVSLGPGPCISFWAIHCLDDVFPPRYPRITLWKQSKLQGWGDSYVKSGPLKSMEQSIFVEAVISRRLCSGPPATCFLLHLLVDDSFAWSTVSTKLLADSGNHALSDSAKNILCCLTKPVKQDGHKGSIRQVSVHPYSCEIELAVSMDSNRMIFFWSLSTFSTLIPTMHAPMYPLWKLLCKFDLRNISEDFEYSCLCWAPSVTRDNRFLVLGWESGVDCFVVRIQKEEVLSCQKIFTIPFLAESNTEGPPDSIHTIPLASKCSSSLSTTNQGAHACFSNEMFSAVVYEGSSVFPSGLEGEYTTCISVMPLNNTVLPIQQHDPYRTVPGYHIATGCSDGTVKLWKMTCAEDSLQTKKERHIWELVGMFGAHQGPIDIVSLSGCGRVITVGRNLKKNSTSIHIWEATKIRGDGNFLLGDTLMLQDHIVGLDGLSLGDGRFLLAVYLANELRIYSHKHPSFQNVLHTKNSKEEHLWSCIVLSHSHHDIVGFLWGPKATVVLVHENHLSLFSSWLVTGDNEYMTQIHSCPVVHEMLPCTNNFNEATFGKLKLPENFNSGNIDSNNVLLTDQHSHYSHGLWSLLHIAHRLSGPLASYHPRALIQYLYSGEWKRADAALHHLVRSMKVSETSKGVSNYSTCHSIPELPLSEYFAATVSNNISTKGFMWDIVELLDKSFSKYGISDSEKNQILAISDLMAGITDQSHSSPYKNLDEAGRRFWVAVQFEQFHALRRSADSSSNEGCRVDSASIAWAFQSDCQDDLLNSVLPAEPTWPEMRKLGIGLWYTNVSQLRTRMEKLARLQYLKSKDPKDCALLYIALNRIKVLVGLFKISRDEKDKRLYEFLSRNFQEERHKAAALKNAYVLMGRHQWELAIAFFLLGDDTSSAVNVCAKNLQDEQLAIVICRLIEGSGGPLERNLISNVLLPDAVERGDNWLSSLLEWMLGNYCQSVNRIFGCHPKLLIDQNVLADPELGHYCAILSAKSSFRNSVGEAVSAKLSKLSFAVAACALNKCGLPLEALECLSTNSSIDGKDSIIAHGDGDHKIFYGILSPVSASKNWLSSSVISGIESNLKLTMASKYLSSLLRKHSLCSQLNAPLSEEKVLNEYNNHQIEKLTCDITTVISIFDKRFSLKFADIAEKILIFCSHDGLLFLAYVLLWGTRSPDVATDNYILECHPLCPIDYLLLFSFKESCKFFSRYVVLSSMCSVLNMEDTNSTAWALKERHKYIVISLSNYLNVSRLLLKHDKSGNYILDDRSAMLAVMDLFEYIIEFSFSWLYYDIKSLLIMINPVLATSVNGDSFQVLLDQLMHAICHKNHDISSSTGGMPHAALSKTQLKKSVNSNLLADEKWHLIGASVWVRLISVLEHRLREFFEKEGLEHEAGVSGSEFRGLITSVAAKFVMDSIHFVSSSLVPLHASFLRKNLPMNSSSSLLFWLESKLPQQLPVSDSYDHLSRISQLSNSENMEALFNILWEISVNPVDVCNAFVSEGVNCFSLSNTNVTRSWKDIRCPVVECDKIITERSGEEHEHRLGSKRLGQGFAEKASYNGEVLYETKRRELIIQKEFQSPREILRRSGELLEAVCLNSVNEKQAAIATNRKGLVFFNWSDKQHNKSFSEYVWSGSDWPLDGWAGCQSTPTPTSISPGVDLGRKKGSQLGSVGATTGLSSLAKPGRDLTGGGAFGIPGYAGIGASGFGWGEPEEFEDFIDPPATLENIHSRALSRHPSLPLFLVGSSNTHVYLWEFGKASAMATYGVLPAANIPPPYALASISSVQFDCYGQRFATAALDGTICTWQVEVGGRSNVYPTESSICFDSHASDVAYVSASRSVIASAGYSSNGSNVVIWDTLSPPATSQTSIMCHEGGARSISVFDSDRGYGSISPLVVTGGKNGDIALHDCRFLSTGKSKHHRVTTEHGVEASSMHDIKSSTFGGTDSGMVWHIPKAHLGSVTKVTTIPNTSLFLTGSKDGDVKLWDAKNSQLVFHWTKMHERHTFFQPTSRGFGGVVRAAVTDLQVLPNGFVSCGGDGSVKLVQIKDDLAAAYQR

SEQ ID NO: 192560 - protein, 1180 aa, Zea Mays
MRKLGIGLWYTNVSQLRTRMEKLARLQYLKSKDPKDCALLYIALNRIKVLVGLFKISRDEKDKRLYEFLSRNFQEERHKAAALKNAYVLMGRHQWELAIAFFLLGDDTSSAVNVCAKNLQDEQLAIVICRLIEGSGGPLERNLISNVLLPDAVERGDNWLSSLLEWMLGNYCQSVNRIFGCHPKLLIDQNVLADPELGHYCAILSAKSSFRNSVGEAVSAKLSKLSFAVAACALNKCGLPLEALECLSTNSSIDGKDSIIAHGDGDHKIFYGILSPVSASKNWLSSSVISGIESNLKLTMASKYLSSLLRKHSLCSQLNAPLSEEKVLNEYNNHQIEKLTCDITTVISIFDKRFSLKFADIAEKILIFCSHDGLLFLALLLKHDKSGNYILDDRSAMLAVMDLFEYIIEFSFSWLYYDIKSLLIMINPVLATSVNGDSFQVLLDQLMHAICHKNHDISSSTGGMPHAALSKTQLKKSVNSNLLADEKWHLIGASVWVRLISVLEHRLREFFEKEGLEHEAGVSGSEFRGLITSVAAKFVMDSIHFVSSSLVPLHASFLRKNLPMNSSSSLLFWLESKLPQQLPVSDSYDHLSRISQLSNSENMEALFNILWEISVNPVDVCNAFVSEGVNCFSLSNTNVTRSWKDIRCPVVECDKIITERSGEEHEHRLGSKRLGQGFAEKASYNGEVLYETKRRELIIQKEFQSPREILRRSGELLEAVCLNSVNEKQAAIATNRKGLVFFNWSDKQHNKSFSEYVWSGSDWPLDGWAGCQSTPTPTSISPGVDLGRKKGSQLGSVGATTGLSSLAKPGRDLTGGGAFGIPGYAGIGASGFGWGEPEEFEDFIDPPATLENIHSRALSRHPSLPLFLVGSSNTHVYLWEFGKASAMATYGVLPAANIPPPYALASISSVQFDCYGQRFATAALDGTICTWQVEVGGRSNVYPTESSICFDSHASDVAYVSASRSVIASAGYSSNGSNVVIWDTLSPPATSQTSIMCHEGGARSISVFDSDRGYGSISPLVVTGGKNGDIALHDCRFLSTGKSKHHRVTTEHGVEASSMHDIKSSTFGGTDSGMVWHIPKAHLGSVTKVTTIPNTSLFLTGSKDGDVKLWDAKNSQLVFHWTKMHERHTFFQPTSRGFGGVVRAAVTDLQVLPNGFVSCGGDGSVKLVQIKDDLAAAYQR

SEQ ID NO: 192561 - protein, 2430 aa, Zea Mays
MGERDALPPLPLALGPPHLIPPAPTRDPRAIAFLPDLVGFHWVAYAAGSFLVVSHLPSPCRDDNNNDSCSPFFRQVIDLRAPVSAVAWCRRGSGEVAAATDNSIHIFQPAPASSPGSFGWLLRWSITETFAIVAVSWTGCGNGIVAVGAGVSMWARLESSWQLAWRSTPQVPQALVSTTCSMQGPVATVAALAPAEGSVPVLVFLNDARRGLEQAELVHPQPVCMIQWRSCSLYPHDLSEIRREILMTCCFDGTVRLWSKDEVSRSKKQRGLLISFSVIAVIEVNNTLNGVLGVDIIVRWSMESGSVVSRDEQGRFKLFSGDLRESQVGKCEWLVSLGPGPCISFWAIHCLDDVFPPRYPRITLWKQSKLQGWGDSYVKSGPLKSMEQSIFVEAVISRRLCSGPPATCFLLHLLVDDSFAWSTVSTKLLADSGNHALSDSAKNILCCLTKPVKQDGHKGSIRQVSVHPYSCEIELAVSMDSNRMIFFWSLSTFSTLIPTMHAPMYPLWKLLCKFDLRNISEDFEYSCLCWAPSVTRDNRFLVLGWESGVDCFVVRIQKEEVLSCQKIFTIPFLAESNTEGPPDSIHTIPLASKCSSSLSTTNQGAHACFSNEMFSAVVYEGSSVFPSGLEGEYTTCISVMPLNNTVLPIQQHDPYRTVPGYHIATGCSDGTVKLWKMTCAEDSLQTKKERHIWELVGMFGAHQGPIDIVSLSGCGRVITVGRNLKKNSTSIHIWEATKIRGDGNFLLGDTLMLQDHIVGLDGLSLGDGRFLLAVYLANELRIYSHKHPSFQNVLHTKNSKEEHLWSCIVLSHSHHDIVGFLWGPKATVVLVHENHLSLFSSWLVTGDNEYMTQIHSCPVVHEMLPCTNNFNEATFGKLKLPENFNSGNIDSNNVLLTDQHSHYSHGLWSLLHIAHRLSGPLASYHPRALIQYLYSGEWKRADAALHHLVRSMKVSETSKGVSNYSTCHSIPELPLSEYFAATVSNNISTKGFMWGENRSNTTFNLLSPSTSFLYEDGNLGINTTTSASEKPDIVELLDKSFSKYGISDSEKNQILAISDLMAGITDQSHSSPYKNLDEAGRRFWVAVQFEQFHALRRSADSSSNEGCRVDSASIAWAFQSDCQDDLLNSVLPAEPTWPEMRKLGIGLWYTNVSQLRTRMEKLARLQYLKSKDPKDCALLYIALNRIKVLVGLFKISRDEKDKRLYEFLSRNFQEERHKAAALKNAYVLMGRHQWELAIAFFLLGDDTSSAVNVCAKNLQDEQLAIVICRLIEGSGGPLERNLISNVLLPDAVERGDNWLSSLLEWMLGNYCQSVNRIFGCHPKLLIDQNVLADPELGHYCAILSAKSSFRNSVGEAVSAKLSKLSFAVAACALNKCGLPLEALECLSTNSSIDGKDSIIAHGDGDHKIFYGILSPVSASKNWLSSSVISGIESNLKLTMASKYLSSLLRKHSLCSQLNAPLSEEKVLNEYNNHQIEKLTCDITTVISIFDKRFSLKFADIAEKILIFCSHDGLLFLAYVLLWGTRSPDVATDNYILECHPLCPIDYLLLFSFKESCKFFSRYVVLSSMCSVLNMEDTNSTAWALKERHKYIVISLSNYLNVSRLLLKHDKSGNYILDDRSAMLAVMDLFEYIIEFSFSWLYYDIKSLLIMINPVLATSVNGDSFQVLLDQLMHAICHKNHDISSSTGGMPHAALSKTQLKKSVNSNLLADEKWHLIGASVWVRLISVLEHRLREFFEKEGLEHEAGVSGSEFRGLITSVAAKFVMDSIHFVSSSLVPLHASFLRKNLPMNSSSSLLFWLESKLPQQLPVSDSYDHLSRISQLSNSENMEALFNILWEISVNPVDVCNAFVSEGVNCFSLSNTNVTRSWKDIRCPVVECDKIITERSGEEHEHRLGSKRLGQGFAEKASYNGEVLYETKRRELIIQKEFQSPREILRRSGELLEAVCLNSVNEKQAAIATNRKFCWPNLISRAVFVHTVYHLRAASLQGLVFFNWSDKQHNKSFSEYVWSGSDWPLDGWAGCQSTPTPTSISPGVDLGRKKGSQLGSVGATTGLSSLAKPGRDLTGGGAFGIPGYAGIGASGFGWGEPEEFEDFIDPPATLENIHSRALSRHPSLPLFLVGSSNTHVYLWEFGKASAMATYGVLPAANIPPPYALASISSVQFDCYGQRFATAALDGTICTWQVEVGGRSNVYPTESSICFDSHASDVAYVSASRSVIASAGYSSNGSNVVIWDTLSPPATSQTSIMCHEGGARSISVFDSDRGYGSISPLVVTGGKNGDIALHDCRFLSTGKSKHHRVTTEHGVEASSMHDIKSSTFGGTDSGMVWHIPKAHLGSVTKVTTIPNTSLFLTGSKDGDVKLWDAKNSQLVFHWTKMHERHTFFQPTSRGFGGVVRAAVTDLQVLPNGFVSCGGDGSVKLVQIKDDLAAAYQR

SEQ ID NO: 192562 - protein, 1264 aa, Zea Mays
MGERDALPPLPLALGPPHLIPPAPTRDPRAIAFLPDLVGFHWVAYAAGSFLVVSHLPSPCRDDNNNDSCSPFFRQVIDLRAPVSAVAWCRRGSGEVAAATDNSIHIFQPAPASSPGSFGWLLRWSITETFAIVAVSWTGCGNGIVAVGAGVSMWARLESSWQLAWRSTPQVPQALVSTTCSMQGPVATVAALAPAEGSVPVLVFLNDARRGLEQAELVHPQPVCMIQWRSCSLYPHDLSEIRREILMTCCFDGTVRLWSKDEVSRSKKQRGLLISFSVIAVIEVNNTLNGVLGVDIIVRWSMESGSVVSRDEQGRFKLFSGDLRESQVGKCEWLVSLGPGPCISFWAIHCLDDVFPPRYPRITLWKQSKLQGWGDSYVKSGPLKSMEQSIFVEAVISRRLCSGPPATCFLLHLLVDDSFAWSTVSTKLLADSGNHALSDSAKNILCCLTKPVKQDGHKGSIRQVSVHPYSCEIELAVSMDSNRMIFFWSLSTFSTLIPTMHAPMYPLWKLLCKFDLRNISEDFEYSCLCWAPSVTRDNRFLVLGWESGVDCFVVRIQKEEVLSCQKIFTIPFLAESNTEGPPDSIHTIPLASKCSRCFVNNSFLVVCIWKKTFKGFSWKVVLHSENQYVNGRCLCGFAPSSLSTTNQGAHACFSNEMFSAVVYEGSSVFPSGLEGEYTTCISVMPLNNTVLPIQQHDPYRTVPGYHIATGCSDGTVKLWKMTCAEDSLQTKKERHIWELVGMFGAHQGPIDIVSLSGCGRVITVGRNLKKNSTSIHIWEATKIRGDGNFLLGDTLMLQDHIVGLDGLSLGDGRFLLAVYLANELRIYSHKHPSFQNVLHTKNSKEEHLWSCIVLSHSHHDIVGFLWGPKATVVLVHENHLSLFSSWLVTGDNEYMTQIHSCPVVHEMLPCTNNFNEATFGKLKLPENFNSGNIDSNNVLLTDQHSHYSHGLWSLLHIAHRLSGPLASYHPRALIQYLYSGEWKRADAALHHLVRSMKVSETSKGVSNYSTCHSIPELPLSEYFAATVSNNISTKGFMWGENRSNTTFNLLSPSTSFLYEDGNLGINTTTSASEKPDIVELLDKSFSKYGISDSEKNQILAISDLMAGITDQSHSSPYKNLDEAGRRFWVAVQFEQFHALRRSADSSSNEGCRVDSASIAWAFQSDCQDDLLNSVLPAEPTWPEMRKLGIGLWYTNVSQLRTRMEKLARLQYLKSKDPKDCALLYIALNRIKVLVGLFKISRDEKDKRLYEFLSRNFQKGTRLLL

SEQ ID NO: 192563 - protein, 1264 aa, Zea Mays
MGERDALPPLPLALGPPHLIPPAPTRDPRAIAFLPDLVGFHWVAYAAGSFLVVSHLPSPCRDDNNNDSCSPFFRQVIDLRAPVSAVAWCRRGSGEVAAATDNSIHIFQPAPASSPGSFGWLLRWSITETFAIVAVSWTGCGNGIVAVGAGVSMWARLESSWQLAWRSTPQVPQALVSTTCSMQGPVATVAALAPAEGSVPVLVFLNDARRGLEQAELVHPQPVCMIQWRSCSLYPHDLSEIRREILMTCCFDGTVRLWSKDEVSRSKKQRGLLISFSVIAVIEVNNTLNGVLGVDIIVRWSMESGSVVSRDEQGRFKLFSGDLRESQVGKCEWLVSLGPGPCISFWAIHCLDDVFPPRYPRITLWKQSKLQGWGDSYVKSGPLKSMEQSIFVEAVISRRLCSGPPATCFLLHLLVDDSFAWSTVSTKLLADSGNHALSDSAKNILCCLTKPVKQDGHKGSIRQVSVHPYSCEIELAVSMDSNRMIFFWSLSTFSTLIPTMHAPMYPLWKLLCKFDLRNISEDFEYSCLCWAPSVTRDNRFLVLGWESGVDCFVVRIQKEEVLSCQKIFTIPFLAESNTEGPPDSIHTIPLASKCSRCFVNNSFLVVCIWKKTFKGFSWKVVLHSENQYVNGRCLCGFAPSSLSTTNQGAHACFSNEMFSAVVYEGSSVFPSGLEGEYTTCISVMPLNNTVLPIQQHDPYRTVPGYHIATGCSDGTVKLWKMTCAEDSLQTKKERHIWELVGMFGAHQGPIDIVSLSGCGRVITVGRNLKKNSTSIHIWEATKIRGDGNFLLGDTLMLQDHIVGLDGLSLGDGRFLLAVYLANELRIYSHKHPSFQNVLHTKNSKEEHLWSCIVLSHSHHDIVGFLWGPKATVVLVHENHLSLFSSWLVTGDNEYMTQIHSCPVVHEMLPCTNNFNEATFGKLKLPENFNSGNIDSNNVLLTDQHSHYSHGLWSLLHIAHRLSGPLASYHPRALIQYLYSGEWKRADAALHHLVRSMKVSETSKGVSNYSTCHSIPELPLSEYFAATVSNNISTKGFMWGENRSNTTFNLLSPSTSFLYEDGNLGINTTTSASEKPDIVELLDKSFSKYGISDSEKNQILAISDLMAGITDQSHSSPYKNLDEAGRRFWVAVQFEQFHALRRSADSSSNEGCRVDSASIAWAFQSDCQDDLLNSVLPAEPTWPEMRKLGIGLWYTNVSQLRTRMEKLARLQYLKSKDPKDCALLYIALNRIKVLVGLFKISRDEKDKRLYEFLSRNFQVPSAISS

SEQ ID NO: 192564 - protein, 2368 aa, Zea Mays
MGERDALPPLPLALGPPHLIPPAPTRDPRAIAFLPDLVGFHWVAYAAGSFLVVSHLPSPCRDDNNNDSCSPFFRQVIDLRAPVSAVAWCRRGSGEVAAATDNSIHIFQPAPASSPGSFGWLLRWSITETFAIVAVSWTGCGNGIVAVGAGVSMWARLESSWQLAWRSTPQVPQALVSTTCSMQGPVATVAALAPAEGSVPVLVFLNDARRGLEQAELVHPQPVCMIQWRSCSLYPHDLSEIRREILMTCCFDGTVRLWSKDEVSRSKKQRGLLISFSVIAVIEVNNTLNGVLGVDIIVRWSMESGSVVSRDEQGRFKLFSGDLRESQVGKCEWLVSLGPGPCISFWAIHCLDDVFPPRYPRITLWKQSKLQGWGDSYVKSGPLKSMEQSIFVEAVISRRLCSGPPATCFLLHLLVDDSFAWSTVSTKLLADSGNHALSDSAKNILCCLTKPVKQDGHKGSIRQVSVHPYSCEIELAVSMDSNRMIFFWSLSTFSTLIPTMHAPMYPLWKLLCKFDLRNISEDFEYSCLCWAPSVTRDNRFLVLGWESGVDCFVVRIQKEEVLSCQKIFTIPFLAESNTEGPPDSIHTIPLASKCSSSLSTTNQGAHACFSNEMFSAVVYEGSSVFPSGLEGEYTTCISVMPLNNTVLPIQQHDPYRTVPGYHIATGCSDGTVKLWKMTCAEDSLQTKKERHIWELVGMFGAHQGPIDIVSLSGCGRVITVGRNLKKNSTSIHIWEATKIRGDGNFLLGDTLMLQDHIVGLDGLSLGDGRFLLAVYLANELRIYSHKHPSFQNVLHTKNSKEEHLWSCIVLSHSHHDIVGFLWGPKATVVLVHENHLSLFSSWLVTGDNEYMTQIHSCPVVHEMLPCTNNFNEATFGKLKLPENFNSGNIDSNNVLLTDQHSHYSHGLWSLLHIAHRLSGPLASYHPRALIQYLYSGEWKRADAALHHLVRSMKVSETSKGVSNYSTCHSIPELPLSEYFAATVSNNISTKGFMWGENRSNTTFNLLSPSTSFLYEDGNLGINTTTSASEKPDIVELLDKSFSKYGISDSEKNQILAISDLMAGITDQSHSSPYKNLDEAGRRFWVAVQFEQFHALRRSADSSSNEGCRVDSASIAWAFQSDCQDDLLNSVLPAEPTWPEMRKLGIGLWYTNVSQLRTRMEKLARLQYLKSKDPKDCALLYIALNRIKVLVGLFKISRDEKDKRLYEFLSRNFQEERHKAAALKNAYVLMGRHQWELAIAFFLLGDDTSSAVNVCAKNLQDEQLAIVICRLIEGSGGPLERNLISNVLLPDAVERGDNWLSSLLEWMLGNYCQSVNRIFGCHPKLLIDQNVLADPELGHYCAILSAKSSFRNSVGEAVSAKLSKLSFAVAACALNKCGLPLEALECLSTNSSIDGKDSIIAHGDGDHKIFYGILSPVSASKNWLSSSVISGIESNLKLTMASKYLSSLLRKHSLCSQLNAPLSEEKVLNEYNNHQIEKLTCDITTVISIFDKRFSLKFADIAEKILIFCSHDGLLFLAYVLLWGTRSPDVATDNYILECHPLCPIDYLLLFSFKESCKFFSRYVVLSSMCSVLNMEDTNSTAWALKERHKYIVISLSNYLNVSRLLLKHDKSGNYILDDRSAMLAVMDLFEYIIEFSFSWLYYDIKSLLIMINPVLATSVNGDSFQVLLDQLMHAICHKNHDISSSTGGMPHAALSKTQLKKSVNSNLLADEKWHLIGASVWVRLISVLEHRLREFFEKEGLEHEAGVSGSEFRGLITSVAAKFVMDSIHFVSSSLVPLHASFLRKNLPMNSSSSLLFWLESKLPQQLPVSDSYDHLSRISQLSNSENMEALFNILWEISVNPVDVCNAFVSEGVNCFSLSNTNVTRSWKDIRCPVVECDKIITERSGEEHEHRLGSKRLGQGFAEKASYNGEVLYETKRRELIIQKEFQSPREILRRSGELLEAVCLNSVNEKQAAIATNRKGLVFFNWSDKQHNKSFSEYVWSGSDWPLDGWAGCQSTPTPTSISPGVDLGRKKGSQLGSVGATTGLSSLAKPGRDLTGGGAFGIPGYAGIGASGFGWGEPEEFEDFIDPPATLENIHSRALSRHPSLPLFLVGSSNTHVYLWEFGKASAMATYGVLPAANIPPPYALASISSVQFDCYGQRDVAYVSASRSVIASAGYSSNGSNVVIWDTLSPPATSQTSIMCHEGGARSISVFDSDRGYGSISPLVVTGGKNGDIALHDCRFLSTGKSKHHRVTTEHGVEASSMHDIKSSTFGGTDSGMVWHIPKAHLGSVTKVTTIPNTSLFLTGSKDGDVKLWDAKNSQLVFHWTKMHERHTFFQPTSRGFGGVVRAAVTDLQVLPNGFVSCGGDGSVKLVQIKDDLAAAYQR

SEQ ID NO: 192565 - protein, 1397 aa, Zea Mays
MGERDALPPLPLALGPPHLIPPAPTRDPRAIAFLPDLVGFHWVAYAAGSFLVVSHLPSPCRDDNNNDSCSPFFRQVIDLRAPVSAVAWCRRGSGEVAAATDNSIHIFQPAPASSPGSFGWLLRWSITETFAIVAVSWTGCGNGIVAVGAGVSMWARLESSWQLAWRSTPQVPQALVSTTCSMQGPVATVAALAPAEGSVPVLVFLNDARRGLEQAELVHPQPVCMIQWRSCSLYPHDLSEIRREILMTCCFDGTVRLWSKDEVSRSKKQRGLLISFSVIAVIEVNNTLNGVLGVDIIVRWSMESGSVVSRDEQGRFKLFSGDLRESQVGKCEWLVSLGPGPCISFWAIHCLDDVFPPRYPRITLWKQSKLQGWGDSYVKSGPLKSMEQSIFVEAVISRRLCSGPPATCFLLHLLVDDSFAWSTVSTKLLADSGNHALSDSAKNILCCLTKPVKQDGHKGSIRQVSVHPYSCEIELAVSMDSNRMIFFWSLSTFSTLIPTMHAPMYPLWKLLCKFDLRNISEDFEYSCLCWAPSVTRDNRFLVLGWESGVDCFVVRIQKEEVLSCQKIFTIPFLAESNTEGPPDSIHTIPLASKCSSSLSTTNQGAHACFSNEMFSAVVYEGSSVFPSGLEGEYTTCISVMPLNNTVLPIQQHDPYRTVPGYHIATGCSDGTVKLWKMTCAEDSLQTKKERHIWELVGMFGAHQGPIDIVSLSGCGRVITVGRNLKKNSTSIHIWEATKIRGDGNFLLGDTLMLQDHIVGLDGLSLGDGRFLLAVYLANELRIYSHKHPSFQNVLHTKNSKEEHLWSCIVLSHSHHDIVGFLWGPKATVVLVHENHLSLFSSWLVTGDNEYMTQIHSCPVVHEMLPCTNNFNEATFGKLKLPENFNSGNIDSNNVLLTDQHSHYSHGLWSLLHIAHRLSGPLASYHPRALIQYLYSAIVKVVLTASTIYHAIALELPKWVIKVTDKWRKPFGKFKRVPVDGVGGWGGGLGEWKRADAALHHLVRSMKVSETSKGVSNYSTCHSIPELPLSEYFAATVSNNISTKGFMWGENRSNTTFNLLSPSTSFLYEDGNLGINTTTSASEKPDIVELLDKSFSKYGISDSEKNQILAISDLMAGITDQSHSSPYKNLDEAGRRFWVAVQFEQFHALRRSADSSSNEGCRVDSASIAWAFQSDCQDDLLNSVLPAEPTWPEMRKLGIGLWYTNVSQLRTRMEKLARLQYLKSKDPKDCALLYIALNRIKVLVGLFKISRDEKDKRLYEFLSRNFQEERHKAAALKNAYVLMGRHQWELAIAFFLLGDDTSSAVNVCAKNLQDEQLAIVICRLIEGSGGPLERNLISNVLLPDAVERGDNWLSSLLETQNWVIIVQFSQQKVVSETLLVKLYLQSYLSFHLQWLHVP

SEQ ID NO: 192566 - protein, 1195 aa, Zea Mays
MGERDALPPLPLALGPPHLIPPAPTRDPRAIAFLPDLVGFHWVAYAAGSFLVVSHLPSPCRDDNNNDSCSPFFRQVIDLRAPVSAVAWCRRGSGEVAAATDNSIHIFQPAPASSPGSFGWLLRWSITETFAIVAVSWTGCGNGIVAVGAGVSMWARLESSWQLAWRSTPQVPQALVSTTCSMQGPVATVAALAPAEGSVPVLVFLNDARRGLEQAELVHPQPVCMIQWRSCSLYPHDLSEIRREILMTCCFDGTVRLWSKDEVSRSKKQRGLLISFSVIAVIEVNNTLNGVLGVDIIVRWSMESGSVVSRDEQGRFKLFSGDLRESQVGKCEWLVSLGPGPCISFWAIHCLDDVFPPRYPRITLWKQSKLQGWGDSYVKSGPLKSMEQSIFVEAVISRRLCSGPPATCFLLHLLVDDSFAWSTVSTKLLADSGNHALSDSAKNILCCLTKPVKQDGHKGSIRQVSVHPYSCEIELAVSMDSNRMIFFWSLSTFSTLIPTMHAPMYPLWKLLCKFDLRNISEDFEYSCLCWAPSVTRDNRFLVLGWESGVDCFVVRIQKEEVLSCQKIFTIPFLAESNTEGPPDSIHTIPLASKCSSSLSTTNQGAHACFSNEMFSAVVYEGSSVFPSGLEGEYTTCISVMPLNNTVLPIQQHDPYRTVPGYHIATGCSDGTVKLWKMTCAEDSLQTKKERHIWELVGMFGAHQGPIDIVSLSGCGRVITVGRNLKKNSTSIHIWEATKIRGDGNFLLGDTLMLQDHIVGLDGLSLGDGRFLLAVYLANELRIYSHKHPSFQNVLHTKNSKEEHLWSCIVLSHSHHDIVGFLWGPKATVVLVHENHLSLFSSWLVTGDNEYMTQIHSCPVVHEMLPCTNNFNEATFGKLKLPENFNSGNIDSNNVLLTDQHSHYSHGLWSLLHIAHRLSGPLASYHPRALIQYLYSGEWKRADAALHHLVRSMKVSETSKGVSNYSTCHSIPELPLSEYFAATVSNNISTKGFMWGINTTTSASEKPDIVELLDKSFSKYGISDSEKNQILAISDLMAGITDQSHSSPYKNLDEAGRRFWVAVQFEQFHALRRSADSSSNEGCRVDSASIAWAFQSDCQDDLLNSVLPAEPTWPEMRKLGIGLWYTNVSQLRTRMEKLARLQYLKSKDPKDCALLYIALNRIKVLVGLFKISRDEKDKRLYEFLSRNFQKGTRLLL

SEQ ID NO: 192567 - protein, 1222 aa, Zea Mays
MGERDALPPLPLALGPPHLIPPAPTRDPRAIAFLPDLVGFHWVAYAAGSFLVVSHLPSPCRDDNNNDSCSPFFRQVIDLRAPVSAVAWCRRGSGEVAAATDNSIHIFQPAPASSPGSFGWLLRWSITETFAIVAVSWTGCGNGIVAVGAGVSMWARLESSWQLAWRSTPQVPQALVSTTCSMQGPVATVAALAPAEGSVPVLVFLNDARRGLEQAELVHPQPVCMIQWRSCSLYPHDLSEIRREILMTCCFDGTVRLWSKDEVSRSKKQRGLLISFSVIAVIEVNNTLNGVLGVDIIVRWSMESGSVVSRDEQGRFKLFSGDLRESQVGKCEWLVSLGPGPCISFWAIHCLDDVFPPRYPRITLWKQSKLQGWGDSYVKSGPLKSMEQSIFVEAVISRRLCSGPPATCFLLHLLVDDSFAWSTVSTKLLADSGNHALSDSAKNILCCLTKPVKQDGHKGSIRQVSVHPYSCEIELAVSMDSNRMIFFWSLSTFSTLIPTMHAPMYPLWKLLCKFDLRNISEDFEYSCLCWAPSVTRDNRFLVLGWESGVDCFVVRIQKEEVLSCQKIFTIPFLAESNTEGPPDSIHTIPLASKCSSSLSTTNQGAHACFSNEMFSAVVYEGSSVFPSGLEGEYTTCISVMPLNNTVLPIQQHDPYRTVPGYHIATGCSDGTVKLWKMTCAEDSLQTKKERHIWELVGMFGAHQGPIDIVSLSGCGRVITVGRNLKKNSTSIHIWEATKIRGDGNFLLGDTLMLQDHIVGLDGLSLGDGRFLLAVYLANELRIYSHKHPSFQNVLHTKNSKEEHLWSCIVLSHSHHDIVGFLWGPKATVVLVHENHLSLFSSWLVTGDNEYMTQIHSCPVVHEMLPCTNNFNEATFGKLKLPENFNSGNIDSNNVLLTDQHSHYSHGLWSLLHIAHRLSGPLASYHPRALIQYLYSGEWKRADAALHHLVRSMKVSETSKGVSNYSTCHSIPELPLSEYFAATVSNNISTKGFMWGINTTTSASEKPDIVELLDKSFSKYGISDSEKNQILAISDLMAGITDQSHSSPYKNLDEAGRRFWVAVQFEQFHALRRSADSSSNEGCRVDSASIAWAFQSDCQDDLLNSVLPAEPTWPEMRKLGIGLWYTNVSQLRTRMEKLARLQYLKSKDPKDCALLYIALNRIKVLVGLFKISRDEKDKRLYEFLSRNFQDLEGLWSVISFLMCYFQMQLREEITGCQACLSGC

SEQ ID NO: 192568 - protein, 967 aa, Zea Mays
MGERDALPPLPLALGPPHLIPPAPTRDPRAIAFLPDLVGFHWVAYAAGSFLVVSHLPSPCRDDNNNDSCSPFFRQVIDLRAPVSAVAWCRRGSGEVAAATDNSIHIFQPAPASSPGSFGWLLRWSITETFAIVAVSWTGCGNGIVAVGAGVSMWARLESSWQLAWRSTPQVPQALVSTTCSMQGPVATVAALAPAEGSVPVLVFLNDARRGLEQAELVHPQPVCMIQWRSCSLYPHDLSEIRREILMTCCFDGTVRLWSKDEVSRSKKQRGLLISFSVIAVIEVNNTLNGVLGVDIIVRWSMESGSVVSRDEQGRFKLFSGDLRESQVGKCEWLVSLGPGPCISFWAIHCLDDVFPPRYPRITLWKQSKLQGWGDSYVKSGPLKSMEQSIFVEAVISRRLCSGPPATCFLLHLLVDDSFAWSTVSTKLLADSGNHALSDSAKNILCCLTKPVKQDGHKGSIRQVSVHPYSCEIELAVSMDSNRMIFFWSLSTFSTLIPTMHAPMYPLWKLLCKFDLRNISEDFEYSCLCWAPSVTRDNRFLVLGWESGVDCFVVRIQKEEVLSCQKIFTIPFLAESNTEGPPDSIHTIPLASKCSSSLSTTNQGAHACFSNEMFSAVVYEGSSVFPSGLEGEYTTCISVMPLNNTVLPIQQHDPYRTVPGYHIATGCSDGTVKLWKMTCAEDSLQTKKERHIWELVGMFGAHQGPIDIVSLSGCGRVITVGRNLKKNSTSIHIWEATKIRGDGNFLLGDTLMLQDHIVGLDGLSLGDGRFLLAVYLANELRIYSHKHPSFQNVLHTKNSKEEHLWSCIVLSHSHHDIVGFLWGPKATVVLVHENHLSLFSSWLVTGDNEYMTQIHSCPVVHEMLPCTNNFNEATFGKLKLPENFNSGNIDSNNVLLTDQHSHYSHGLWSLLHIAHRLSGPLASYHPRALIQYLYSGSGLLCSSNNSMLLEDLQIHPVMKGAVLILLP

SEQ ID NO: 192569 - protein, 1284 aa, Zea Mays
MGERDALPPLPLALGPPHLIPPAPTRDPRAIAFLPDLVGFHWVAYAAGSFLVVSHLPSPCRDDNNNDSCSPFFRQVIDLRAPVSAVAWCRRGSGEVAAATDNSIHIFQPAPASSPGSFGWLLRWSITETFAIVAVSWTGCGNGIVAVGAGVSMWARLESSWQLAWRSTPQVPQALVSTTCSMQGPVATVAALAPAEGSVPVLVFLNDARRGLEQAELVHPQPVCMIQWRSCSLYPHDLSEIRREILMTCCFDGTVRLWSKDEVSRSKKQRGLLISFSVIAVIEVNNTLNGVLGVDIIVRWSMESGSVVSRDEQGRFKLFSGDLRESQVGKCEWLVSLGPGPCISFWAIHCLDDVFPPRYPRITLWKQSKLQGWGDSYVKSGPLKSMEQSIFVEAVISRRLCSGPPATCFLLHLLVDDSFAWSTVSTKLLADSGNHALSDSAKNILCCLTKPVKQDGHKGSIRQVSVHPYSCEIELAVSMDSNRMIFFWSLSTFSTLIPTMHAPMYPLWKLLCKFDLRNISEDFEYSCLCWAPSVTRDNRFLVLGWESGVDCFVVRIQKEEVLSCQKIFTIPFLAESNTEGPPDSIHTIPLASKCSSSLSTTNQGAHACFSNEMFSAVVYEGSSVFPSGLEGEYTTCISVMPLNNTVLPIQQHDPYRTVPGYHIATGCSDGTVKLWKMTCAEDSLQTKKERHIWELVGMFGAHQGPIDIVSLSGCGRVITVGRNLKKNSTSIHIWEATKIRGDGNFLLGDTLMLQDHIVGLDGLSLGDGRFLLAVYLANELRIYSHKHPSFQNVLHTKNSKEEHLWSCIVLSHSHHDIVGFLWGPKATVVLVHENHLSLFSSWLVTGDNEYMTQIHSCPVVHEMLPCTNNFNEATFGKLKLPENFNSGNIDSNNVLLTDQHSHYSHGLWSLLHIAHRLSGPLASYHPRALIQYLYSGEWKRADAALHHLVRSMKVSETSKGVSNYSTCHSIPELPLSEYFAATVSNNISTKGFMWGINTTTSASEKPDIVELLDKSFSKYGISDSEKNQILAISDLMAGITDQSHSSPYKNLDEAGRRFWVAVQFEQFHALRRSADSSSNEGCRVDSASIAWAFQSDCQDDLLNSVLPAEPTWPEMRKLGIGLWYTNVSQLRTRMEKLARLQYLKSKDPKDCALLYIALNRIKVLVGLFKISRDEKDKRLYEFLSRNFQEERHKAAALKNAYVLMGRHQWELAIAFFLLGDDTSSAVNVCAKNLQDEQLAIVICRLIEGSGGPLERNLISNVLLPDAVERGDNWLSSLLEWLHVP

SEQ ID NO: 192570 - protein, 2524 aa, Zea Mays
MGERDALPPLPLALGPPHLIPPAPTRDPRAIAFLPDLVGFHWVAYAAGSFLVVSHLPSPCRDDNNNDSCSPFFRQVIDLRAPVSAVAWCRRGSGEVAAATDNSIHIFQPAPASSPGSFGWLLRWSITETFAIVAVSWTGCGNGIVAVGAGVSMWARLESSWQLAWRSTPQVPQALVSTTCSMQGPVATVAALAPAEGSVPVLVFLNDARRGLEQAELVHPQPVCMIQWRSCSLYPHDLSEIRREILMTCCFDGTVRLWSKDEVSRSKKQRGLLISFSVIAVIEVNNTLNGVLGVDIIVRWSMESGSVVSRDEQGRFKLFSGDLRESQVGKCEWLVSLGPGPCISFWAIHCLDDVFPPRYPRITLWKQSKLQGWGDSYVKSGPLKSMEQSIFVEAVISRRLCSGPPATCFLLHLLVDDSFAWSTVSTKLLADSGNHALSDSAKNILCCLTKPVKQDGHKGSIRQVSVHPYSCEIELAVSMDSNRMIFFWSLSTFSTLIPTMHAPMYPLWKLLCKFDLRNISEDFEYSCLCWAPSVTRDNRFLVLGWESGVDCFVVRIQKEEVLSCQKIFTIPFLAESNTEGPPDSIHTIPLASKCSRCFVNNSFLVVCIWKKTFKGFSWKVVLHSENQYVNGRCLCGFAPSSLSTTNQGAHACFSNEMFSAVVYEGSSVFPSGLEGEYTTCISVMPLNNTVLPIQQHDPYRTVPGYHIATGCSDGTVKLWKMTCAEDSLQTKKERHIWELVGMFGAHQGPIDIVSLSGCGRVITVGRNLKKNSTSIHIWEATKIRGDGNFLLGDTLMLQDHIVGLDGLSLGDGRFLLAVYLANELRIYSHKHPSFQNVLHTKNSKEEHLWSCIVLSHSHHDIVGFLWGPKATVVLVHENHLSLFSSWLVTGDNEYMTQIHSCPVVHEMLPCTNNFNEATFGKLKLPENFNSGNIDSNNVLLTDQHSHYSHGLWSLLHIAHRLSGPLASYHPRALIQYLYSAIVKVVLTASTIYHAIALELPKWVIKVTDKWRKPFGKFKRVPVDGVGGWGGGLGEWKRADAALHHLVRSMKVSETSKGVSNYSTCHSIPELPLSEYFAATVSNNISTKGFMWGENRSNTTFNLLSPSTSFLYEDGNLGINTTTSASEKPDIVELLDKSFSKYGISDSEKNQILAISDLMAGITDQSHSSPYKNLDEAGRRFWVAVQFEQFHALRRSADSSSNEGCRVDSASIAWAFQSDCQDDLLNSVLPAEPTWPEMRKLGIGLWYTNVSQLRTRMEKLARLQYLKSKDPKDCALLYIALNRIKVLVGLFKISRDEKDKRLYEFLSRNFQEERHKAAALKNAYVLMGRHQWELAIAFFLLGDDTSSAVNVCAKNLQDEQLAIVICRLIEGSGGPLERNLISNVLLPDAVERGDNWLSSLLEWMLGNYCQSVNRIFGCHPKLLIDQNVLADPELGHYCAILSAKSSFRNSVGEAVSAKLSKLSFAVAACALNKCGLPLEALECLSTNSSIDGKDSIIAHGDGDHKIFYGILSPVSASKNWLSSSVISGIESNLKLTMASKYLSSLLRKHSLCSQLNAPLSEEKVLNEYNNHQIEKLTCDITTVISIFDKRFSLKFADIAEKILIFCSHDGLLFLAYVLLWGTRSPDVATDNYILECHPLCPIDYLLLFSFKESCKFFSRYVVLSSMCSVLNMEDTNSTAWALKERHKYIVISLSNYLNVSRLLLKHDKSGNYILDDRSAMLAVMDLFEYIIEFSFSWLYYDIKSLLIMINPVLATSVNGDSFQVLLDQLMHAICHKNHDISSSTGGMPHAALSKTQLKKSVNSNLLADEKWHLIGASVWVRLISVLEHRLREFFEKEGLEHEAGVSGSEFRGLITSVAAKFVMDSIHFVSSSLVPLHASFLRKNLPMNSSSSLLFWLESKLPQQLPVSDSYDHLSRISQLSNSENMEALFNILWEISVNPVDVCNAFVSEGVNCFSLSNTNVTRSWKDIRCPVVECDKIITERSGEEHEHRLGSKRLGQGFAEKASYNGEVLYETKRRELIIQKEFQSPREILRRSGELLEAVCLNSVNEKQAAIATNRKGLVFFNWSDKQHNKSFSEYVWSGSDWPLDGWAGCQSTPTPTSISPGVDLGRKKGSQLGSVGATTGLSSLAKPGRDLTGGGAFGIPGYAGIGASGFGWGEPEEFEDFIDPPATLENIHSRALSRHPSLPLFLVGSSNTHVYLWEFGKASAMATYGVLPAANIPPPYALASISSVQFDCYGQRFATAALDGTICTWQVEVGGRSNVYPTESSICFDSHASDVAYVSASRSVIASAGYSSNGSNVVIWDTLSPPATSQTSIMCHEGGARSISVFDSDRGYGSISPLVVTGGKNGDIALHDCRFLSTGKSKHHRVTTEHGVEASSMHDIKSSTFGGTDSGMVWHIPKAHLGSVTKVTTIPNTSLFLTGSKDGDVKLWDAKNSQLVFHWTKMHERHTFFQPTSRGFGGVVRVCSTVKTIKCLMTSFINFVHVMAAVTDLQVLPNGFVSCGGDGSVKLVQIKDDLAAAYQR

SEQ ID NO: 192571 - protein, 1082 aa, Zea Mays
MGERDALPPLPLALGPPHLIPPAPTRDPRAIAFLPDLVGFHWVAYAAGSFLVVSHLPSPCRDDNNNDSCSPFFRQVIDLRAPVSAVAWCRRGSGEVAAATDNSIHIFQPAPASSPGSFGWLLRWSITETFAIVAVSWTGCGNGIVAVGAGVSMWARLESSWQLAWRSTPQVPQALVSTTCSMQGPVATVAALAPAEGSVPVLVFLNDARRGLEQAELVHPQPVCMIQWRSCSLYPHDLSEIRREILMTCCFDGTVRLWSKDEVSRSKKQRGLLISFSVIAVIEVNNTLNGVLGVDIIVRWSMESGSVVSRDEQGRFKLFSGDLRESQVGKCEWLVSLGPGPCISFWAIHCLDDVFPPRYPRITLWKQSKLQGWGDSYVKSGPLKSMEQSIFVEAVISRRLCSGPPATCFLLHLLVDDSFAWSTVSTKLLADSGNHALSDSAKNILCCLTKPVKQDGHKGSIRQVSVHPYSCEIELAVSMDSNRMIFFWSLSTFSTLIPTMHAPMYPLWKLLCKFDLRNISEDFEYSCLCWAPSVTRDNRFLVLGWESGVDCFVVRIQKEEVLSCQKIFTIPFLAESNTEGPPDSIHTIPLASKCSSSLSTTNQGAHACFSNEMFSAVVYEGSSVFPSGLEGEYTTCISVMPLNNTVLPIQQHDPYRTVPGYHIATGCSDGTVKLWKMTCAEDSLQTKKERHIWELVGMFGAHQGPIDIVSLSGCGRVITVGRNLKKNSTSIHIWEATKIRGDGNFLLGDTLMLQDHIVGLDGLSLGDGRFLLAVYLANELRIYSHKHPSFQNVLHTKNSKEEHLWSCIVLSHSHHDIVGFLWGPKATVVLVHENHLSLFSSWLVTGDNEYMTQIHSCPVVHEMLPCTNNFNEATFGKLKLPENFNSGNIDSNNVLLTDQHSHYSHGLWSLLHIAHRLSGPLASYHPRALIQYLYSGEWKRADAALHHLVRSMKVSETSKGVSNYSTCHSIPELPLSEYFAATVSNNISTKGFMWGINTTTSASEKPDIVELLDKSFSKYGISDSEKNQILAISDLMAGITDQSHSSPYKNLDEAGRSSNNSMLLEDLQIHPVMKGAVLILLP

SEQ ID NO: 192572 - protein, 54 aa, Zea Mays
MRHASHYFCFYYKTRPRSVRYMYQYYIKTNHQFLCCTTDVVLDWNSSLATIPRL

SEQ ID NO: 192573 - protein, 57 aa, Zea Mays
MVQLQEVRVATRKIYDPLEEDAFRPILHHYDGPKFRLELSVAETLALLDIFADKDDA

SEQ ID NO: 192574 - protein, 357 aa, Zea Mays
MVKGGLLKDDADWSTLGVKDGQKLMMIGTADEIVKAPEKGPLFVEDLPEEEQVVALGHSAGLYNLGNTCYMNSTLQCLHSVPELKSALLSYSDTVKGNGIDQASHNLTLATRNTFGDLDQSVRPVTPLQFLQTLRKKYPQFAQQHNNVYMQQDAEECWTQLVYTLSQTLTSDSSESAVLPMKQLFGIDLVSRVHCAESGEESMETELVYSLKCHISQDVNHLHEGIKHGLKTELEKASPTLGRTAVYTRESRINELPRYLTVQFVRFFWKRESNQKAKILRKVDYPLELDVYEFCSDELKKKLKAPRQMLRDAENAKLGLYMGKLAAQKKMRSHQVALGNRLVWTLTKLSLLYQRNN

SEQ ID NO: 192575 - protein, 275 aa, Zea Mays
MVKGGLLKDDADWSTLGVKDGQKLMMIGTADEIVKAPEKGPLFVEDLPEEEQVVALTLRKKYPQFAQQHNNVYMQQDAEECWTQLVYTLSQTLTSDSSESAVLPMKQLFGIDLVSRVHCAESGEESMETELVYSLKCHISQDVNHLHEGIKHGLKTELEKASPTLGRTAVYTRESRINELPRYLTVQFVRFFWKRESNQKAKILRKVDYPLELDVYEFCSDELKKKLKAPRQMLRDAENAKLGLYMGKLAAQKKMRSHQVALGNRLVWTLTKVSY

SEQ ID NO: 192576 - protein, 178 aa, Zea Mays
MVKGGLLKDDADWSTLGVKDGQKLMMIGTADEIVKAPEKGPLFVEDLPEEEQVVALGHSAGLYNLGNTCYMNSTLQCLHSVPELKSALLSYSDTVKGNGIDQASHNLTLATRNTFGDLDQSVRPVTPLQFLQTLRKKYPQFAQQHNNVYMQQKNAGHSWCIHFLKLLPQIQVNLQFFQ

SEQ ID NO: 192577 - protein, 339 aa, Zea Mays
MVKGGLLKDDADWSTLGVKDGQKLMMIGTADEIVKAPEKGPLFVEDLPEEEQVVALGHSAGLYNLGNTCYMNSTLQCLHSVPELKSALLSYSDTVKGNGIDQASHNLTLATRNTFGDLDQSVRPVTPLQFLQTLRKKYPQFAQQHNNVYMQQDAEECWTQLVYTLSQTLTSDSRVHCAESGEESMETELVYSLKCHISQDVNHLHEGIKHGLKTELEKASPTLGRTAVYTRESRINELPRYLTVQFVRFFWKRESNQKAKILRKVDYPLELDVYEFCSDELKKKLKAPRQMLRDAENAKLGLYMGKLAAQKKMRSHQVALGNRLVWTLTKLSLLYQRNN

SEQ ID NO: 192578 - protein, 451 aa, Zea Mays
MVKGGLLKDDADWSTLGVKDGQKLMMIGTADEIVKAPEKGPLFVEDLPEEEQVVALGHSAGLYNLGNTCYMNSTLQCLHSVPELKSALLSYSDTVKGNGIDQASHNLTLATRNTFGDLDQSVRPVTPLQFLQTLRKKYPQFAQQHNNVYMQQDAEECWTQLVYTLSQTLTSDSSESAVLPMKQLFGIDLVSRVHCAESGEESMETELVYSLKCHISQDVNHLHEGIKHGLKTELEKASPTLGRTAVYTRESRINELPRYLTVQFVRFFWKRESNQKAKILRKVDYPLELDVYEFCSDELKKKLKAPRQMLRDAENAKLGLYMGKLAAQKKMSFQIWIVNPLSCNSAISFQESSSSAGESSSMDIDKAESSLPKKQLTGVYDLVAVLTHKGRSADSGHYVGWVKQDDGKWIEFDDDNPNIRKDEDILKLSGGGDWHMAYICLYKARMAESKS

SEQ ID NO: 192579 - protein, 640 aa, Zea Mays
MRCYRCFLLAPVVIACFFSRITTTTLADPRATVVRELCNKTKDDGPGAVWANNFVVAFDNLNSDLEQKGWGVTSVGQDPITFYALVQCLEDLSTVDCTLCYSEIRSLLPKCYPEIGGRIYLDGCFMRYANYSFFGEAVDSLDTSVCSSSNRSSEKRGFGSAVDAVLSNVTSLAVKSGKGFAVTSAFGSTEFAAYALAQCWENLNTSSCAACLSAAAGSVAKCAPAEEGRALFAGCFVRYSTAPFWNSEDSGSSSKKHVVPWTVLGFSVGLVLVLIGSVLAWRKKKKACRAGEGSLRGLYGSELPARISQSSLNYSYKDLKKATCSFSVENKIGQGSNGTVYKAVLPGGNEVAAKRLFLNTKQCLDQFFNEVDVISQVRHKNLVKLLGCSVDGPESFLIYEYHLNRSLDLSIFADGQQKRRLDWQQRFDVIFGVAEGLCYLHEESETRIIHRDIKASNVLLDQKLKPKITDFGLARVLCGDRTHLTTGIAGTVGYMAPEYVVHGHLTKKADVYSFGVLAVEIVTGKRCCGSTGSHSGHSLLAQVWHSYKTNTTEKVVDTRLQQESAPLDLEEITRVVQVGLLCTQANPDERPAMSRVVELLRDRDGERGDADFILGDPPFFEVEIDAAGGGVDGEACTLLP

SEQ ID NO: 192580 - protein, 880 aa, Zea Mays
MDRSWVHARLFSHEYINGVKEFMSFIHGKFGEDEEILCPCSRCLNQKYQHQALVERHILMNGMESTYTRWIHHGENLDVYGLLNESGMTEDNSYDDGNLNGLLQDLDSAEKDKQDNENENDPEPNDKDSFFKSVMKEAKRQLYPGCTKFSKLSFVVKLLDMKSLYRICNSAFSAILKLLGDAFPECNTLPKSYYEAKSILKKLGLGYESIHVCYNNCVLFRKEYSKLDNCPICGLSRWVDVEGKKIPQKVLRHFPLIPRLQRMFVNKETAEQAQWHKLKGNPKENEMSHPADGEAWQDFDRKYPNFAKDARNLRLGLATDGFNPFSEKNTKYSMWPVLVVPYNLSPWACMEESNFMMALLIPGPTSPGKDFDIFLEPLIEDLLELWTGVPTYDALTGQKFNLRAAVLWCIHDYPALGTLSGRKTKGFFACIHCDKQPLSYSLRSKIGYFGHFRFLPVGHRLRKNNEFVGLHESNDPPGKFSMEELMAELERVKHVRPGKQQGSRKRKRSNLDKDHVVIWSRMVSLWKLPYWKNLKLRHNLDIMHIEKNICENLIGTILNIPGKTKDTIKARFDLKDMGIRKELHFRGNVDSCEMPYARYTLPTEYKKAFCDFLREVKFPDGFASNISRCLNAEGTKLQGLKTHDCHILLQRILPVAMRGFLDKDIYEALADLGKFFRELCSRTLKKDVLAEMRKEIPIILVKLEKIFPPAFFDVMVHLAVHLPDEALLRGPVHYGWMYPIERRLYTLKRYVRNRARPEGSIAEAYIADECLTFCSKYMDDVETKFNREPRNKGFSNEEAYTVDVFGHGVNFTSAPELVYDDSAIDQMVWYVLNNCSQVDKYMRMFRDELERDGMPNIERTLRQGFQTWFRTHILRMRNIN

SEQ ID NO: 192581 - protein, 793 aa, Zea Mays
MTEDNSYDDGNLNGLLQDLDSAEKDKQDNENENDPEPNDKDSFFKSVMKEAKRQLYPGCTKFSKLSFVVKLLDMKSLYRICNSAFSAILKLLGDAFPECNTLPKSYYEAKSILKKLGLGYESIHVCYNNCVLFRKEYSKLDNCPICGLSRWVDVEGKKIPQKVLRHFPLIPRLQRMFVNKETAEQAQWHKLKGNPKENEMSHPADGEAWQDFDRKYPNFAKDARNLRLGLATDGFNPFSEKNTKYSMWPVLVVPYNLSPWACMEESNFMMALLIPGPTSPGKDFDIFLEPLIEDLLELWTGVPTYDALTGQKFNLRAAVLWCIHDYPALGTLSGRKTKGFFACIHCDKQPLSYSLRSKIGYFGHFRFLPVGHRLRKNNEFVGLHESNDPPGKFSMEELMAELERVKHVRPGKQQGSRKRKRSNLDKDHVVIWSRMVSLWKLPYWKNLKLRHNLDIMHIEKNICENLIGTILNIPGKTKDTIKARFDLKDMGIRKELHFRGNVDSCEMPYARYTLPTEYKKAFCDFLREVKFPDGFASNISRCLNAEGTKLQGLKTHDCHILLQRILPVAMRGFLDKDIYEALADLGKFFRELCSRTLKKDVLAEMRKEIPIILVKLEKIFPPAFFDVMVHLAVHLPDEALLRGPVHYGWMYPIERRLYTLKRYVRNRARPEGSIAEAYIADECLTFCSKYMDDVETKFNREPRNKGFSNEEAYTVDVFGHGVNFTSAPELVYDDSAIDQMVWYVLNNCSQVDKYMRMFRDELERDGMPNIERTLRQGFQTWFRTHILRMRNIN

SEQ ID NO: 192582 - protein, 371 aa, Zea Mays
MPPGREKVGVKRPHGPQLSEPPLHPYEQLRLRQCMRNNSRLQQLGIPALSSMLASTNSISQRNRPSHRNSEDSESDYDISQDETGDDNVKVGSKECNIRTTDNSLGAIKLCSKRVFAQQETTRITRSKKNIAQPDATLTPRHNIDYHTQGIVEANGHAHLDENTNMTNEGHVAPFDGKNPTGNEDNVDVLADNNRTIGGQVDDTNQMSNRDLELGQNDRWERGINMGHGLHRINRGLRGKLQVVIPEGKIRPMAPLVAAKFATECNISVRNHVPVFKHWKDYKNHSGLFNLFTGKLSAKFDINTSDAPVQKACSQMMKSAVRQQRYRLKKKYFDPFPLHLVAKKSPIRSMTDEEWNELVEYWKSPKKWLWS

SEQ ID NO: 192583 - protein, 386 aa, Zea Mays
MPPGREKVGVKRPHGPQLSEPPLHPYEQLRLRQCMRNNSRLQQLGIPALSSMLASTNSISQRNRPSHRNSEDSESDYDISQDETGDDNVKVGSKECNIRTTDNSLGAIKLCSKRVFAQQETTRITRSKKNIAQPDATLTPRHNIDYHTQANGHAHLDENTNMTNEGHVAPFDGKNPTGNEDNVDVLADNNRTIGGQVDDTNQMSNRDLELGQNDRWERGINMGHGLHRINRGLRGKLQVVIPEGKIRPMAPLVAAKFATECNISVRNHVPVFKHWKDYKNHSGLFNLFTGKLSAKFDINTSDAPVQKACSQMMKSAVRQQRYRLKKKYFDPFPLHLVAKKSPIRSMTDEEWNELVEYWKSPKKWRHLKKTKRIDPKLNSIKQLALV

SEQ ID NO: 192584 - protein, 389 aa, Zea Mays
MPPGREKVGVKRPHGPQLSEPPLHPYEQLRLRQCMRNNSRLQQLGIPALSSMLASTNSISQRNRPSHRNSEDSESDYDISQDETGDDNVKGSKECNIRTTDNSLGAIKLCSKRVFAQQETTRITRSKKNIAQPDATLTPRHNIDYHTQGIVEANGHAHLDENTNMTNEGHVAPFDGKNPTGNEDNVDVLADNNRTIGGQVDDTNQMSNRDLELGQNDRWERGINMGHGLHRINRGLRGKLQVVIPEGKIRPMAPLVAAKFATECNISVRNHVPVFKHWKDYKNHSGLFNLFTGKLSAKFDINTSDAPVQKACSQMMKSAVRQQRYRLKKKYFDPFPLHLVAKKSPIRSMTDEEWNELVEYWKSPKKWRHLKKTKRIDPKLNSIKQLALV

SEQ ID NO: 192585 - protein, 305 aa, Zea Mays
MDLSYQGSKECNIRTTDNSLGAIKLCSKRVFAQQETTRITRSKKNIAQPDATLTPRHNIDYHTQGIVEANGHAHLDENTNMTNEGHVAPFDGKNPTGNEDNVDVLADNNRTIGGQVDDTNQMSNRDLELGQNDRWERGINMGHGLHRINRGLRGKLQVVIPEGKIRPMAPLVAAKFATECNISVRNHVPVFKHWKDYKNHSGLFNLFTGKLSAKFDINTSDAPVQKACSQMMKSAVRQQRYRLKKKYFDPFPLHLVAKKSPIRSMTDEEWNELVEYWKSPKKWRHLKKTKRIDPKLNSIKQLALV

SEQ ID NO: 192586 - protein, 390 aa, Zea Mays
MPPGREKVGVKRPHGPQLSEPPLHPYEQLRLRQCMRNNSRLQQLGIPALSSMLASTNSISQRNRPSHRNSEDSESDYDISQDETGDDNVKVGSKECNIRTTDNSLGAIKLCSKRVFAQQETTRITRSKKNIAQPDATLTPRHNIDYHTQGIVEANGHAHLDENTNMTNEGHVAPFDGKNPTGNEDNVDVLADNNRTIGGQVDDTNQMSNRDLELGQNDRWERGINMGHGLHRINRGLRGKLQVVIPEGKIRPMAPLVAAKFATECNISVRNHVPVFKHWKDYKNHSGLFNLFTGKLSAKFDINTSDAPVQKACSQMMKSAVRQQRYRLKKKYFDPFPLHLVAKKSPIRSMTDEEWNELVEYWKSPKKWRHLKKTKRIDPKLNSIKQLALV

SEQ ID NO: 192587 - protein, 505 aa, Zea Mays
MQWQSQNKPMMEGPHDNGLCGDTNQLEEQKSGFGISDCWRYVLDGQMHLPDVQEGAGIGTCIRDALLYGCAEFGTVPDKMEMDCDKTVDANTAKCQNILKDVLRSENFALLCSVLCRTVHQDGERTRYFDFGVIDSRMKNGNYGPEPELFVHDLKLLWEDLKVAGQDIVHLANNLSSLTEDSYEKLVGRERGSDDDELNEAVVARSEPKNLVQPNASVPLTSQGFNQLLDQPGPSDPSVVYKDSICNRCGKVAGAGSVLKCYRCMLPCHISCIEATGSPISTGRWCCKNCSAGTKEPVEGDMVLAHGNPNCLHESCVVCDRLAACRSPKCDNSRALVISSVDPEIDTCYSCKICGGTEEDEKRFLICGNVLCRYMYYHIGCLKSMQISTSVERGSPCWYCPSCLCRVCLCDKDDDLTILCDGCDEAYHIYCITPRHTSIPKGQWYCSSCSVERAEEGMRQYERRTLKLHRKEDAGLQSWNFDGVDLLLSAAEQLRIDEQLETRTD

SEQ ID NO: 192588 - protein, 550 aa, Zea Mays
MLSNTILSQQSSNPQVHHEDPQVCHEQERKEVATSSEPGCEQGQRMQWQSQNKPMMEGPHDNGLCGDTNQLEEQKSGFGISDCWRYVLDGQMHLPDVQEGAGIGTCIRDALLYGCAEFGTVPDKMEMDCDKTVDANTAKCQNILKDVLRSENFALLCSVLCRTVHQDGERTRYFDFGVIDSRMKNGNYGPEPELFVHDLKLLWEDLKVAGQDIVHLANNLSSLTEDSYEKLVGRERGSDDDELNEAVVARSEPKNLVQPNASVPLTSQGFNQLLDQPGPSDPSVVYKDSICNRCGKVAGAGSVLKCYRCMLPCHISCIEATGSPISTGRWCCKNCSAGTKEPVEGDMVLAHGNPNCLHESCVVCDRLAACRSPKCDNSRALVISSVDPEIDTCYSCKICGGTEEDEKRFLICGNVLCRYMYYHIGCLKSMQISTSVERGSPCWYCPSCLCRVCLCDKDDDLTILCDGCDEAYHIYCITPRHTSIPKGQWYCSSCSVERAEEGMRQYERRTLKLHRKEDAGLQSWNFDGVDLLLSAAEQLRIDEQLETRTD

SEQ ID NO: 192589 - protein, 827 aa, Zea Mays
MDYGRMDRLTSNKNQILDKNTENSKNTKMLKPCRKSEFNTRKHIIIVDKIGRHWKCRYCGMDVYGKKFQLHYHLAGAFRQAKCPNVPREVFAKARQHVLTKKMLKKSKAEQQIPSSPHILAQSGEERQNNDPFCGNQSQLSINNEPREVHNYPAVLRDSAWEHSLIYEKENGHWKCKWCSIEGDHGLTRLMWHLVGWQNRPQCPNIPKDVAEKMKDQMMSKKEQKARSGLFDGNGCCEVLCSSNSSQLDQNHLTARIHDRCSSQAFDHANSELKGCNMLSNTILSQQSSNPQVHHEDPQVCHEQERKEVATSSEPGCEQGQRMQWQSQNKPMMEGPHDNGLCGDTNQLEEQKSGFGISDCWRYVLDGQMHLPDVQEGAGIGTCIRDALLYGCAEFGTVPDKMEMDCDKTVDANTAKCQNILKDVLRSENFALLCSVLCRTVHQDGERTRYFDFGVIDSRMKNGNYGPEPELFVHDLKLLWEDLKVAGQDIVHLANNLSSLTEDSYEKLVGRERGSDDDELNEAVVARSEPKNLVQPNASVPLTSQGFNQLLDQPGPSDPSVVYKDSICNRCGKVAGAGSVLKCYRCMLPCHISCIEATGSPISTGRWCCKNCSAGTKEPVEGDMVLAHGNPNCLHESCVVCDRLAACRSPKCDNSRALVISSVDPEIDTCYSCKICGGTEEDEKRFLICGNVLCRYMYYHIGCLKSMQISTSVERGSPCWYCPSCLCRVCLCDKDDDLTILCDGCDEAYHIYCITPRHTSIPKGQWYCSSCSVERAEEGMRQYERRTLKLHRKEDAGLQSWNFDGVDLLLSAAEQLRIDEQLETRTD

SEQ ID NO: 192590 - protein, 426 aa, Zea Mays
MEMDCDKTVDANTAKCQNILKDVLRSENFALLCSVLCRTVHQDGERTRYFDFGVIDSRMKNGNYGPEPELFVHDLKLLWEDLKVAGQDIVHLANNLSSLTEDSYEKLVGRERGSDDDELNEAVVARSEPKNLVQPNASVPLTSQGFNQLLDQPGPSDPSVVYKDSICNRCGKVAGAGSVLKCYRCMLPCHISCIEATGSPISTGRWCCKNCSAGTKEPVEGDMVLAHGNPNCLHESCVVCDRLAACRSPKCDNSRALVISSVDPEIDTCYSCKICGGTEEDEKRFLICGNVLCRYMYYHIGCLKSMQISTSVERGSPCWYCPSCLCRVCLCDKDDDLTILCDGCDEAYHIYCITPRHTSIPKGQWYCSSCSVERAEEGMRQYERRTLKLHRKEDAGLQSWNFDGVDLLLSAAEQLRIDEQLETRTD

SEQ ID NO: 192591 - protein, 878 aa, Zea Mays
MIDDEESQGIKKVHFRDSFSQHPIVTYKRRRQQKPQTQQQLRQPPPSLQQHPEPQLQVKLEPKTEDVPEQQFPILRARDIGWEHAVDLDGNKRRWQCKFCSLCRSGGVTTLKAHLIDDSCPNVPKEISKKVSNFIEEKRATRLLLNNYVFNVDEDFNTILQEGTVEYVNEQQPSRKATYVQTLSKCAINEVHNYPAVLRDSAWEHSLIYEKENGHWKCKWCSIEGDHGLTRLMWHLVGWQNRPQCPNIPKDVAEKMKDQMMSKKEQKARSGLFDGNGCCEVLCSSNSSQLDQNHLTARIHDRCSSQAFDHANSELKGCNMLSNTILSQQSSNPQVHHEDPQVCHEQERKEVATSSEPGCEQGQRMQWQSQNKLSTKIFIMQPMMEGPHDNGLCGDTNQLEEQKSGFGISDCWRYVLDGQMHLPDVQEGAGIGTCIRDALLYGCAEFGTVPDKMEMDCDKTVDANTAKCQNILKDVLRSENFALLCSVLCRTVHQDGERTRYFDFGVIDSRMKNGNYGPEPELFVHDLKLLWEDLKVAGQDIVHLANNLSSLTEDSYEKLVGRERGSDDDELNEAVVARSEPKNLVQPNASVPLTSQGFNQLLDQPGPSDPSVVYKDSICNRCGKVAGAGSVLKCYRCMLPCHISCIEATGSPISTGRWCCKNCSAGTKEPVEGDMVLAHGNPNCLHESCVVCDRLAACRSPKCDNSRALVISSVDPEIDTCYSCKICGGTEEDEKRFLICGNVLCRYMYYHIGCLKSMQISTSVERGSPCWYCPSCLCRVCLCDKDDDLTILCDGCDEAYHIYCITPRHTSIPKGQWYCSSCSVERAEEGMRQYERRTLKLHRKEDAGLQSWNFDGVDLLLSAAEQLRIDEQLETRTD

SEQ ID NO: 192592 - protein, 607 aa, Zea Mays
MIDDEESQGIKKVHFRDSFSQHPIVTYKRRRQQKPQTQQQLRQPPPSLQQHPEPQLQVKLEPKTEDVPEQQFPILRARDIGWEHAVDLDGNKRRWQCKFCSLCRSGGVTTLKAHLIDDSCPNVPKEISKKVSNFIEEKRATRLLLNNYVFNVDEDFNTILQEGTVEYVNEQQPSRKATYVQTLSKCAINEIAAGSKQCGAECSGQPVEHCDQPEEQCTMDYGRMDRLTSNKNQILDKNTENSKNTKMLKPCRKSEFNTRKHIIIVDKIGRHWKCRYCGMDVYGKKFQLHYHLAGAFRQAKCPNVPREVFAKARQHVLTKKMLKKSKAEQQIPSSPHILAQSGEERQNNDPFCGNQSQLSINNEPREVHNYPAVLRDSAWEHSLIYEKENGHWKCKWCSIEGDHGLTRLMWHLVGWQNRPQCPNIPKDVAEKMKDQMMSKKEQKARSGLFDGNGCCEVLCSSNSSQLDQNHLTARIHDRCSSQAFDHANSELKGCNMLSNTILSQQSSNPQVHHEDPQVCHEQERKEVATSSEPGCEQGQRMQWQSQNKPMMEGPHDNGLCGDTNQLEEQKSGFGISDCWRYLTKWKWIVIKQWMRTLLSARIFLRMF

SEQ ID NO: 192593 - protein, 716 aa, Zea Mays
MDYGRMDRLTSNKNQILDKNTENSKNTKVHNYPAVLRDSAWEHSLIYEKENGHWKCKWCSIEGDHGLTRLMWHLVGWQNRPQCPNIPKDVAEKMKDQMMSKKEQKARSGLFDGNGCCEVLCSSNSSQLDQNHLTARIHDRCSSQAFDHANSELKGCNMLSNTILSQQSSNPQVHHEDPQVCHEQERKEVATSSEPGCEQGQRMQWQSQNKLSTKIFIMQPMMEGPHDNGLCGDTNQLEEQKSGFGISDCWRYVLDGQMHLPDVQEGAGIGTCIRDALLYGCAEFGTVPDKMEMDCDKTVDANTAKCQNILKDVLRSENFALLCSVLCRTVHQDGERTRYFDFGVIDSRMKNGNYGPEPELFVHDLKLLWEDLKVAGQDIVHLANNLSSLTEDSYEKLVGRERGSDDDELNEAVVARSEPKNLVQPNASVPLTSQGFNQLLDQPGPSDPSVVYKDSICNRCGKVAGAGSVLKCYRCMLPCHISCIEATGSPISTGRWCCKNCSAGTKEPVEGDMVLAHGNPNCLHESCVVCDRLAACRSPKCDNSRALVISSVDPEIDTCYSCKICGGTEEDEKRFLICGNVLCRYMYYHIGCLKSMQISTSVERGSPCWYCPSCLCRVCLCDKDDDLTILCDGCDEAYHIYCITPRHTSIPKGQWYCSSCSVERAEEGMRQYERRTLKLHRKEDAGLQSWNFDGVDLLLSAAEQLRIDEQLETRTD

SEQ ID NO: 192594 - protein, 164 aa, Zea Mays
MATTATRRWWRRHDGGDDDPDDLVPMDTQEQEELVRSLEAKQAQQGRRWRRVFAGFLLGYVAFLVYSSFHHAWSPWELRYHAYFMEDLPAPMVIIADWIAALACLFAVKGLLQNSGPSKKWMWYSCYVGILVAIFWTYYILRYIVLVNLSFFPFPCHSNALLKY

SEQ ID NO: 192595 - protein, 108 aa, Zea Mays
MSASSFARLQHKRFIWQNLIWAQGTICPTLEILLQRGTHTHALAPIVPYSMENSVADAMYNKIIVFGEYVFQKIIMNIISTYFLRTCSDYKYEHHFIAFYHFPFSLAH

SEQ ID NO: 192596 - protein, 102 aa, Zea Mays
MSASSFARLQHKRFIWQNLIWAQGTICPTLEILLQRGPQIVRDFANESLPDCLILFRGTHTHALAPIVPYSMENSVADAMYNKIIVFVFDQVVDTTPWKSWW

SEQ ID NO: 192597 - protein, 73 aa, Zea Mays
MSYLRDFTTKIVRDFANESLPDCLILFRGTHTHALAPIVPYSMENSVADAMYNKIIVFVFDQVVDTTPWKSWW

SEQ ID NO: 192598 - protein, 58 aa, Zea Mays
MENSVADAMYNKIIVFGEYVFQKIIMNIISTYFLRTCSDYKYEHHFIAFYHFPFSLAH

SEQ ID NO: 192599 - protein, 89 aa, Zea Mays
MMGCLALLWSVMNRTICGNLFSFWFILTRKCYGHYSYKCLSLSKIVLHAIPFTFIHTFLKKSYRQEPHMLLCIHLWNQRKSPPHDLSFY

SEQ ID NO: 192600 - protein, 50 aa, Zea Mays
MQCTTKLLFLFRPSCGYHTLEELVVDSSSSMECLRCLARCLMATGAYQNY

SEQ ID NO: 192601 - protein, 279 aa, Zea Mays
MVAARLRLSLLLSVCLSSAWARPRLEPAIRLPSQRAAAADETDDGDVGTRWAVLIAGSSGYYNYRHQADICHAYQIMKKGGLKDENIIVFMYDDIAHSPENPRPGVIINHPQGGDVYAGVPKDYTGRDVNVDNFFAVLLGNKTALRGGSGKVVDSGPNDHIFVFYSDHGGPGVLGMPTYPYLYGDDLVDVLKKKHAAGTYKSLVFYLEACESGSIFEGLLPNDINVYATTASNADESSWGTYCPGEFPSPPPEYDTCLGDLYSVAWMEDSSLYGIEKKR

SEQ ID NO: 192602 - protein, 431 aa, Zea Mays
MVAARLRLSLLLSVCLSSAWARPRLEPAIRLPSQRAAAADETDDGDVGTRWAVLIAGSSGYYNYRHQDYTGRDVNVDNFFAVLLGNKTALRGGSGKVVDSGPNDHIFVFYSDHGGPGVLGMPTYPYLYGDDLVDVLKKKHAAGTYKSLVFYLEACESGSIFEGLLPNDINVYATTASNADESSWGTYCPGEFPSPPPEYDTCLGDLYSVAWMEDSDFHNLRTESLKQQYKLVKDRTAVHDTFSYGSHVMQYGALELNVQRLFSYIGTDPANDGNTFIEDNSLPSFSKAVNQRDADLVYFWQKYRKLADSSHAKNEARKELLEVMAHRSHVDSSVELIGSLLFGSEDGPRVLKAVRAPGEPLVDDWSCLKSIVRTFEARCGSLAQYGMKHMRSFANMCNAGILPEAVSKVAAQACSSIPSNPWSSIHKGFSA

SEQ ID NO: 192603 - protein, 410 aa, Zea Mays
MKKGGLKDENIIVFMYDDIAHSPENPRPGVIINHPQGGDVYAGVPKDYTGRDVNVDNFFAVLLGNKTALRGGSGKVVDSGPNDHIFVFYSDHGGPGVLGMPTYPYLYGDDLVDVLKKKHAAGTYKSLVFYLEACESGSIFEGLLPNDINVYATTASNADESSWGTYCPGEFPSPPPEYDTCLGDLYSVAWMEDSDFHNLRTESLKQQYKLVKDRTAVHDTFSYGSHVMQYGALELNVQRLFSYIGTDPANDGNTFIEDNSLPSFSKAVNQRDADLVYFWQKYRKLADSSHAKNEARKELLEVMAHRSHVDSSVELIGSLLFGSEDGPRVLKAVRAPGEPLVDDWSCLKSIVRTFEARCGSLAQYGMKHMRSFANMCNAGILPEAVSKVAAQACSSIPSNPWSSIHKGFSA

SEQ ID NO: 192604 - protein, 173 aa, Zea Mays
MRRDGHEGDVSNQGRDGAVMFGPDDDGVKIPTQVETLVKGTAAVAEPEYKQIPDVDYLQKNHIFTSGASGTNAAVIRGALRAEKPELLTVILPQSLKKQPPESQELLSKVQNLLEKPQYDHLPLIEASRLCNMDIISKVQQVICFAFHDSKLLMETCQEAMNLRKIVTLFYLD

SEQ ID NO: 192605 - protein, 102 aa, Zea Mays
MNSVGVGQTRRVHFGFARSVIIGLCKHERGIQAYSGFINRQSVRTRWWPMVMHLLEGARRQPQACVGVGPQAVLLLVEAVPAQCSNSTLMRLPAAKCHQTLF

SEQ ID NO: 192606 - protein, 440 aa, Zea Mays
MVAVAAGRRAGGVGGRRRSGCGPGQAQQKLLAIAVAARFAEAVAPPSAEASRAGSGGCCVELLECLLGALSVNAAPPPAQHRRAVHSIRRRRPRGGGSADDRHADAPSGRIAGNGASASAAASLYTMQGRKGVNQDAMVVWENFGSKDDTIFCGVFDGHGPNGHLVAKRVRDLLPVKVEDTDASPGNEENGEYPEFFTALRASFLQAFYVMDRDLKAHRNIDCEFSGTTAVTVIKQGQNLIIGNLGDSRAVLGTRGEHNQLVALQLTVDLKPSIPSEAERIRQQSGRVFSLPDEPDVVRVWLPTFNLPGLAMARSFGDFCLKKYGIISMPDVFYHRITDKDEFVVLATDGVWDVLSNAEAVSIISNAPSQASAARFLVESAHRAWRTRYPTSKTDDCAVVCLFLKTEAASTSSSAVTKDLVKNREMSSEPTSVVKDSSKD

SEQ ID NO: 192607 - protein, 180 aa, Zea Mays
MDCHWILPNFGSKDDTIFCGVFDGHGPNGHLVAKRVRDLLPVKLSANLGKGEFKEISTSDVKSGTTKGVATEHRVEDTDASPGNEENGEYPEFFTALRASFLQAFYVMDRDLKAHRNIDCEFSGTTAVTVIKQGQNLIIGNLGDSRAVLGTRGEHNQLVALQLTVDLKPSIPNTTENKEK

SEQ ID NO: 192608 - protein, 339 aa, Zea Mays
MDCHWILPNFGSKDDTIFCGVFDGHGPNGHLVAKRVRDLLPVKLSANLGKGEFKEISTSDVKSGTTKGVATEHRVEDTDASPGNEENGEYPEFFTALRASFLQAFYVMDRDLKAHRNIDCEFSGTTAVTVIKQGQNLIIGNLGDSRAVLGTRGEHNQLVALQLTVDLKPSIPSEAERIRQQSGRVFSLPDEPDVVRVWLPTFNLPGLAMARSFGDFCLKKYGIISMPDVFYHRITDKDEFVVLATDGVWDVLSNAEAVSIISNAPSQASAARFLVESAHRAWRTRYPTSKTDDCAVVCLFLKTEAASTSSSAVTKDLVKNREMSSGKHSLAVKTSTQGS

SEQ ID NO: 192609 - protein, 341 aa, Zea Mays
MNHCILKIQLNFGSKDDTIFCGVFDGHGPNGHLVAKRVRDLLPVKLSANLGKGEFKEISTSDVKSGTTKGVATEHRVEDTDASPGNEENGEYPEFFTALRASFLQAFYVMDRDLKAHRNIDCEFSGTTAVTVIKQGQNLIIGNLGDSRAVLGTRGEHNQLVALQLTVDLKPSIPSEAERIRQQSGRVFSLPDEPDVVRVWLPTFNLPGLAMARSFGDFCLKKYGIISMPDVFYHRITDKDEFVVLATDGVWDVLSNAEAVSIISNAPSQASAARFLVESAHRAWRTRYPTSKTDDCAVVCLFLKTEAASTSSSAVTKDLVKNREMSSGKHSLAVKTSTQGS

SEQ ID NO: 192610 - protein, 765 aa, Zea Mays
MDGDHRRQAAAAVTVTQVSPARRLIAWLRLLFRAFVHRYGKVASWNAAGRPVFVVLAVFFLQRSLRRRYLSWKESSRLPLMAAAAVTVQTTVRAMAAQRELSVRKQTRAATRIQAQWRAHRAVWSYLTTKRAAVICQRAWRQSVARKELRKLRLCVQENLEREMLEEVCRLREMVDVLQQAVNDAETRAVNEREAAKDAMAQLEAASAIEETVVMVEDTEKVKSLSAEVDRLKDLLGAEMSETFAAKKALSEAELRNEKLARLLGVEEVKNKRLQDTLKRMEEKASSLDEENRMLRQAVASNPAIVRSPSGENHEAPGIQAAPDNEKSRNGTVKPIAVDREANVHEKGAEQPSSNGQEAGKQQQELLIKCLSEDLGFSVGRPIAAYLIYRCLVHWRSFEEERSVVFDRIIQKITAALEARDNNDALAYWLSNSCALLVLLQRTLKINGVAALARQRRRTSSPLKENQDPAPDGQLICGLAQVYQVEAKYPAIAFKQQLTALLEKVYGMIRHNLKKELSPLLGLCIQAPRTFVVSPRGSCSQGTDLAQQASMAHWQSIIKILTNSLDVLKSNYVPPFLICKMFTQVFSFINVQLFNSLLLRRECCSFSNGEYVKAGLDELEHWCFWLTEEYAGSAWDELKHIRQAVTLLILDDKHSRSLAEITDDFCPVLSMQQLYRISTMYCDDKFGTLGIPSEVVSSMRTKMIEGSSSSPSAHDDINSFLLDDDFSIPFSVDDFTKLIVHVDVADMDLPPLIQESSGGGSKMGH

SEQ ID NO: 192611 - protein, 767 aa, Zea Mays
MDGDHRRQAAAAVTVTQVSPARRLIAWLRLLFRAFVHRYGKVASWNAAGRPVFVVLAVFFLQRSLRRRYLSWKESSRLPLMAAAAVTVQTTVRAMAAQRELSVRKQTRAATRIQAQWRAHRAVWSYLTTKRAAVICQRAWRQSVARKELRKLRLCVQENLEREMLEEVCRLREMVDVLQQAVNDAETRAVNEREAAKDAMAQLEAASAIEETVVMVEDTEKVKSLSAEVDRLKDLLGAEMSETFAAKKALSEAELRNEKLARLLGVEEVKNKRLQDTLKRMEEKASSLDEENRMLRQAVASNPAIVRSPSGENHEAPGIQAAPDNEKSRNGTVKPIAVDREANVHGAEQPSSNGQEAGKQQQELLIKCLSEDLGFSVGRPIAAYLIYRCLVHWRSFEEERSVVFDRIIQKITAALEARDNNDALAYWLSNSCALLVLLQRTLKINGVAALARQRRRTSSPLKVPQQENQDPAPDGQLICGLAQVYQVEAKYPAIAFKQQLTALLEKVYGMIRHNLKKELSPLLGLCIQAPRTFVVSPRGSCSQGTDLAQQASMAHWQSIIKILTNSLDVLKSNYVPPFLICKMFTQVFSFINVQLFNSLLLRRECCSFSNGEYVKAGLDELEHWCFWLTEEYAGSAWDELKHIRQAVTLLILDDKHSRSLAEITDDFCPVLSMQQLYRISTMYCDDKFGTLGIPSEVVSSMRTKMIEGSSSSPSAHDDINSFLLDDDFSIPFSVDDFTKLIVHVDVADMDLPPLIQESSGGGSKMGH

SEQ ID NO: 192612 - protein, 745 aa, Zea Mays
MDGDHRRQAAAAVTVTQVSPARRLIAWLRLLFRAFVHRYGKVASWNAAGRPVFVVLAVFFLQRSLRRRYLSWKESSRLPLMAAAAVTVQTTVRAMAAQRELSVRKQTRAATRIQAQWRAHRAVWSYLTTKRAAVICQRAWRQSVARKELRKLRLCVQENLEREMLEEVCRLREMVDVLQQAVNDAETRAVNEREAAKDAMAQLEAASAIEETVVMVEDTEKVKSLSAEVDRLKDLLGAEMSETFAAKKALSEAELRNEKLARLLGVEEVKNKRLQDTLKRMEEKASSLDEENRMLRQAVASNPAIVRSPSGENHEAPGIQAAPDNEKSRNGTVKPIAVDREANVHEKGAEQPSSNGQEAGKQQQELLIKCLSEDLGFSVGRPIAAYLIYRCLVHWRSFEEERSVVFDRIIQKITAALEARDNNDALAYWLSNSCALLVLLQRTLKINGVAALARQRRRTSSPLKENQDPAPDGQLICGLAQVYQVEAKYPAIAFKQQLTALLEKVYGMIRHNLKKELSPLLGLCIQAPRTFVVSPRGSCSQGTDLAQQASMAHWQSIIKILTNSLDVLKSNYLFNSLLLRRECCSFSNGEYVKAGLDELEHWCFWLTEEYAGSAWDELKHIRQAVTLLILDDKHSRSLAEITDDFCPVLSMQQLYRISTMYCDDKFGTLGIPSEVVSSMRTKMIEGSSSSPSAHDDINSFLLDDDFSIPFSVDDFTKLIVHVDVADMDLPPLIQESSGGGSKMGH

SEQ ID NO: 192613 - protein, 346 aa, Zea Mays
MDGDHRRQAAAAVTVTQVSPARRLIAWLRLLFRAFVHRYGKVASWNAAGRPVFVVLAVFFLQRSLRRRYLSWKESSRLPLMAAAAVTVQTTVRAMAAQRELSVRKQTRAATRIQAQWRAHRAVWSYLTTKRAAVICQRAWRQSVARKELRKLRLCVQENLEREMLEEVCRLREMVDVLQQAVNDAETRAVNEREAAKDAMAQLEAASAIEETVVMVEDTEKVKSLSAEVDRLKDLLGAEMSETFAAKKALSEAELRNEKLARLLGVEEVKNKRLQDTLKRMEEKASSLDEENRMLRQAVASNPAIVRSPSGENHEAPGIQAAPDNEKSRNGTVKPIAVDREANVHV

SEQ ID NO: 192614 - protein, 764 aa, Zea Mays
MDGDHRRQAAAAVTVTQVSPARRLIAWLRLLFRAFVHRYGKVASWNAAGRPVFVVLAVFFLQRSLRRRYLSWKESSRLPLMAAAAVTVQTTVRAMAAQRELSVRKQTRAATRIQAQWRAHRAVWSYLTTKRAAVICQRAWRQSVARKELRKLRLCVQENLEREMLEEVCRLREMVDVLQQAVNDAETRAVNEREAAKDAMAQLEAASAIEETVVMVEDTEKVKSLSAEVDRLKDLLGAEMSETFAAKKALSEAELRNEKLARLLGVEEVKNKRLQDTLKRMEEKASSLDEENRMLRQAVASNPAIVRSPSGENHEAPGIQAAPDNEKSRNGTVKPIAVDREANVHKGAEQPSSNGQEAGKQQQELLIKCLSEDLGFSVGRPIAAYLIYRCLVHWRSFEEERSVVFDRIIQKITAALEARDNNDALAYWLSNSCALLVLLQRTLKINGVAALARQRRRTSSPLKENQDPAPDGQLICGLAQVYQVEAKYPAIAFKQQLTALLEKVYGMIRHNLKKELSPLLGLCIQAPRTFVVSPRGSCSQGTDLAQQASMAHWQSIIKILTNSLDVLKSNYVPPFLICKMFTQVFSFINVQLFNSLLLRRECCSFSNGEYVKAGLDELEHWCFWLTEEYAGSAWDELKHIRQAVTLLILDDKHSRSLAEITDDFCPVLSMQQLYRISTMYCDDKFGTLGIPSEVVSSMRTKMIEGSSSSPSAHDDINSFLLDDDFSIPFSVDDFTKLIVHVDVADMDLPPLIQESSGGGSKMGH

SEQ ID NO: 192615 - protein, 548 aa, Zea Mays
MDGDHRRQAAAAVTVTQVSPARRLIAWLRLLFRAFVHRYGKVASWNAAGRPVFVVLAVFFLQRSLRRRYLSWKESSRLPLMAAAAVTVQTTVRAMAAQRELSVRKQTRAATRIQAQWRAHRAVWSYLTTKRAAVICQRAWRQSVARKELRKLRLCVQENLEREMLEEVCRLREMVDVLQQAVNDAETRAVNEREAAKDAMAQLEAASAIEETVVMVEDTEKVKSLSAEVDRLKDLLGAEMSETFAAKKALSEAELRNEKLARLLGVEEVKNKRLQDTLKRMEEKASSLDEENRMLRQAVASNPAIVRSPSGENHEAPGIQAAPDNEKSRNGTVKPIAVDREANVHEKGAEQPSSNGQEAGKQQQELLIKCLSEDLGFSVGRPIAAYLIYRCLVHWRSFEEERSVVFDRIIQKITAALEARDNNDALAYWLSNSCALLVLLQRTLKINGVAALARQRRRTSSPLKQENQDPAPDGQLICGLAQVYQVEAKYPAIAFKQQLTALLEKVYGMIRHNLKKELSPLLGLCIQVRSSVCQDAVLKQVYLPKIKK

SEQ ID NO: 192616 - protein, 638 aa, Zea Mays
MDGDHRRQAAAAVTVTQVSPARRLIAWLRLLFRAFVHRYGKVASWNAAGRPVFVVLAVFFLQRSLRRRYLSWKESSRLPLMAAAAVTVQTTVRAMAAQRELSVRKQTRAATRIQAQWRAHRAVWSYLTTKRAAVICQRAWRQSVARKELRKLRLCVQENLEREMLEEVCRLREMVDVLQQAVNDAETRAVNEREAAKDAMAQLEAASAIEETVVMVEDTEKVKSLSAEVDRLKDLLGAEMSETFAAKKALSEAELRNEKLARLLGVEEVKNKRLQDTLKRMEEKASSLDEENRMLRQAVASNPAIVRSPSGENHEAPGIQAAPDNEKSRNGTVKPIAVDREANVHEKGAEQPSSNGQEAGKQQQELLIKCLSEDLGFSVGRPIAAYLIYRCLVHWRSFEEERSVVFDRIIQKITAALEARDNNDALAYWLSNSCALLVLLQRTLKINGVAALARQRRRTSSPLKVPQENQDPAPDGQLICGLAQVYQVEAKYPAIAFKQQLTALLEKVYGMIRHNLKKELSPLLGLCIQAPRTFVVSPRGSCSQGTDLAQQASMAHWQSIIKILTNSLDVLKSNYVPPFLICKMFTQVFSFINVQLFNSLLLRRECCSFSNGEYVKAGLDELEHWCFWLTEEDLHGTS

SEQ ID NO: 192617 - protein, 602 aa, Zea Mays
MLEEVCRLREMVDVLQQAVNDAETRAVNEREAAKDAMAQLEAASAIEETVVMVEDTEKVKSLSAEVDRLKDLLGAEMSETFAAKKALSEAELRNEKLARLLGVEEVKNKRLQDTLKRMEEKASSLDEENRMLRQAVASNPAIVRSPSGENHEAPGIQAAPDNEKSRNGTVKPIAVDREANVHEKGAEQPSSNGQEAGKQQQELLIKCLSEDLGFSVGRPIAAYLIYRCLVHWRSFEEERSVVFDRIIQKITAALEARDNNDALAYWLSNSCALLVLLQRTLKINGVAALARQRRRTSSPLKENQDPAPDGQLICGLAQVYQVEAKYPAIAFKQQLTALLEKVYGMIRHNLKKELSPLLGLCIQAPRTFVVSPRGSCSQGTDLAQQASMAHWQSIIKILTNSLDVLKSNYVPPFLICKMFTQVFSFINVQLFNSLLLRRECCSFSNGEYVKAGLDELEHWCFWLTEEYAGSAWDELKHIRQAVTLLILDDKHSRSLAEITDDFCPVLSMQQLYRISTMYCDDKFGTLGIPSEVVSSMRTKMIEGSSSSPSAHDDINSFLLDDDFSIPFSVDDFTKLIVHVDVADMDLPPLIQESSGGGSKMGH

SEQ ID NO: 192618 - protein, 767 aa, Zea Mays
MDGDHRRQAAAAVTVTQVSPARRLIAWLRLLFRAFVHRYGKVASWNAAGRPVFVVLAVFFLQRSLRRRYLSWKESSRLPLMAAAAVTVQTTVRAMAAQRELSVRKQTRAATRIQAQWRAHRAVWSYLTTKRAAVICQRAWRQSVARKELRKLRLCVQENLEREMLEEVCRLREMVDVLQQAVNDAETRAVNEREAAKDAMAQLEAASAIEETVVMVEDTEKVKSLSAEVDRLKDLLGAEMSETFAAKKALSEAELRNEKLARLLGVEEVKNKRLQDTLKRMEEKASSLDEENRMLRQAVASNPAIVRSPSGENHEAPGIQAAPDNEKSRNGTVKPIAVDREANVHKGAEQPSSNGQEAGKQQQELLIKCLSEDLGFSVGRPIAAYLIYRCLVHWRSFEEERSVVFDRIIQKITAALEARDNNDALAYWLSNSCALLVLLQRTLKINGVAALARQRRRTSSPLKVPQENQDPAPDGQLICGLAQVYQVEAKYPAIAFKQQLTALLEKVYGMIRHNLKKELSPLLGLCIQAPRTFVVSPRGSCSQGTDLAQQASMAHWQSIIKILTNSLDVLKSNYVPPFLICKMFTQVFSFINVQLFNSLLLRRECCSFSNGEYVKAGLDELEHWCFWLTEEYAGSAWDELKHIRQAVTLLILDDKHSRSLAEITDDFCPVLSMQQLYRISTMYCDDKFGTLGIPSEVVSSMRTKMIEGSSSSPSAHDDINSFLLDDDFSIPFSVDDFTKLIVHVDVADMDLPPLIQESSGGGSKMGH

SEQ ID NO: 192619 - protein, 753 aa, Zea Mays
MQGGPLSPDEYWVISPPALLHQPASTIVVAIDRDRNSQLAVKWVVDHLLSGASHIVLLHVAVHYHTTHGFAMVETTQGALEAEMKEIFVPYRGFFNRNGVEVSEVVLEEADVSKAILGYITANKIQSIALGGANRNAFTKKFKNADVPSTLMKCAPDYCNIYVVAKGKSVNVRLAKCGVPPMHTGADIASDTDSLRESVLYMRRGSRGHLPRVTPDAWRSIDGRTPPELSTRPLFRERLLSSSATTKNFVVLPGKDNFETSSRSARHDSLGGDLDFGPSTRFSYIDLGENLDMSTTLPALEPMSPATGAQRDTEAEMRRLRLELKQTMDMYNAACKEAINAKQRAKEMHMMKLEEARRLEEARNAEEAALAVAEMEKAKCRAAMEAAEAAQRLADLEAQRRRNAEVRARREADEKVRALDAISNHDFRYRKYHIDEIEMATERFSDELKIGEGGYGPVYRASLDHTPVAIKVLRPDAHQGRKQFLQEVEVLSCIRHPNMVLLLGACPEYGCLVYEYMDHGSLEDRLFRRGGTPPLAWAQRFRIAAEIATALLFLHQTKPEPLVHRDLKPANILLDRNYVSKISDVGLARLVPPSVADNVTQYRLTATAGTFCYIDPEYQQTGKLGVKSDIYSLGVLLLQVVTARPPMGLTHHVEKAIDAGTFEQMLDITVKDWPVEEALGYAKLALKCTEMRRRDRPDLATVILPELNRLRNLGHAYEARMSAARANGGSGESGAQISGDSTTVGGSWETADS

SEQ ID NO: 192620 - protein, 443 aa, Zea Mays
MGLSGATISAPLGCCVLRCGAVGGGKALKADAERWRRAGWSRRVGGPKVRCVATEKHDETAAVGAAVGVDFADEEDYRKGGGGELLYVQMQSTKPMESQSKIASKLSPISDENTVLDLVIIGCGPAGLSLASESAKKGLTVGLIGPDLPFTNNYGVWEDEFKDLGLESCIEHVWKDTIVYLDNNKPILIGRSYGRVHRDLLHEELLKRCYEAGVTYLNSKVDKIIESPDGHRVVCCDKGREIICRLAIVASGAASGRLLEYEVGGPRVCVQTAYGVEVEVENNPYDPSLMVFMDYRDCFKEEFSHTEQENPTFLYAMPMSPTRVFFEETCLASKDAMSFDLLKKRLMYRLNAMGIRILKVYEEEWSYIPVGGSLPNTDQKNLAFGAAASMVHPATGYSVVRSLSEAPRYASVISDILGNRVPAEYMLGNSQNYSPSMLGIFGL

SEQ ID NO: 192621 - protein, 162 aa, Zea Mays
MSQKPFGIEYLHSTRTNKPALVHQNISADKVLLDYAYRPLISGCGLHKLLVDDLVFSTLKASAAMGYLAPEYTTVGRFSEKSDVYAFGVIVFQVLTGKSKVTTTHAQLPDNDVDELVDGNLQGDNYSAAEAAQLAKIGSACTSENPDQRPTMAELLQELSTV

SEQ ID NO: 192622 - protein, 88 aa, Zea Mays
MNSIISGRMSQSSELAHPIEKHSIGCMSAPWTGDGCAELLEGKGSLYSCLVISVISTEVTAYPRGLPRHVNPSRGAGTFSLGLELVIK

SEQ ID NO: 192623 - protein, 161 aa, Zea Mays
MASAAKTLARVGSSLFGRILASPSSSIPRAGLPLARLQPHVPPPAPAGVDAYEAETIARLSSLPGEISFPCGLPSLRFFIDDVEDPVPNDPFQLLPKRTYQPSTIKRKRTHGFLTRSVSLAFPWPLFCFPRPSLKKEDGFQVGIIKFCFRSCLPLAPHHLD

SEQ ID NO: 192624 - protein, 272 aa, Zea Mays
MTLRLLNTEHNHLLHPRPQSPRDAAALSSLLRSPRVSCSGQQSPKPKSAKMAHGGLERSLSFRNWEAASRGGGGINGARPGTLALQQQSPRRVVSVSPHPHPHPQAQAMIEYISPRPRVELDQAATTLQKAYKGLRTRRSLADGAIVAEELWWKTVDSVYLNIKSISFFHEDRQETAASRWSRAGKRVAKVGKGLCKDDKAQKLALQHWLEAIDPRHRYTTSGARAPAASPSSTGWMSAKAETCITRNAHEASSTHSSSCTSDQYVRCALCP

SEQ ID NO: 192625 - protein, 775 aa, Zea Mays
MFWRMTGLSAASPVDTILDKENFTLEELLDEDEIIQECKALNSRLINFLRDKAQVEQLLRYVVEEVPDDAERKRSFKFPFIASEIFTCEIDVILRTLVEDEELMDLLFSFVKPDHPHSTLLSGYFSKVVICLVLRKTAPLMSYVQGHPEIVVQLVDLIGITSIMEVLIRLIGADETIYSNYGDTLQWLENTNVLEMIADKFNSSDSPEVHANAAEILCAVTRCAPPSLAAKICSPSFVRRLFHHALEESRPKSVLLHSLSVCISLLDPKRLASASYQAFKSNLSHGALVMASPETVDGMLESLGNLLNLLDTSAAESVLPTTYGCLRPPLGKHRLKIVEFISVLLTIGSETAEKELVRQSAIKRSIDLFFEYPYNNFLHHHVENIIVSCLEGKRPEVVEHVLHECDIVGKILVSERLSSLSTESNGPTVPTEGKTHPRVGNVGHMTRIANKLIQLGNSNNTIQAHLQENNEWVEWQTNVLVKRNEVENVYHWACGRPASLHDRGRDSDDDDFRDRDYDVAALANNLSQAFRYGIYSSDDIEEAQGSLERDDEDVYFDDESAEVVISSLRLGDDQEGSLFTNSNWFTFDGERGIDDRSSASVPSSSPNSEETSLKTEEADDGKVIGTEDEMETVYLGNGSVEEVKDVAECTEQPNCCTEEERLKNEEGMEWHPNASNNDTEAEAAAESSAPSVEIVAEKTVDEPLEVGRKLDEPAESSLDSSVSVALPAPVNGSEPANSEVSSEQVAHATDVQQPVKEAPAEDDDAKKTDAAKTNE

SEQ ID NO: 192626 - protein, 486 aa, Zea Mays
MASPETVDGMLESLGNLLNLLDTSAAESVLPTTYGCLRPPLGKHRLKIVEFISVLLTIGSETAEKELVRQSAIKRSIDLFFEYPYNNFLHHHVENIIVSCLEGKRPEVVEHVLHECDIVGKILVSERLSSLSTESNGPTVPTEGKTHPRVGNVGHMTRIANKLIQLGNSNNTIQAHLQENNEWVEWQTNVLVKRNEVENVYHWACGRPASLHDRGRDSDDDDFRDRDYDVAALANNLSQAFRYGIYSSDDIEEAQGSLERDDEDVYFDDESAEVVISSLRLGDDQEGSLFTNSNWFTFDGERGIDDRSSASVPSSSPNSEETSLKTEEADDGKVIGTEDEMETVYLGNGSVEEVKDVAECTEQPNCCTEEERLKNEEGMEWHPNASNNDTEAEAAAESSAPSVEIVAEKTVDEPLEVGRKLDEPAESSLDSSVSVALPAPVNGSEPANSEVSSEQVAHATDVQQPVKEAPAEDDDAKKTDAAKTNE

SEQ ID NO: 192627 - protein, 513 aa, Zea Mays
MFWRMTGLSAASPVDTILDKENFTLEELLDEDEIIQECKALNSRLINFLRDKAQVEQLLRYVVEEVPDDAERKRSFKFPFIASEIFTCEIDVILRTLVEDEELMDLLFSFVKPDHPHSTLLSGYFSKVVICLVLRKTAPLMSYVQGHPEIVVQLVDLIGITSIMEVLIRLIGADETIYSNYGDTLQWLENTNVLEMIADKFNSSDSPEVHANAAEILCAVTRCAPPSLAAKICSPSFVRRLFHHALEESRPKSVLLHSLSVCISLLDPKRLASASYQAFKSNLSHGALVMASPETVDGMLESLGNLLNLLDTSAAESVLPTTYGCLRPPLGKHRLKIVEFISVLLTIGSETAEKELVRQSAIKRSIDLFFEYPYNNFLHHHVENIIVSCLEGKRPEVVEHVLHECDIVGKILVSERLSSLSTESNGPTVPTEGKTHPRVGNVGHMTRIANKLIQLGNSNNTIQAHLQVNVEIFWLMVICGFLLTIVFDYFFGFNRKIMSGLNGKQMCWSNVMK

SEQ ID NO: 192628 - protein, 452 aa, Zea Mays
MFAPTSWKTSSEEIVEFISVLLTIGSETAEKELVRQSAIKRSIDLFFEYPYNNFLHHHVENIIVSCLEGKRPEVVEHVLHECDIVGKILVSERLSSLSTESNGPTVPTEGKTHPRVGNVGHMTRIANKLIQLGNSNNTIQAHLQENNEWVEWQTNVLVKRNEVENVYHWACGRPASLHDRGRDSDDDDFRDRDYDVAALANNLSQAFRYGIYSSDDIEEAQGSLERDDEDVYFDDESAEVVISSLRLGDDQEGSLFTNSNWFTFDGERGIDDRSSASVPSSSPNSEETSLKTEEADDGKVIGTEDEMETVYLGNGSVEEVKDVAECTEQPNCCTEEERLKNEEGMEWHPNASNNDTEAEAAAESSAPSVEIVAEKTVDEPLEVGRKLDEPAESSLDSSVSVALPAPVNGSEPANSEVSSEQVAHATDVQQPVKEAPAEDDDAKKTDAAKTNE

SEQ ID NO: 192629 - protein, 331 aa, Zea Mays
MTRIANKLIQLGNSNNTIQAHLQENNEWVEWQTNVLVKRNEVENVYHWACGRPASLHDRGRDSDDDDFRDRDYDVAALANNLSQAFRYGIYSSDDIEEAQGSLERDDEDVYFDDESAEVVISSLRLGDDQEGSLFTNSNWFTFDGERGIDDRSSASVPSSSPNSEETSLKTEEADDGKVIGTEDEMETVYLGNGSVEEVKDVAECTEQPNCCTEEERLKNEEGMEWHPNASNNDTEAEAAAESSAPSVEIVAEKTVDEPLEVGRKLDEPAESSLDSSVSVALPAPVNGSEPANSEVSSEQVAHATDVQQPVKEAPAEDDDAKKTDAAKTNE

SEQ ID NO: 192630 - protein, 378 aa, Zea Mays
MFWRMTGLSAASPVDTILDKENFTLEELLDEDEIIQECKALNSRLINFLRDKAQVEQLLRYVVEEVPDDAERKRSFKFPFIASEIFTCEIDVILRTLVEDEELMDLLFSFVKPDHPHSTLLSGYFSKVVICLVLRKTAPLMSYVQGHPEIVVQLVDLIGITSIMEVLIRLIGADETIYSNYGDTLQWLENTNVLEMIADKFNSSDSPEVHANAAEILCAVTRCAPPSLAAKICSPSFVRRLFHHALEESRPKSVLLHSLSVCISLLDPKRLASASYQAFKSNLSHGALVMASPETVDGMLESLGNLLNLLDTSAAESVLPTTYGCLRPPLGKHRLKIVEFISVLLTIGSETAEKELVRQSAIKRSIDLFFEKAFIFVD

SEQ ID NO: 192631 - protein, 672 aa, Zea Mays
MDLLFSFVKPDHPHSTLLSGYFSKVVICLVLRKTAPLMSYVQGHPEIVVQLVDLIGITSIMEVLIRLIGADETIYSNYGDTLQWLENTNVLEMIADKFNSSDSPEVHANAAEILCAVTRCAPPSLAAKICSPSFVRRLFHHALEESRPKSVLLHSLSVCISLLDPKRLASASYQAFKSNLSHGALVMASPETVDGMLESLGNLLNLLDTSAAESVLPTTYGCLRPPLGKHRLKIVEFISVLLTIGSETAEKELVRQSAIKRSIDLFFEYPYNNFLHHHVENIIVSCLEGKRPEVVEHVLHECDIVGKILVSERLSSLSTESNGPTVPTEGKTHPRVGNDGHMRKKANKLIQLGNSNNTIQAHLQENNEWVEWQTNVLVKRNEVENVYHWACGRPASLHDRGRDSDDDDFRDRDYDVAALANNLSQAFRYGIYSSDDIEEAQGSLERDDEDVYFDDESAEVVISSLRLGDDQEGSLFTNSNWFTFDGERGIDDRSSASVPSSSPNSEETSLKTEEADDGKVIGTEDEMETVYLGNGSVEEVKDVAECTEQPNCCTEEERLKNEEGMEWHPNASNNDTEAEAAAESSAPSVEIVAEKTVDEPLEVGRKLDEPAESSLDSSVSVALPAPVNGSEPANSEVSSEQVAHATDVQQPVKEAPAEDDDAKKTDAAKTNE

SEQ ID NO: 192632 - protein, 146 aa, Zea Mays
METVYLGNGSVEEVKDVAECTEQPNCCTEEERLKNEEGMEWHPNASNNDTEAEAAAESSAPSVEIVAEKTVDEPLEVGRKLDEPAESSLDSSVSVALPAPVNGSEPANSEVSSEQVAHATDVQQPVKEAPAEDDDAKKTDAAKTNE

SEQ ID NO: 192633 - protein, 235 aa, Zea Mays
MQAQGSLERDDEDVYFDDESAEVVISSLRLGDDQEGSLFTNSNWFTFDGERGIDDRSSASVPSSSPNSEETSLKTEEADDGKVIGTEDEMETVYLGNGSVEEVKDVAECTEQPNCCTEEERLKNEEGMEWHPNASNNDTEAEAAAESSAPSVEIVAEKTVDEPLEVGRKLDEPAESSLDSSVSVALPAPVNGSEPANSEVSSEQVAHATDVQQPVKEAPAEDDDAKKTDAAKTNE

SEQ ID NO: 192634 - protein, 314 aa, Zea Mays
MLRGSAALLRRLAPRISGGGCGNTTHRRLLPPIAPFLRARFLSAPTTSSPPSSSSAACHEEDAEDRDLPEISNGDAGARLSISVDRSGLYNPTEHSHEPSSESELVKHIKSIIKFRSGPISIAEYMEEVLTNPQSGFYINRDVFGESGDFITSPEVSQMFGEMIGVWAMCLWEQMGKPAKVNLIELGPGRGTLLADLLRGSAKFANFTKALSINLVECSPTLQKIQYNTLKCEDEHVGDGKRTVSKICGAPVCWHASLEQVPSGSPTIIIAHEFYDALPIHQFQKASRGWCEKMVDIAEDSFLFNLPRQALWLG

SEQ ID NO: 192635 - protein, 210 aa, Zea Mays
MRRTETSPRSPMVMQVPGSASPSTAPGSTTPQVLLCQNAAEHSHEPSSESELVKHIKSIIKFRSGPISIAEYMEEVLTNPQSGFYINRDVFGESGDFITSPEVSQMFGEMIGVWAMCLWEQMGKPAKVNLIELGPGRGTLLADLLRGSAKFANFTKALSINLVECSPTLQKIQYNTLKCEDEHVGDGKRTVSKICGAPVCWHASLEQHQP

SEQ ID NO: 192636 - protein, 261 aa, Zea Mays
MRRTETSPRSPMVMQVPGSASPSTAPGSTTPQVLLCQNAAEHSHEPSSESELVKHIKSIIKFRSGPISIAEYMEEVLTNPQSGFYINRDVFGESGDFITSPEVSQMFGEMIGVWAMCLWEQMGKPAKVNLIELGPGRGTLLADLLRGSAKFANFTKALSINLVECSPTLQKIQYNTLKCEDEHVGDGKRTVSKICGAPVCWHASLEQVPSGSPTIIIAHEFYDALPIHQFQKASRGWCEKMVDIAEDSFLFNLPRQALWLG

SEQ ID NO: 192637 - protein, 55 aa, Zea Mays
MVPLSILVPLIEGSGCTTGSTLFSTSTSLLISPYSSRTKGFVSSHLQTPSTKNRY

SEQ ID NO: 192638 - protein, 282 aa, Zea Mays
MKRATSWIFVGTFGRVLECWDRETHEYVAIKVVRSIRKYRDAAMIEIDVLNRLAENEKYRSLCVQIQRWFDYRNHICIVFEKLGPSLYDFLKRNRYQPFPVELVREFGRQLLESVAYMHELRLIHTDLKPENILLVSSEYIKVPSTKKNSQGEMHFKCLPKSSAIKLIDFGSTAFDNRNHNSIVSTRHYRAPEIILGLGWSFPCDIWSVGCILVELCSVRSLHTLYFSSTSLVIVFLTSHFLGGSIVSDTRESGTPSNDGEGFGTSTRGYDTESKLFSSEIF

SEQ ID NO: 192639 - protein, 203 aa, Zea Mays
MESSRSRKRTRQAHDCAAAPPPEREVVARGGASPPWREDDRDGHFVFDLGENLTRRYKILSKMGEGTFGRVLECWDRETHEYVAIKVVRSIRKYRDAAMIEIDVLNRLAENEKYRSLCVQIQRWFDYRNHICIVFEKLGPSLYDFLKRNRYQPFPVELVREFGRQLLESVAYMHELRLIHTDLKPENILLVSSEYIKVPSTKV

SEQ ID NO: 192640 - protein, 208 aa, Zea Mays
MHELRLIHTDLKPENILLVSSEYIKVPSTKKNSQGEMHFKCLPKSSAIKLIDFGSTAFDNRNHNSIVSTRHYRAPEIILGLGWSFPCDIWSVGCILVELCSTHENLEHLAMMERVLGPLPEDMIRKASSSAQKYFRRATRLNWPEGAVSRESIRAVRKLDRLKDLVSRNADHSKVALVDLLYGLLRFEPSERLTAEEALDHPFFRNPT

SEQ ID NO: 192641 - protein, 178 aa, Zea Mays
MHFKCLPKSSAIKLIDFGSTAFDNRNHNSIVSTRHYRAPEIILGLGWSFPCDIWSVGCILVELCSGEALFQTHENLEHLAMMERVLGPLPEDMIRKASSSAQKYFRRATRLNWPEGAVSRESIRAVRKLDRLKDLVSRNADHSKVALVDLLYGLLRFEPSERLTAEEALDHPFFRNPT

SEQ ID NO: 192642 - protein, 117 aa, Zea Mays
MESSRSRKRTRQAHDCAAAPPPEREVVARGGASPPWREDDRDGHFVFDLGENLTRRYKILSKMGEGTFGRVLECWDRETHEYVAIKVVRSIRKYRDAAMIEIDVLNRLAENEKYRSL

SEQ ID NO: 192643 - protein, 171 aa, Zea Mays
MHYMHELRLIHTDLKPENILLVSSEYIKVPSTKKNSQGEMHFKCLPKSSAIKLIDFGSTAFDNRNHNSIVSTRHYRAPEIILGLGWSFPCDIWSVGCILVELCSVRSLHTLYFSSTSLVIVFLTSHFLGGSIVSDTRESGTPSNDGEGFGTSTRGYDTESKLRNILGEQHD

SEQ ID NO: 192644 - protein, 328 aa, Zea Mays
MESSRSRKRTRQAHDCAAAPPPEREVVARGGASPPWREDDRDGHFVFDLGENLTRRCTFGRVLECWDRETHEYVAIKVVRSIRKYRDAAMIEIDVLNRLAENEKYRSLCVQIQRWFDYRNHICIVFEKLGPSLYDFLKRNRYQPFPVELVREFGRQLLESVAYMHELRLIHTDLKPENILLVSSEYIKVPSTKKNSQGEMHFKCLPKSSAIKLIDFGSTAFDNRNHNSIVSTRHYRAPEIILGLGWSFPCDIWSVGCILVELCSVRSLHTLYFSSTSLVIVFLTSHFLGGSIVSDTRESGTPSNDGEGFGTSTRGYDTESKLFSSEIF

SEQ ID NO: 192645 - protein, 285 aa, Zea Mays
MKRATSWIFVGTFGRVLECWDRETHEYVAIKVVRSIRKYRDAAMIEIDVLNRLAENEKYRSLCVQIQRWFDYRNHICIVFEKLGPSLYDFLKRNRYQPFPVELVREFGRQLLESVAYMHELRLIHTDLKPENILLVSSEYIKVPSTKKNSQGEMHFKCLPKSSAIKLIDFGSTAFDNRNHNSIVSTRHYRAPEIILGLGWSFPCDIWSVGCILVELCSVRSLHTLYFSSTSLVIVFLTSHFLGGSIVSDTRESGTPSNDGEGFGTSTRGYDTESKLRNILGEQHD

SEQ ID NO: 192646 - protein, 141 aa, Zea Mays
MGEGTFGRVLECWDRETHEYVAIKVVRSIRKYRDAAMIEIDVLNRLAENEKYRSLCVQIQRWFDYRNHICIVFEKLGPSLYDFLKRNRYQPFPVELVREFGRQLLESVAYMHELRLIHTDLKPENILLVSSEYIKVPSTKV

SEQ ID NO: 192647 - protein, 661 aa, Zea Mays
MADPPAPDTQLEQASPAAAPADPAEDAPVEKSPAAPLTLEPDAAAVSDGAAGEVEDEEYVSDPDDEALPTMRRREASDDEGSEDGRPTARMGPDQDDDGQGAPEAYDDEVDEEDKEYYDEEDMGEGFEEEYEGRVALPMDDGGGSQVSRGEDGVAMEEGLTEGEAKGEGGEKEQEPFAVPTSGAFYMHDDRFQEENRGRRRRMFGVRKLWDVKDNQAWVHDRFEEMNLHDDFYEDQRMSRGRGGRGKARGGGRGFSRGGKQRNYHEDSNNTQNRTPKVVRGRGPRRYEAAARNNREVVGSQRKQAARFRESAPNAVAARDSGQVSHAQPEAAPPKRNVMSSSLNSASPPFYPSSASTQDFPVAAQTRDIQAGGSNKIPPSSMKMDDNSKLQSGSMVRGRIAMDYGGRDKLLADGPIRSSQGRAPTASLNSGFTSSSVNPGQSPIARASGGNSNIGISSNNQPQSHGSVMHQKLGQVQNQSATRIPTQQLSHRTSNLSPVAQHLPGKSGESGENGSYPTLNDSKTASAVVKVNSQETGMSSFMYGGTQVIGAAGLSQGDQNFPGTPALLPVMQFGSQHPGGLGVPTVGMALPGYVAQQQMGMGNNEMTWLPLLAGAAGAFGGSYPPYIALDPSFYSRSSGQTSSSVPSRSISGPCQSLWCTT

SEQ ID NO: 192648 - protein, 652 aa, Zea Mays
MADPPAPDTQLEQASPAAAPADPAEDAPVEKSPAAPLTLEPDAAAVSDGAAGEVEDEEYVSDPDDEALPTMRRREASDDEGSEDGRPTARMGPDQDDDGQGAPEAYDDEVDEEDKEYYDEEDMGEGFEEEYEGRVALPMDDGGGSQVSRGEDGVAMEEGLTEGEAKGEGGEKEQEPFAVPTSGAFYMHDDRFQEENRGRRRRMFGVRKLWDVKDNQAWVHDRFEEMNLHDDFYESLLQDQRMSRGRGGRGKARGGGRGFSRGGKQRNYHEDSNNTQNRTPKVVRGRGPRRYEAAARNNREVVGSQRKQAARFRESAPNAVAARDSGQVSHAQPEAAPPKRNVMSSSLNSASPPFYPSSASTQDFPVAAQTRDIQAGGSNKIPPSSMKMDDNSKLQSGSMVRGRIAMDYGGRDKLLADGPIRSSQGRAPTASLNSGFTSSSVNPGQSPIARASGGNSNIGISSNNQPQSHGSVMHQKLGQVQNQSATRIPTQQLSHRTSNLSPVAQHLPGKSGESGENGSYPTLNDSKTASAVVKVNSQETGMSSFMYGGTQVIGAAGLSQGDQNFPGTPALLPVMQFGSQHPGGLGVPTVGMALPGYVAQQQMGMGNNEMTWLPLLAGAAGAFGGSYPPYIALDPSFYSRSSGQTSSSVPSR

SEQ ID NO: 192649 - protein, 648 aa, Zea Mays
MADPPAPDTQLEQASPAAAPADPAEDAPVEKSPAAPLTLEPDAAAVSDGAAGEVEDEEYVSDPDDEALPTMRRREASDDEGSEDGRPTARMGPDQDDDGQGAPEAYDDEVDEEDKEYYDEEDMGEGFEEEYEGRVALPMDDGGGSQVSRGEDGVAMEEGLTEGEAKGEGGEKEQEPFAVPTSGAFYMHDDRFQEENRGRRRRMFGVRKLWDVKDNQAWVHDRFEEMNLHDDFYEDQRMSRGRGGRGKARGGGRGFSRGGKQRNYHEDSNNTQNRTPKVVRGRGPRRYEAAARNNREVVGSQRKQAARFRESAPNAVAARDSGQVSHAQPEAAPPKRNVMSSSLNSASPPFYPSSASTQDFPVAAQTRDIQAGGSNKIPPSSMKMDDNSKLQSGSMVRGRIAMDYGGRDKLLADGPIRSSQGRAPTASLNSGFTSSSVNPGQSPIARASGGNSNIGISSNNQPQSHGSVMHQKLGQVQNQSATRIPTQQLSHRTSNLSPVAQHLPGKSGESGENGSYPTLNDSKTASAVVKVNSQETGMSSFMYGGTQVIGAAGLSQGDQNFPGTPALLPVMQFGSQHPGGLGVPTVGMALPGYVAQQQMGMGNNEMTWLPLLAGAAGAFGGSYPPYIALDPSFYSRSSGQTSSSVPSR

SEQ ID NO: 192650 - protein, 491 aa, Zea Mays
MGTAAVVEDTIRVVLTCLPDPPFRTTGSSRPYQSPSGGGGGGDRISRLSDAVLSNIVARLPAKDAARTTALSRRWRRVWASTPLVLDDSDLLVFHDDGGCSTPNWLAVTDTVSHVLSSHRGPIRFVRLTCCYMALASHNGALQYWLRVLAAGGVEDLVLVNRPLPTSVGLPIDVLHLASLRTLYLGFWCFPDTATLPRGRATVFPCLQEIGLCATVIHARDIDHLLACSPVLEKFASITSIYFTDPVRIRSCSLRCLVFWESLANELDLVVAPRLQRLILWQSRQWMIGSVHFRSRIRIGSATELKVLGYLEPSIHQLEIGGTIIDMTPSNMVPSVKILALKMQFRIRKEVKMLPTFLRCFPNVETLHVLSHETDEQNGKFNLKFWEEVGSISCLETRITKVVFDKFRGERCELAFLKFVLERAESLLKLVVVLANGDQASVDEMLAKLKSLTTVKRASDFPTLLAVAREGDSAWYFERASDLSVTDPFDL

SEQ ID NO: 192651 - protein, 333 aa, Zea Mays
MGTAAVVEDTIRVVLTCLPDPPFRTTGSSRPYQSPSGGGGGGDRISRLSDAVLSNIVARLPAKDAARTTALSRRWRRVWASTPLVLDDSDLLVFHDDGGCSTPNWLAVTDTVSHVLSSHRGPIRFVRLTCCYMALASHNGALQYWLRVLAAGGVEDLVLVNRPLPTSVGLPIDVLHLASLRTLYLGFWCFPDTATLPRGRATVFPCLQEIGLCATVIHARDIDHLLACSPVLEKFASITSIYFTDPVRIRSCSLRCLVFWESLANELDLVVAPRLQRLILWQSRQWMIGSVHFRSRIRIGSATELKVLGYLEPSIHQLEIGGTIIDWNKDDPI

SEQ ID NO: 192652 - protein, 301 aa, Zea Mays
MVTSQETSLATSCRRVYAHAHDYHINSISNNSDGETFISADDLRINLWNLEISNQSFNIIDVKPTNMEDLTEVITSAEFHPTHCNTLAYSSSKGSIRLVDLRQSALCDTHYQIFEQHEAPGSRSFFTEIIASISDIKFSKDGRHLLSRDYMTLKLWDVKMNSGPVATFQVHEYLRPKLCDLYENDSIFDKFECCQSGDGLRVATGSYSNIFRVFGCGTGNSEATTLEATRNPTRRQLQNPTRATRSLSSLTRAVRRGGESTGIDVNGNSYDLSTKLLHLAWHPSENLIACAAANSLYMYYA

SEQ ID NO: 192653 - protein, 342 aa, Zea Mays
MNLDRSAAPANGSPGGVGYLSPSLSNGNALKPGRLPLLRLPVVTSQETSLATSCRRVYAHAHDYHINSISNNSDGETFISADDLRINLWNLEISNQSFNIIDVKPTNMEDLTEVITSAEFHPTHCNTLAYSSSKGSIRLVDLRQSALCDTHYQIFEQHEAPGSRSFFTEIIASISDIKFSKDGRHLLSRDYMTLKLWDVKMNSGPVATFQVHEYLRPKLCDLYENDSIFDKFECCQSGDGLRVATGSYSNIFRVFGCGTGNSEATTLEATRNPTRRQLQNPTRATRSLSSLTRAVRRGGESTGIDVNGNSYDLSTKLLHLAWHPSENLIACAAANSLYMYYA

SEQ ID NO: 192654 - protein, 334 aa, Zea Mays
MRLHWSVSPRPPLPSSKTTHGPSPRPPRNPTSRIETRVRVSSLPPRFEPIRLGPRRAMAAGSIVVDFPSMGAALCFPNLESLLRDSASGFLSAVSAAPAPGAADLTNFHRVFSRVLSTYSDPPLEVVWFFSALSFHDRPDDLRSLLQLLSAFAASSPGAAKPLALLAPVVSELFHSDKPRRETEAVVEAVLSYISICSSRPAPSSTEGTTADAVRLLPAFGDLVKVWSVRHSRERCPFQVLFPLAGDEARRELMKEGCSVDYLAGVVLVEAFLLRLCLKVQNATGVPRSELQKELKIWAVSSIPVFQSHQFFGVLLNMLLNSPLPVYSLVVCVS

SEQ ID NO: 192655 - protein, 276 aa, Zea Mays
MAAGSIVVDFPSMGAALCFPNLESLLRDSASGFLSAVSAAPAPGAADLTNFHRVFSRVLSTYSDPPLEVVWFFSALSFHDRPDDLRSLLQLLSAFAASSPGAAKPLALLAPVVSELFHSDKPRRETEAVVEAVLSYISICSSRPAPSSTEGTTADAVRLLPAFGDLVKVWSVRHSRERCPFQVLFPLAGDEARRELMKEGCSVDYLAGVVLVEAFLLRLCLKVQNATGVPRSELQKELKIWAVSSIPVFQSHQFFGVLLNMLLNSPLPVYSLVEER

SEQ ID NO: 192656 - protein, 226 aa, Zea Mays
MAAATMALTSRALVGKPATSTRDVFGEGRITMRKTAGKPKPAASGSPWYGADRVLYLGPLSGQPPSYLTGEFPGDYGWDTAGLSADPETFAKNRELEVIHCRWAMLGALGCVFPELLARNGVKFGEAVWFKAGSQIFSEGGLDYLGNPSLIHAQSILAIWACQVVLMGAVEGYRIAGGPLGEVVDPLYPGGSVRGAQGQGDQERPPRHVLHVRLLRAGHRHRQGSR

SEQ ID NO: 192657 - protein, 87 aa, Zea Mays
MLALALGPVREPDGRRDGDGDGCCSGRLFLLERSPRRKPSRDTSSPASASRGHVLMHVSGCQSSAHHCMRSCACVQWPGGHRTYAGL

SEQ ID NO: 192658 - protein, 231 aa, Zea Mays
MDVSGKVVQTSWWHLHAVLGSRGVCIRCATGKRSWHGALPKFRAVIKTAGLKRVWLTGGRQAQAEGLCLCTCCCKRREDAGACVGPGPRARWTTGRRRRRLLLRPAVSARALAPPQALARHVQPGVRVAWTRPDACQRLPEQRSSLHAFLCVRTMARGPPYVRRLVATSNSWSSPASYCGWRLARLRLRARCHCAAAWWSVHGGAGRQASKGNHRFPGSRRSRVYHTRAVC

SEQ ID NO: 192659 - protein, 324 aa, Zea Mays
MAAGEGGGGDIGADSERRLQKAMDKLYHFPKPKSSSTGGSKPSSSTSAPSSGRAVGKAAAEAARRFGVVRGSRLPHQMLAMAAISPPPPCRPWDRADLMRRLGSFKAMTWFAKPKVISPVNCARRGWTNIEPDVITCEACGARLLFSTPSSWTTQQVEKAAAVFSLKLDSGHKLLCPWIDNICDESLALFPPTPPPVLVGNYYELLSSLLRLLALPRISCSSLETMKKRNPQLEQFLSEPFSSSVVLKGGLMLTEDSTIKDLDDAFQDADTYYQALKIISLCGWEPRLLPYAVDCGTEFHSDANSTSKLAQPEQSSKTMEDRVP

SEQ ID NO: 192660 - protein, 276 aa, Zea Mays
MAAGEGGGGDIGADSERRLQKAMDKLYHFPKPKSSSTGGSKPSSSTSAPSSGRAVGKAAAEAARRFGVVRGSRLPHQMLAMAAISPPPPCRPWDRADLMRRLGSFKAMTWFAKPKVISPVNCARRGWTNIEPDVITCEACGARLLFSTPSSWTTQQVEKAAAVFSLKLDSGHKLLCPWIDNICDESLALFPPTPPPVLVGNYYELLSSLLRLLALPRISCSSLETMKKRNPQLEQFLSEPFSSSVVLKGGLMLTEDSTIKDLDDAFQDADTYYQVP

SEQ ID NO: 192661 - protein, 73 aa, Zea Mays
MLGRKRPARMESWNIGRRSAAAATDVSLEQSGFDKMQINLVYIVFHTCKDCLANYKIISVFWFGLRVHLCMKY

SEQ ID NO: 192662 - protein, 205 aa, Zea Mays
MTTAGEVDSAAGGEDLEPLFDYKRVQPRMTFCFDDSDLEVADIFKYCNKRPKVHTSTEEGKPDEEVAAAKVVVLDEEDWLQPPPPKAAFRATAEEDSAFRELRLKKQEWAKFAESAEDILQKLDEITNKEVGPKEPPEQIILDEESEPQVEKAREKIVISIQDKDGQQQMRVYKDEKFDKLLKVYAKKDLDLEDEDMIEVRRKQS

SEQ ID NO: 192663 - protein, 110 aa, Zea Mays
MTTAGEVDSAAGGEDLEPLFDYKRVQPRMTFCFDGFAGFDVQTATWRWPTSSNTATSAQRSTPPRRRRVSLTRRSPLPRWWSSMRRIGCSHRHPRPHSGQRQRKIVRFGN

SEQ ID NO: 192664 - protein, 210 aa, Zea Mays
MTTAGEVDSAAGGEDLEPLFDYKRVQPRMTFCFDDSDLEVADIFKYCNKRPKVHTSTEEEGKPDEEVAAFRATAEEDSAFRELRLKKQEWAKFAESAEDILQKLDEITNKEVGPKEPPEQIILDEESEPQVEKAREKIVISIQDKDGQQQMRVYKDEKFDKLLKVYAKKAKLNPSDLSFVFDGEKINPSSTPQDLDLEDEDMIEVRRKQS

SEQ ID NO: 192665 - protein, 208 aa, Zea Mays
MTTAGEVDSAAGDSDLEVADIFKYCNKRPKVHTSTEEEGKPDEEVAAAKVVVLDEEDWLQPPPPKAAFRATAEEDSAFRELRLKKQEWAKFAESAEDILQKLDEITNKEVGPKEPPEQIILDEESEPQVEKAREKIVISIQDKDGQQQMRVYKDEKFDKLLKVYAKKAKLNPSDLSFVFDGEKINPSSTPQDLDLEDEDMIEVRRKQS

SEQ ID NO: 192666 - protein, 190 aa, Zea Mays
MTTAGEVDSAAGGEDLEPLFDYKRVQPRMTFCFDDSDLEVADIFKYCNKRPKVHTSTEEGKPDEEVAAAKVVVLDEEDWLQPPPPKAAFRATAEEDSAFRELRLKKQEWAKFAESAEDILQKLDEITNKEVGPKEPPEQIILDEESEPQVEKAREKIVISIQDKDGQQQMRVYKDEKFDKLLKVYAKKGP

SEQ ID NO: 192667 - protein, 202 aa, Zea Mays
MTFCFDDSDLEVADIFKYCNKRPKVHTSTEEEGKPDEEVAAAKVVVLDEEDWLQPPPPKAAFRATAEEDSAFRELRLKKQEWAKFAESAEDILQKLDEITNKEVGPKEPPEQIILDEESEPQVEKAREKIVISIQDKDGQQQMRVYKDEKFDKLLKVYAKKAKLNPSDLSFVFDGEKINPSSTPQDLDLEDEDMIEVRRKQS

SEQ ID NO: 192668 - protein, 244 aa, Zea Mays
MEPLRLLSETSKEPRPAMLMLGMLPERRLPSSLSTRSAVRLLSAKGMGPDRNSALRTGSWSTSSGMVPRTRLERSESARRLVSRPSVPGGMAPTRPTPGSRTSTTVALALSHVTPTQPHAGVEAFHPRRRSCGVAVRNASSADRSLGGGSATAQRVKAAAAASRTASAATDAPGPAIATRGGAATRLTGEALGGGPRGGAGAGAFLLTGWRCRFSLLSAGGGFLLLGGEKFGEEEVGTCAWAWW

SEQ ID NO: 192669 - protein, 259 aa, Zea Mays
MRMRSPTTTAPTTMPAIAAPESFRFLDEPGAGPPPPPPPEGGLGPPGDGAGGKNGLLQGGSGSPQSWRFPAKDSRGKRESDLGMEPLRLLSETSKEPRPAMLMLGMLPERRLPSSLSTRSAEQRLEDRQLEHVVGDGPEDAVGAERERAEVGEPAERARRDGADEADAREPHLDDGGVGVVARDPDPAARRGGGVPPEAALVRGRGQERQQRRPLPRRRLRDGAACEGRGSSEQDRQRRYGCAGAGHCDARWSCDAAYG

SEQ ID NO: 192670 - protein, 157 aa, Zea Mays
MQVLDGGVNGIAAKHVDERRKPLNLLDGLVDARDRVAEPAMRDVRPSLSSILDCSRLSPPCSHRPTRRTTCQTLATGSAAAATTSGVCSLPSDSRQRQTLRLGDGHTGEEVIPTCHGRGGGEGVRLTGDWTRPPIPPAVADVSVQAWHLETGSSLLI

SEQ ID NO: 192671 - protein, 370 aa, Zea Mays
MQSINNTSTECTTICQVYAICQGHYKIEEKRGVTVTDNGNTEVKSSPSLANGIHSEPMSGQIPVAKSSPAWDEDWGPTKKSGVPSLSVDSSAQTKQPSVDPFDFGTQTKQSTTLPFDLSTQAKQPPSVSHVTAATIPPAQPQPSLQSLAASSGPKISGSCVPVDIEWPPRRSSSSNFNAPLSISKDNGSGRLSSDGVDDIDPFADWPPIPSNVNSISATEHWPSINQNISGFSSGNIVFGGSGNSVGQTKSNQMSWSNTSNLMGTNSTGSYLNQGSAALGFGNPNGGLSTGLSNPSSSSTGLSMMLPKSDSGSLSTSVNNAAHGLLRLAPPPSTSVGRGRGRNQGQSALSRASRPHANSASGQQPILDLL

SEQ ID NO: 192672 - protein, 214 aa, Zea Mays
MAMATEPVFASVANALGCLDNVGKVPKEVKGMEMGLLEIKHGLLQVAETLDFLHNNAHLAHRAISPETVFITSNGSWKLGGFGFALSVDQAAVGLSLTSSQLFHYSDYDVEDTALPLQPSLNYTAPELVQSRDSKVGSACDMFSFGCLAYNLVARRPLLDCHNNVKMVLLSSGMIRGCALFVSLTICLYVFIIPLDKLKGCNLLFLYQSFFFAV

SEQ ID NO: 192673 - protein, 170 aa, Zea Mays
MAMATEPVFASVANALGCLDNVGKVPKEVKGMEMGLLEIKHGLLQVAETLDFLHNNAHLAHRAISPETVFITSNGSWKLGGFGFALSVDQAAVGLSLTSSQLFHYSDYDVEDTALPLQPSLNYTAPELVQSRDSKVGSACDMFSFGCLAYNLVARRPLLDCHNNVKMFCK

SEQ ID NO: 192674 - protein, 350 aa, Zea Mays
MYNNLPSICYLSRTLQDNGNTEVKSSPSLANGIHSEPMSGQIPVAKSSPAWDEDWGPTKKSGVPSLSVDSSAQTKQPSVDPFDFGTQTKQSTTLPFDLSTQAKQPPSVSHVTAATIPPAQPQPSLQSLAASSGPKISGSCVPVDIEWPPRRSSSSNFNAPLSISKDNGSGRLSSDGVDDIDPFADWPPIPSNVNSISATEHWPSINQNISGFSSGNIVFGGSGNSVGQTKSNQMSWSNTSNLMGTNSTGSYLNQGSAALGFGNPNGGLSTGLSNPSSSSTGLSMMLPKSDSGSLSTSVNNAAHGLLRLAPPPSTSVGRGRGRNQGQSALSRASRPHANSASGQQPILDLL

SEQ ID NO: 192675 - protein, 396 aa, Zea Mays
MIDKARRHFTQAGHLQHSDPAEWHKLQEVEVHLGRCTDARKIGDWKSALREADAAIAAGADSSQLLLALRSEALLRLHKLEEAESTLASLLKLDSALPSSLTAAKLSGMLAESYIHIVQAQVDMAFGRFDTAVAAAEKARDLDPGNAEIGMVLNNVRLVAKAREQGNDLFKAAKFLDASIAYGEGLKYDPLNSVLHCNRAACWSKLEKWGKAVDDCNEALRIQPNYTKALLRRAASYAKLERWVDCVRDYEVLRKEFPSDKEVAEALFHAQIALKATRGEDVSNMKFGGEVEMVSNVEQLNAAISSPGVTVVYFMSTMNQQCTQITPSINILCTECPSVNFLKVNVNSSPMVARTENVRIVPTFKIYKGGVKVKEMICPSLHVLRYSVRHYSVSSS

SEQ ID NO: 192676 - protein, 55 aa, Zea Mays
MINCVCVLFCFSLWEEPRVCVEEKASRSTLVDVIAMHKSESPSFLQTLIGFVYGP

SEQ ID NO: 192677 - protein, 681 aa, Zea Mays
MDAADPLCAITSPARLLPRTLGPTPSKVRGALLEAIALARSRKGSEELVKQAAMVLKEHGDIQTLYHDDAMKAMPPTNVSKGQQGRRAALDRKRARFTMKDTGSKAVPVVDRSKLLNISDPVAFFMALDRLEEAEDEIKRLNGEAEKRILIFDPLDEPIRQPGLRGFKVTEDATTQDPIEVLASQTATMTGSQFSQDVMHAVADKNEQSVPSRSGEAISDVSGKEDSLAEKDGRDDLAYLLTSIQDLDESEEEAFIRKTLGLKEIRKGRVSLCNSIPGVRSLRSDTEQKGSMKVRPPESHLPQTRQDRISELEKHLFPGGAANAKCTDDESEGSPDIVMGEPSLVHDSSEVLMTNENSTGSEIDRRTPNLCARAADHALDPEPNLPDHAYERQTRGSSLGLCKNTEVANEHEEDDVHIEYPTTGGSTYQTEVSSHDLEGSLTEELVSEPGRHAAPDDIYRTSHAAEDSIQHLEVVKQGGVLQDKSSQSLEMPLEDIDPLYRPQMHGGSTKKSTPVLCNALSPIEQKQQAAQEGKRKQQAKRVKKVSDESSHALEISQANFEPENEPHNVDVNMEQPTVMSSAKGQKGAQRRNKTKKLNQRKILGDVDLARQSGVRRSSRIRSRPLEYWLGERLLYGPIQDTLPAVIGIKAYSPGQDGKKTLKVKSFVSEQYSDLVAQFAKY

SEQ ID NO: 192678 - protein, 577 aa, Zea Mays
MRDRRAALLLRETAWTPPTLSAPSPRLRGSFRGPLAPPPRRSAVRSSRPSHSPGRGRKSFRSFKVTEDATTQDPIEVLASQTATMTGSQFSQDVMHAVADKNEQSVPSRSGEAISDVSGKEDSLAEKDGRDDLAYLLTSIQDLDESEEEAFIRKTLGLKEIRKGRVSLCNSIPGVRSLRSDTEQKGSMKVRPPESHLPQTRQDRISELEKHLFPGGAANAKCTDDESEGSPDIVMGEPSLVHDSSEVLMTNENSTGSEIDRRTPNLCARAADHALDPEPNLPDHAYERQTRGSSLGLCKNTEVANEHEEDDVHIEYPTTGGSTYQTEVSSHDLEGSLTEELVSEPGRHAAPDDIYRTSHAAEDSIQHLEVVKQGGVLQDKSSQSLEMPLEDIDPLYRPQMHGGSTKKSTPVLCNALSPIEQKQQAAQEGKRKQQAKRVKKVSDESSHALEISQANFEPENEPHNVDVNMEQPTVMSSAKGQKGAQRRNKTKKLNQRKILGDVDLARQSGVRRSSRIRSRPLEYWLGERLLYGPIQDTLPAVIGIKAYSPGQDGKKTLKVKSFVSEQYSDLVAQFAKY

SEQ ID NO: 192679 - protein, 214 aa, Zea Mays
MAHRGRSIAMAEYNIDKSSQSLEMPLEDIDPLYRPQMHGGSTKKSTPVLCNALSPIEQKQQAAQEGKRKQQAKRVKKVSDESSHALEISQANFEPENEPHNVDVNMEQPTVMSSAKGQKGAQRRNKTKKLNQRKILGDVDLARQSGVRRSSRIRSRPLEYWLGERLLYGPIQDTLPAVIGIKAYSPGQDGKKTLKVKSFVSEQYSDLVAQFAKY

SEQ ID NO: 192680 - protein, 250 aa, Zea Mays
MEDFYDIKSSRVDDKQINFFGVFDGHGGTHAAGYLKQHLFENLLKHPAFIGDTKSAMSQSYKKTDADFLDTEGNIHVGVGSTASTAVLIGNHLYVANVGDSRAVLSKAGKAIALSDDHKPNRSDEQKRIEDAGGVVVWSGTWRVGGILAMSRAFGNRLLKQFVVADPEIQDLEIDGDTEFLILASDGLWDVVPNEHAVAFVKDEDSPEAAARKLTEIAFRRGSTDNITCIVVEFCHDKMVDGSPPSTNKS

SEQ ID NO: 192681 - protein, 287 aa, Zea Mays
MACNRGVKEQEDPSAASAAPAPAAVARARAARPPRPRSRKGLGVRHLLKPCRFLAAVQRANARVREAGEATLVAALAAAQKESERENEVVADVCGGWKSEDGSLNCGYSSIRGRRVNMEDFYDIKSSRVDDKQINFFGVFDGHGGTHAAGYLKQHLFENLLKHPAFIGDTKSAMSQSYKKTDADFLDTEGNIHVGVGSTASTAVLIGNHLYVANVGDSRAVLSKAGKAIALSDDHKPNRSDEQKRIEDAGGVVVWSGTWRVGGILAMSRAFGNRLLKQFVVADPEIQ

SEQ ID NO: 192682 - protein, 171 aa, Zea Mays
MEDFYDIKSSRVDDKQINFFGVFDGHGGTHAAGYLKQHLFENLLKHPAFIGDTKSAMSQSYKKTDADFLDTEGNIHVGVGSTASTAVLIGNHLYVANVGDSRAVLSKAGKAIALSDDHKPNRSDEQKRIEDAGGVVVWSGTWRVGGILAMSRAFGNRLLKQFVVADPEIQK

SEQ ID NO: 192683 - protein, 272 aa, Zea Mays
MACNRGVKEQEDPSAASAAPAPAAVARARAARPPRPRSRKGLGVRHLLKPCRFLAAVQRANARVREAGEATLVAALAAAQKESERENEVVADVCGGWKSEDGSLNCGYSSIRGRRVNMEDFYDIKSSRVDDKQINFFGVFDGHGGTHAAGYLKQHLFENLLKHPAFIGDTKSAMSNIHVGVGSTASTAVLIGNHLYVANVGDSRAVLSKAGKAIALSDDHKPNRSDEQKRIEDAGGVVVWSGTWRVGGILAMSRAFGNRLLKQFVVADPEIQ

SEQ ID NO: 192684 - protein, 310 aa, Zea Mays
MAMGFRMLSSQETALCAGENGTIDGQGSAWWDMWKNRTLLYTRPHLLELMSSSDIIVSNVVFQDSPFWNIHPVYCSNVVIRNVTILAPHDSPNTDGIDPDSSSNICIEDCYISTGDDSIAIKSGWDEYGIAYGRASSGITVRRITGSSPFAGFAVGSETSGGVENVLAEHLNFFNSGFGIHVKTNTGRGGFIRNITVSDVTLDNVRYGLRIVGDVGNHPDDSYNRSALPIVDALTVKNVQGQNVREAGLIKGIPNSAFSRICLSNVKFTGGAPVRPWKCEAVSGGALDVQPSPCTELTSTSGTSFCTNSL

SEQ ID NO: 192685 - protein, 385 aa, Zea Mays
METVATATYDHFDSDNFTFHSWQKKIYISKSNSLVAAAGEMPPRRRDRRRLRDPSPPSSDARAPPSALGLRLTLLVPLLILVLVLAALGFSGLLSHSPPHSQTLQTTAHSVYERGLVKRDVSAREILSEHTRVSENRSQRNFANPVLAYVTPWNSKGYDMAKLFITKLTHVSPVWYDLKRLVLEGEHNFDAKWVSELQTNGSLVVPRIVLEALPAVLLFEKKQKAKAIDIIVSECRDKGYDGIVLESWSRWAIYGVLDDQELRYMALEFVKQLGEALHSVNSKSSSHHLELIYVIPAPRMQKLNNQDFGPKDLMHLADTVDGFSLMTYDFSGPQNPGPSAPLKWIHHSLAALLSAKGSSHSNSHSRMIFLGINFYGNDFLLSGGW

SEQ ID NO: 192686 - protein, 240 aa, Zea Mays
METVATATYDHFDSDNFTFHSWQKKIYISKSNSLVAAAGEMPPRRRDRRRLRDPSPPSSDARAPPSALGLRLTLLVPLLILVLVLAALGFSGLLSHSPPHSQTLQTTAHSVYERGLVKRDVSAREILSEHTRVSENRSQRNFANPVLAYVTPWNSKGYDMAKLFITKLTHVSPVWYDLKSDRNRLVLEGEHNFDAKWVSELQTNGSLVVPRIVLEALPAVLLFEKKQKAKAIDIIVSECS

SEQ ID NO: 192687 - protein, 220 aa, Zea Mays
MLPGEVPRHRDVLLLRRSPLPMQTVWTGTPVVMEAPRPHPTVLPLPPRVLAVVPARLPHIPFPMFRARRCVWAWRRQARPKPPAMAGAVVPRQRRWLLQMLGGEHGDRAAAGPAGLPPLGDDVAGARDLVPQLVQLAQQLDGVLLQRGPARAAPPVAALRPLLRPDPPPVLHLLEITPHGGGGEAAPRSRFLPPDRQALALSLRRSSLRRGGVAAAPVLH

SEQ ID NO: 192688 - protein, 598 aa, Zea Mays
MYAAFDSGNYFVIPGPPSEAFSYHEDVRISLGLSPKDFLIAIVGTPFSYGDNLMEEALVLQAVSPLLRRYHSENSAQSELKVKIFTGNITEKHRMALESVALSVGFPRGAAEHVAAEDKDILLRTADLVIYYSCLEEQLFPSVLVEAMSLEKLVIAPDLGIIRKHIDDGVNGLLFPRKNVGMLAQVLLQAVSNGKVSISGQKIASAGKAHAKNLMASETIEGYAVLLENVVKFPTDALHPLTVDEIPLALKKEWKWHLFEDVKHLHHMNTSLSSYKILKKLEQEWHRNQMENSSLSTTKISDTFSAIAWEEQRANEVMDIKRKMEEDELKDRNDQPHGTWEEVYRNVKRVDRLKNELHERDDKELERTGQPLCIYEPFFGEGTWPFLHQSSLYRGVGLSSKGRRPGADDIDASSRLPLLNNVYYRDILGEFGAFFALANRIDRIHKNSWIGFQSWRGTARKANLSNNAEFAILEAVQSQKHGDSFYFWVRMDQDPRNHTYKDFWSFCDAINAGNCRLAVLEAFQRMYGVHLDHDLDSLLHMPNDGDTWSVMQSWVLPTRSFLEFVMFSRMFVDALDAQMYDKHHQTGHCILSLHKLFL
